United States Patent Application Publication US 2014/0057251 A1 - sequence listing, part 114

SEQ ID NO: 212400 - DNA, 611 bp, Cannabis indica
gtttgatgataaatttatttcttcgacatgtctggttgtgccgctgaatgggaaaaactgtttggagtcgttgtatgagcggttaagaaaacagaactttcttttttaagggtggtgcaggtgcaccaaaggtggaatagtaggtgagtatgattactttcatccgggactttatatgggacaaaggcgatgatcaaggaggttgagccattttatactaggaggaggtgtgtatgtggtagaagactgagccgaggatcatgaattgaatcctataatctagaatctaattcggctagtaacttataagggtatgataatgagatcatttatgaagctaagacgaggggtttattttgttcgtctgagatgatacaacgatgatgaggtatgctattaagtatgaccagttgttcaaccttgtatatgaagtggcaactgaaagtattgggaagggtaaggttcattcaaagagtggaggagcacaaaacatgagatgtgattataatgactaatcaacatgtgagttaatagacgtatacttaagtggttaagctaggtaatactattgatatggactggggatttgctataaaggaaagatcccttga

SEQ ID NO: 212401 - DNA, 585 bp, Cannabis indica
tggctaaaagacccaagaaaaggtctgagctttaaactgtgtctatcttgaaacactgctctgtaactcaatggcctatgtgcttgcaacgccatctccatgattgttcttgaaagaaaagaatgtctgagttgttcaagagagagtcttaaatcagcaaaacatgctctgattgatccaacaagtcatacctcccttctctctctctgtcaagagtattgtattaatgatataaatatgtaagaattaatatagtaatgtaggaaatccagtggtaagaaacggaaaattgggactaagaatctcaggctcttcaagaacatgtgtctattgttaacatcacattcctatttctgaccgttgataaagactgcggcggaattggacggtggagattgaatgttttaagtatgtgattagtgaacaaatgtggttcgaaatcgattgggttattataaatattaaaaagtattatatatttgctaaatttaaggaaaaaaaggtaggagctttaagaggctaggagtagtgataggttacctcgtaagaaatcaatgaggtgttgccacgtgaggacaaaaatct

SEQ ID NO: 212402 - DNA, 701 bp, Cannabis indica
ttaatgtgaagcttattaatccactcaattgccacagtagaatcactattaataatggagacattgaaaacaaatttatgcgcaagagtcaagcccagatgaatagcatgcagctccgccacattagcaaaaaactcacctagcacacctgatgatcacgccagctaaaccacactcgctgcatcccgtatcactcctccaaaccaacaaacgcccctcccctaaacaatcgaagcatttgttgctagagcaaaggaatctggaggtggtggcatccaccgagtaggtcggcctgcaactggctttgcaaggcccaatcgcaaatgaagacctatccgaccatactccttaaactccgcaagatggttatgggctaaatctggtataacatccaattttgactgcttgttgccaaataatactgagtttctatcataccacaaccaccaaagggttgtcatcatcaattcaaaatcctcacgggatagcttgtcaaagagacgtatgtgaatttcatgcattggtccataaaaacattgacggagtactgaccacacccccaaccgactgccacactagaattaaacaacaataggaaaataaagcatgctcacactattacaaaattgaactttgcatcgatcaacatgtcagtcaacactaaaaactgacacaaaatttggttctaaattttgcgtcag

SEQ ID NO: 212403 - DNA, 560 bp, Cannabis indica
acctattgtagaagaagatgtgtttgacgatttaagcattcacatcgctctcaggaaaggggttcccctgcactcaacatcccattcacaactatttgagttactcaagcttatctcctacctatagagcttttatcactgctctggaccaagttcaaatttccaattcagttcaagaagctctacaggataccaattggaatgctgccacaatggaggaaccaggagcactcgaaaaagaataaaacatggattatcacagatctacctaatggcaagcgcatagttggttgtaaatggatcttcttggtcaaatataaggttgatgggagcattgaaagatttaaagctcgattagtggctaaaggattcacccaatcatatggcattagtcaccaagagacatttgctccttttgctaagttgaacaacatccgaatactcttatctattgcggtaaacaatgaatggtcgttattcaagcttgacgtgaagaatgtttttcttaacgacgaccttgtggaagacgtatacatagacattcctccaaaatttgagga

SEQ ID NO: 212404 - DNA, 1122 bp, Cannabis indica
tgacattgttgtttttgagaacacttcaatcttagttactgaaaaaaagacagaaagaaaggggttgttttaaagtctccctttatggaactaggatctgttgaagctaatttagattcaatatctaattctcctgatggttctcttttaaaattgtgaaatatgttcctagattatgtctattggatgataatattgggaaaactgttgaccaaattttgaaggctaattttgatgtttggttaaggtatggtttgagatacgaagaaattaacataattgtttattttttattagtttcttctctaattttattatttttagagtcattgtatctaaatatatacatatgtattttcttgtttccagcaaaacaataaattgttgtaaatcttttacatttttatccctgaaatttttacatttttatatatatatacattatatatatgcattgtcttgttccagcaaaacaactgaagagcaatgataagatttctccttcatttcgttttggtgttgataaagtcgataacaagatgtgtttcacaagcttagttatcgtggtaattttttgacttcttcagtaagtgtttttcttacagttgtttgcttatttatattacttttatttttgtgtttttttttttttgttttttttcttctcttttttcagtatattgatattattttctactatatgcgtaaaaaaaaataagtatacaaacgtgttcacttgtatacactgtggcatgttcaccgtggcataacatagtcttttagactgaatggataaatagctaacataaatggaatttggctagtattgtcaccaaaaactcaatttaggtggttaattgttaaaaaatataagggctaattacataaaacacaaattgttataaaaaaatttacatttttatgttgaaagttttttttatatatatttttacggtattctataaaaaacacaagaaaacaacaaaaaattacatgaaagtaacaaaaaaaataacatcaaaacaatataaaaattaatatacaaatgacaaaaaatcaataataaaataacaagaatgtaacataaaaatacataaaagaccgtatttcatgtaaataaaa

SEQ ID NO: 212405 - DNA, 512 bp, Cannabis indica
atgaggccaagagagagataaaaaaaaagtttagcttgagtgagagagagagtgataaaagttattgtaaatataaatataattttaatttaatgtaaaaagagagattttgttaattaaataataaaattaagcacgataaaccttaatttttcttttattatcggtgattagagtaagatctatttctttctaaaattaatatttaattatacctattttttaaaagttccctacaataggtaacctgattgaatttgaaaaaaaaaattaatagatgagagatcatttgcatcagaaaattagagaaaaaaagtgagagaggagggttaacacaaataaaaaaatctagaatttaagctcaataaagtaagcctaaaatcaataaaacttaaaaaaaaaaaaaaaaaaaaaaaaaacaaaaaaaaaaaaaaaaccaaaactaattaacataggacactaccccaacgattaaacttgctaacaatcttagactaacgagatcatcattt

SEQ ID NO: 212406 - DNA, 569 bp, Cannabis indica
actcctatcctgtctcttatcaacttatttttatggggtatgttgaaaaatactttttttatttttcaatgaactaaatttacctactaattttatatttaattaaaacatatctctttttatatgtattgtactcaaaatatcctgaaataaaggagttatatggagagttgaacaggggtaaaattggtaaagtatttaaaaaaaagaggtaaaaaatggtaagttttaaaaaagagggtaaaaataaaagagaacaatatgaaaagggtatacagtctaatttcctctatttttatttatgtaggatttgatttagcctattttgagggcaacgtaaaactcaaatttagtgataaattaatattaaaagaagtattattttaagcccaagaatatcggcccaactataagaaccaaggaagcggctacgttggccaggaacgaagacagcggctacaggagcgtcgtcagtcgtccgtacgtcatcgaccaacgtcaccgtcggacggccaccgtcctgagagcggttcaagagcagtcgtcgtcagtcgtctatgagggggttc

SEQ ID NO: 212407 - DNA, 540 bp, Cannabis indica
tttatgaggatttgatttagcctattttgagggcaacgtaaaactcaaatttagtgataaattaatattaaaagaagtattattttaagcccaagaatatcggcccaactataagaaccaaggaagcggctacgttggccaggaacgaagacagcggctacaggagcgtcgtcatcgtccgtacgtcatcgaccaacgtcaccgtcggacggccaccgtctgagagcggttcaagagcagtcgtcgtcagtcgtctatgaggggttcaaagagcagtcctctgagagtggttcggttcggttcaacgacgtcctgttttagatttttttttttcatggggttagaattataaggagttcattctttaattaattttaatgttgtgatcgtgtttatgtgttgaaactaatttagtttttttattttcgggattctgctagttgtggtacgattatggaagacggtacaggggtgcatatggtggaagcattcaagaagaagaaaattggttgtgttcacccgaaattgctaagataatag

SEQ ID NO: 212408 - DNA, 544 bp, Cannabis indica
tcatcatttgactccaatagcctgtatagcaatcagaactgagttataaagtgattctcctagcaaaggagagattcctggagctccaacttctaattctagcagtcattctctcagctagaatttcacattcttttcctgaaatcctcttcccacatattggtattcctagataggtaaaaggcaactcctgctttatgaaccctaatatctgcataatatggttcacttctctaggcttcatgttactacaatatatggcagttttactggcatttggatacagtccagatgtaagagagaaagtttttagtgcctgcaacatgtatagaatactcatgaagtctccatgacaaaataaaaggacatcatctgcaaaagcaagatgattaagtttcaatgcagaacatctatcatgaaacttgaacccctctttttccccaactttcttcatcaatctagataagtactccatgcccagaacaaaaattaagggcgatatcagatcaccttgcctaattcccctcttggcttcgaagaaacc

SEQ ID NO: 212409 - DNA, 518 bp, Cannabis indica
tggaaatgttgttttcgaaccccatcataagcaaaggacaactttacataatccctctccacacttgatcactcaaaactaagcctagactcaactaattccaccttagattgatctcaaccaacttaacaaacgtccaagttggcattactaactccaactgccatttactctctcaatcgacttcaataagaagatataagtacctttgatcatgttgatcaagttagtgagagaagctctaagaatgttaaagagagaaagaaaagaaagagagttagaattttggtttctacgaaaaagagaaaagctatcgaaaaatcattgagattacctgtcaaagattgtgacaagaaatctcctccattattgtaattgttcaagctttcatcatagtgaaaagagttgatcttcccgaggagagctcacaaggatgtagccaaagttttagggtgaaccttgccaaaattcttgtgtttgatctctacttttctttgttttactttttctttaattct

SEQ ID NO: 212410 - DNA, 554 bp, Cannabis indica
ccggatgaagatgagtttgaatactgcaattttggctaatcaaagtaccattattggtggtcggatcatccaagacaatgctattttaggatatgaaagcctccattgtatgagaaaaggtagacttgacaatgaaaaaaatggcattaaagcttgatatgtcaaaagtgtacgacaaggtggaatgggacttccttgaagctatgatgtcttgtctggggtatgaagatgactagattattaaggtaatgaattatgtctgatcagtgtccttttcaattcttattaatggttcggtcagaggaaactttactccagaaagggggttacgtcaaggagaccccctatcacctttcctttttttattatgttcattcatgaggctaagcgggttgggagaatccatgggctgcactttgggacaatggaacaaaggtttgccccatctcctatttgaggatgatagcctcgttttccttgatgccaatatggaagatgtccttgctctaaaggaggtgttggagtgctatgcaaaactatcgggttaatgtatt

SEQ ID NO: 212411 - DNA, 570 bp, Cannabis indica
ataaaataatccaacgttcaccatatccccaaattgggaaattagttcataatctcaacattcaaatcaatgattaaaccaaaaatagaataaaacataagaaattaaagggaagagaaggaaactagatagaaaactcgatcgaatcgccacactcgctcccagaatcttcttcttttattttctagggttcttttctaaatgaatccataaaaattcgaaacctcccttttgaaactcatttttacaacttaacatcgagaaaagacgaaaatctccttgttgacgtgtaatatccagtacaagtatattattatttggtatattattgtgtgttataatattttatcgttgcactaaataagatatgaattggtatttgctaagtataattattttttttatttttagagattttgatagttagattaaatgttagtaacttttaattgtatttagaaaataaaatttattagtgaatattggtatgaatagataataagattgttatatatatatataataggattatataatatatatacgtataattattattatataaaaaaa

SEQ ID NO: 212412 - DNA, 510 bp, Cannabis indica
aaaatgtatgtacatacagatattattttttttattatgtgttactcttatatttaatatcaatattttattaattatttttatattatttttttaataatttcttgatattaatataagtaaagctacttgttctaaaaaaaaataaataaagaaagttattaattaaatatatgatatactcttattaattctaaaaataattaaaaaaacaaaataataataattgtcaaaaaaattactataaggagaaatattatagatatcttttttggaagtttttggtgttagaatttttatcaaaaaataaaaaaaaataaaaagatttggtgacagactttgtttgtttagtgactttcattgatgaagttaaaagattttctcttttattagatgattaacgattagaatttggaagaaacacaaatttataataaattctccttatcagacactagtttcagcgagaagataaaacatctcggtgcaagctgtaaattattaacgtaa

SEQ ID NO: 212413 - DNA, 597 bp, Cannabis indica
tcagtatcttgaaggaatgataccaaatcttttggctcaatggctttgattcccggtatgtactcgatagtgtcttctctattatctagtccacacaaaaaataaaataaatttactgtatacatcaatatcccaaagctaataactataactattttttttgaacaataactataactattaatatacatgggaaatgaataaaaatataataaagttgtacgtctctatggtaattatataataacgttaagatcaaattgttattcttcttattaattaagaggttattttgataataatatagttatttggtttacgatatgagcgtttctattttaatttttttttatatgatatctattgtatattttagttataatagtcatgttgtcccttttcaaaaattgttgaagttgaaaataaagttaaaaatagtgtgtatgttgcatgtgtaaaataaaagaagtacgtgtaaaattgaatgtttaaattttatattttctaaaaataggtacaatgtttagtataactatgatttttataattataatatataaaatgattagttcacaattacataaaaataacaaaaaa

SEQ ID NO: 212414 - DNA, 539 bp, Cannabis indica
acctggaagaagcttcaagaagaagactatcttttttctttgtaatgaaataaaagagatatgttgatcggctttgagaattaataagatgatttgctagcaaaaaaaaattagaagtaaaaaaataatacaaattaataatttttttatccatagtaaaataatttacgcaacaaagaaaaagaaaaatcaccttagattacatccgttacctctatttttaactcgtccgaattctttttaataatatcaaatataactatttgatgaacttaaaatgaaaaaagaaacataaaaactgaataaggaaaattaattactttcaggtatagaagctagcttcaacttataagctttactattttaagcatgtacttagaatttcttgtaaaaaaaaaaaaaaacaaaaacaaaaaatttgaatgttaaggaaaaataattacttcatgcttacaagcttctacaaggtcttctattctattgatgaatgtcaatgcacatacatcacataaacaatttctccatattgagagagaaag

SEQ ID NO: 212415 - DNA, 627 bp, Cannabis indica
aaaaaaaaaacttggggagaaagataaataaaaaaacgtttgtggaaagaaatccatgattaaggttagggagtagggacctactttcggtggaattgaatgagttggcaatggcatgacaatatatgggttcttctgttgtaaaaatgggatctaaaagtcagaaaaccggaacggtgcattaagaaggtcggttagaatcggcacgtgtcggcggtccactccatttctcctaatcattttgttcctttcaactcacatcctctcttttacttttcctttttatggcttcaaagtcaaaaaccaattccaacaaaacaaaacaatcgtttacttattggacaaatatcaacgactagctagctacaacataacaaaaagtctcatcactttcgatataatttatgtacatacaaaataataatcacgaaggtatatatcagttccataagatcttattaaatgtcgtgaaccctcgtttctcagtcctttaatcacatgataatatagaagaaaacagatgatgaattgcacttcatatcatatgtatactatacatgactttgtagatcttattacaactatttcaatatgcaaaccattgacctgatttcaaaaaaaaaaaaa

SEQ ID NO: 212416 - DNA, 766 bp, Cannabis indica
tgtattttgattttatgttttgaggcatcatcgtatataattctttgtaaaactttttataacaggatccctggaacacgttttttatgccattataatgtctatttttagtgttttattttagtccagtttttaatattatcacggtttttaataattaattaatctattagtattaaactagtttatgaaatcacacacgtagcgtccctatagattagagctttacaactttgtatcagagcaaccatggttttaaaggaccggaagactggtcgtatatgtacattttttatgaggacaggtcgactcatggtatagtaagtatttatattatttgctatcggattacctgcctaggctattataaaatatgttgggaaaagtagcatagtgatgattttgataagaatatgcgtatcttatattcatattgatattggtgtgagttttaaatggctagaagatgtgaactaaatgtgtgataagttatgcagtaggactaggggtgtttgcggtgcgggtggtgcgattttttaccattttttcaaaccaacccgcacatgcattttttctaattttccaaaccgcacccgcaccgcaaaactaagaaactgcaaaaaccgcactgcaaaaaatggtgcggtgcagtttttgaagtttttacagtttgaacaatcaccaaataattaaactatcacaaatacaacaaagcttgagcaacacttatcaaaaatgccataaggcatcgatctaattgattaca

SEQ ID NO: 212417 - DNA, 533 bp, Cannabis indica
ttggaacttcagccagatttttcttatgaagaacaacctgtgcgaattctagacagaagggagaaagtcttgagaaacaagacaatagcactggtaaatgtattatggaggacttgtaaagtggaagaggcaacctgggaactcgagacggatatgcaacagaaatatccagagttgttcaggtaaatttcaggatgaaatttcgataaggagggggtaattgtaagaccctaggattaagagaatggattagcaaaaccctaactagttaattatatattattgtggaattatattattatataatttaatatgtgagaatttatatgatttatcacatgttcagaccccgttggtgagctaggggcattttagtaattttgatccgagaagggtaaaattatgatattaatatatttacgtgtttatgggactatattattatatagtacacctgtattgtcttttcaggtgtgttctgaagagtttgcgcggtataatcacaactgtgtatttcgggccgaatcgggttc

SEQ ID NO: 212418 - DNA, 777 bp, Cannabis indica
gcaagagcatgcgcgaccttattaaaactacgagaaatccaactagcaacacaatccaatatctaacaaaacacagtttagagaaagaaaaatgtagattccagcaaggagattttcctccaatcaaagccttgaccattggaataatatccgtgaagaaatccactcctccaaactgcagctccaaagccaaatcagcaccaataatcagagcctccatttcaccatgaaaaatgccctgaaccacaactttcttcgcgccacaaaccaagacgaaacctaggaatcaaaaaacaccactgccacagccccaacatcatttgccaaagcaaaatgcacataatccctcactttgccaggcctaggaaggccccagcgcacctaaaactatgtcatcattaagaagtcgtgtctaaaaatattagtcacaaatttaaaatttattgcaactaaacttattaataactaaaatgagtaatgacatgtgcacacatgaatcacacacaaatataatacacttatatggtaagtcacttttaataagtgagacccaaatttataaataaaaatgattagttgaagtggtttgccacatatatgtgtgttacacatttgtgtgtgcacgtattattatttttttgttgagactaaaagtgatatttaatcataaaaaaatttattttgttactaaaaataattataaataaccgatataaaattatttttagtgtggtagctagcaacatttctaagtataatatatatttgtaaatatat

SEQ ID NO: 212419 - DNA, 768 bp, Cannabis indica
tatgagtaagaaatccaaattcttgatgtgaaaatatgtttatgagaaaacccaattggttattctttcatcaatagtttatttaagctaaacaacaaagcctagcttaacttgacaagtgaccactcaactcactcaatcatcttctgtttctaataaaatacaatgaacacgatgaaaagctactaactataaccaatttacacacacacacattttatcaaacagtatataatcaactacaacaatatcaaaaaaacaaacagttagaaatgacaatggcaagaaattgaacccacaaaagaaaaacagagaaaattcaaaattaccaaccagatatgatgaacaacagcaagattgtgagtgtagcagctgcttaagcttgaagtgttctcagaggtaagaggatgaagatgagggaagaaggtaccggaaaacagaaactacaagaacatgaaatgttttttttttttattattattattttggatttatatcaataaaggtcctccaatatcataaaacattacacttagatcctcgaattttattttatatcatttaagtccccaaatgcactaaaatatgtactaaaatcctttataaaaaaatgtactaaaatgttacatctaaatgacgtgtattgttttttttttaaaaaatagtaaatttaaataaatataattagttaaaaaaatattatataaatttttaatctagtacacatattattattaattttatagatgcttaaaaaaataaagttat

SEQ ID NO: 212420 - DNA, 948 bp, Cannabis indica
aaaaaaactaaaataaaataaacatatgttgcattaaaaattaattttaagagacaaaatggaagaagctattttcactaaatataaatatttttttgtggttataagtatagtttagtggttatgcatctcttcttataaagaggaggtttcaagtttgaattctctttcctaatatcaaaattaaaaaaaaatagtaaagtcgatacaatttcaagttttactaatagggtttgataaatgctatatttaatgtgatttaaaaaaaaaataatttaaaataaatcgatacaattaagatatacttagagtgaataatagaaaaattagagtttcttgttcttaaatttattagctattattaggttttttttttttttttttttatttttttttttttctggccatgtttattgaccttccttgagattagcttaggtgtggtttggtcggatttgtattttactattgcaattagtctagttttgcacgttttctttttgtatatgcatgtgacatagttttgagtgttgtagtcttgttcgcgtgacatgattttattttgtttcgttgttgattcatatttgttctttgatggcttgccatcaaatcgttgttagtagttacgaataacaagttctttgcgactgaatcaattttttttttttgaaacccgactgaattagttgctagtagtgcagttacgtatcttaaacaatagttgactactcaagttacgagattaaatgaacgtgctgcaacggtttctaccgttgtgtcttcttagcattggattaaacataatgtaggtattcttactgttaattgtgatgctataatttttttaatttgatttaattttagtttttttatcaaacgatttaaaaattaaacggctaattatttgactcgtttttctaattctaatctcagtcgtgtctcccaagt

SEQ ID NO: 212421 - DNA, 614 bp, Cannabis indica
taatagttaccatgtaaagaaaaaaataatactcatagaggctctaacttgacctctactcaaacaaaatcctaagccttaggtaaaataaaatctgaattccatgtacaaatatttttctaataaattaatattaaacatagtagtttgatgtagtggtaaaagttttaagagattaaaagtgcacaaaaaaaaaaataaaatatcattttatttggtttaagtctataatcaaaattttgaagtactaaatttcagtagccaagatacggtctcgtctgccttagtctaaaactgactctacttaatacaagcttgttgggtgttaggttcgtttctatttgttttactctattctaagtttcatttagctcaagactctccacaatgaaaatttacttttcatatacttatacactacaagctaaaagtacacatgtgagttgtgttaggtttctcatcctaaacctacagccaaatcatatattattgaatgggttaattgcagcataatcctaatagtgttgccttgcttgcaattaatttttaaaatctatttttttgacggtaaaatttttaaatttaaattctgttagtacttagacacttttaac

SEQ ID NO: 212422 - DNA, 685 bp, Cannabis indica
ttggagatcctgagttcgagtcccaagttaaatatgattgtaatatataaacgcttaaatataaaaaaaaaaaaaagtcctgaacattcgatttttcttcaatctaaaaaaatagcttataaatgcttaagcaaacaggatcataatcattaagatggtactatgtacctcaaattgagcaattagtaagtgttaaccatcgaattctaattattgacaattaatataattgtggatttgtgtgattatattaggcatataaaaattctaacaccctaccaacacattaattctcacataagcgcaaacactgctgctctagagcttcattactttatgtgaatcaaagaaactaacaaagtcattatcaatattcaacgactctaaaaatggtgagcaggacagggaagtaacccatcatggaacgagaaattcaacttccgggcagagtatccaggctctggaaacaatttcaagctcaacctcaaaattctagacaaggacactttctcagccgatgatttcataggccaagcaacgtaaaataaactactcatcatatagcttgcagactcaataattttggtgaaatgggaaatcatattttctattctaattcaaacatttttattagagcaggatctatgtggaggatttattggcattaggagctgagaatggagct

SEQ ID NO: 212423 - DNA, 560 bp, Cannabis indica
aaattgcttgttgaactgaagagctcttcctctgctactgatatggaaaattttgtgcaagaaaaaaccaattattttgagatccttgctcaacaagaagtgtactggaaacagagatcaaagcaatattggcttcattcgggtgataaaaataataaatatttccatgccactgctagtgccaggaaaagatcaaatctaattcaacaattgcaagactcaaatggctcttggaagaattggtcaaccggccttgatacagtgatcaatgactactttcttaatctattccaatcatccaacacttcggcccagcagattatagacaatatcagagtttcggttactgcttttcataatgaagcactgctacaaccgattggtgatgaagaagttaagtctgctgtgttctctatgcatcctgacaaagcacctggtcccgatggtatgtgtcctggtttctttcaacatcattggcaagttgtgggtactgatgttatacaattagtgaaagatttctttgtctctggaatacttcctgctggtctaaatgataccca

SEQ ID NO: 212424 - DNA, 916 bp, Cannabis indica
tatataaatatatataaatacttatatagctatagaaaaaaaatggcctttatttagaaaaaaaaatgtgatatttttcaaaaccaacaaaagaatgtgcaattttcaaagaggaatttttttggaccctgaactaagtgggctctagacacaggcctatagcccgtctatacctaaaatcgggcctgatcacatgccccaatatatataaacatatacataggaaaattgagatattatattgggataagttgaaaatacattctttttttatctattaatcaaaaataccttcatattgtttttttattaaaatatactcacttttttgagtggattgcctaatatatcctcactctctacttaagtgtagcatataatttacataacttaaggggtcttatgggaacatcatccataaaagtggctatatctaaaaatatgaaaaatgaaagtaaaaattaaaacaagtaaaataaagtgggtatacaatataattttctctattatatttttgtcactttaaaaaattataattcaatttttttatatgatatgggtgttcattattatagtcataaataaattttatttttaaaaataaaatttaaatattaatttgaattctatttttgatatggtaattatttagaatttttttgaaaattgcttcggatgctagctatacactgattaattataataataaccatatatataatataaaaatatatatataaacaaaaacgttcctgccgataaacacatcattaattattatatatttaatctgtacattgtatactaatatatatatatatatatataattatatatgcagattcgatgacataaacacagaaagattgataatggaaaggaaagaaagtgggattgaaacagatatattttactt

SEQ ID NO: 212425 - DNA, 507 bp, Cannabis indica
atagaagaactcaaaaaaacgaggacaagcattttatccaaaacatagtcttctaaaactagtagtagaggttgccagtatatggacaataccatttgctgatcgcgaaatgacactgcaagaattaccaccaacaacagctaataaaaaattgatatctaataaaatagactaaaaataaaataaatataaagctattaatccaaccaattaccacagtggaatcactactaataatggaaatattgaaaccaaactgttgcgcaagaaccaagaccagacaaatggtaagcaactccgccacattagcagagaaatcacctaatacacctgatgaccatgccaaccaaactacaccctctgcatcctgtatcactcccccccatccaacaaaccccttcccgaaatcactgaagcatccgtcgctagaataaaggattcaggaggaggtggcactcatcgagtagctctgtttataattgggttcacatgcaaggcccagatcca

SEQ ID NO: 212426 - DNA, 702 bp, Cannabis indica
aatacgttcttggatctacttgacacactgcgttctcattggcgttcggctcggaagcaatgttacccgtagaagttaacattgccacccacagacgtgaattctataatcaagaggaaaaccaagaacttttgaatacgttcttggatctacttgaagaaagatgcaatgagtcggaaataactaatgcagcttaccaacaccaaataacgagatactttaacaaaagagtccaaaaaaggcagtttaaagtaggagatttggtgttgagacgagtatttgtaaatacgcgagacccaacagcaggagtgttcaacataaactgggatggtccatatgttattgaagttgtcattggaaccggggtttacaaattagcttggcttaacgaatcgctaataaagaatcactggaacagtagatatttatgaccttattatcagtaattttaatgtgtaaatgtatttatttctgtaatgattaatcattgttatgaataaaattaatttttttcaagtaattacaaagtttctttcttgtaaaattacttgaggagcgtatatatgtgtataataactagattccacctagaaatatatattgtatattgcaaactgtattgcaaaagtgcaaagcctaaaaattaaaactttttcacagaggaaaggatagttgattgaaattgtctttggacagtataaa

SEQ ID NO: 212427 - DNA, 759 bp, Cannabis indica
tacaattctctcaagatatatgaacttattattattattattattggaagtgatatattatgaactagttataccaaatttataataataaaattaaacgaaattactgatacaaatttttgaatgagtcgcagacaatgtcgttttttaaaactttttgcggctctgctcgaagtgtgcacggcagtctagtaaccacggtatccctagaataaaacagcctctgtatacgatatgttctgcactgaaatatatcgttcgattacaccctaaattattgctctgagaaaaatcataagaaagaagaaaaaaaaatttgtgattgaagagatgtgttattttgttgttctgatacgacttgtatagagaagttgatccaagagaaaatggtaagaaaacggtaatatagtcgtggatcatgacagtgaaaagcggatcattgtgtgagtccgcaccaggcccggccctgggcataaaaaataccacatttttctaacataagggtccaattttttttttcccttattgacccactttgtttcatggccggtcctggtcctcatccatgcacacaaaactcgataccccttgaaactcaaacccaaatctcaaacttacacattatacatacttcttataaagtatttctatcccatataaaattttatttactcacacactccactttttcatttttatataatttcacaaagtttcaacataaactatttttaacatatatattatataggttggtca

SEQ ID NO: 212428 - DNA, 546 bp, Cannabis indica
aaggaatgactaatgacttcactattgctacagtgctttcgttcacacaattaaataaataatatattaacaacacaacaatctagttttttttttttttaagagaagcgtatttcattaatagaataggttagatctcacagtcattacataatatgtttaacgggatagtagatagcagaatatcaccaaataacttgtgggtaaacgcccacttagccacattataggcgacaaaattacacgtcctgctaatatgagagaaaatacaacttgaaaataaagaagattgactattacaaaaagagatatagttttcaataacccaatgagactccttcccattgagagcattgatgactaccctcgagtcgctctccacgataacaaacttggcattaacttctaaaatagtagaaatagccaagcagcatgtcgctgcttccccacaaagagcatcagaaaagtcaagacaagccgtatgaactcgaaccacctcgcctaagtggttcctggaaacaagtgctatacacatgctatcaagcc

SEQ ID NO: 212429 - DNA, 612 bp, Cannabis indica
ggagagaaaatgatgatgggaaaaggggctattattaatctatatatataatatatatatatatatatatatgagaagtataagacggtgacgtggcggtctaaaacctcttcaaagctattttttttctccttatttctcttaattttttaatattttattagtgaataaatttacaaattactattttactattattttattaaattttttataaaaatatttatcttaaatttattatttttaaaaaaacacaataataaatataaactaaattaataatattaaattaaataattattcaattatttatctatagtttaaaggagaagtatgaggcggtgacgtgacggtctaaaacctctgcaaagctatttttattttttctttttaattctctgaatttttaaatattttcttagagcataaatttataaattaatattttactattattttaataaattttttataaaaatatctatcttaaattaattattttttaaaaaacacaaaataataaatataaactaaattaataatattaaattaaataattatttaagtatttatatatatgcattcataattatatcctcaaatttctaaact

SEQ ID NO: 212430 - DNA, 818 bp, Cannabis indica
acaagaaccttgcgccgaataagctgagaattagtaggaagagcccgatgatacattcgccaaaggaagatcttcactttctgaggaaccttcaaattccacaacccattccaccagtgagattgattacaagaagaagagcctaccctttcccccccaagacatcaagagccaccacatacccacttttcacagtataagcaccagaagaactaaaatgccaacaccaccgatcagcaccaacgccacaccccaccggaataccaagaatagcatcgatatccatctgcaagaagtgttgagacaaagcctgcagattccgacccccacctacatcaatcaagtcatgaaccctcacattagctgaaggaacaggtgtaatagggcgaaaagtcctcggccgagggatctaagggtcacgaaacgcatcaatagaataaccatctccaaccaccttccgcatcccaatccgcaacaactctaatccccaaaccaaactggaccacagatgagacgaaccttggcgatccttagcctccaaaattgacgttcctgggaaatatttatgcttcaaaacccgacctggcaacgaatccggcgactgaaacaaccgccacacttgcttcacgaccatagcttgattaaacaggactaagtccttaaagcctaaaccccatttcactttcggctggcaaacatcatcccatttcacccacgcaatcttcttcttatcaccctttgtacccccaccaaaactgaagaatgatcgaacggagcttatcacacgtcgtaaccggtaatcgaaacatactcataag

SEQ ID NO: 212431 - DNA, 677 bp, Cannabis indica
gaaatattgccaccacttgaaagtgtgaaagcgggaaggccaaagaagaaaagaacaagacctagttgggagacaaagacacaaatcaaatgcacaaaatgtggaagaaaatgacacaataggaggacatgcaacaacccaagtatagactaaaaaacaacagcagctactgaacattacagcaacataaatacaacatttttacagatacaaaaaggaaaaaaataaggaattttaaataataattgctattgagatgattaactttgaatttggtttctattgaataaatgaactctgaaatacattttaactgaattgatttgataatgaagggtttagttttgaatttcatagaatggcaaaattaaagtcataaactattaaaacatatagaaattgattgatgtataaaaatacatttgaaagcggatgtacatgttaatttttttgtcttaccattgtataaaaaatgtttaaaaatcatttgaaatacaaagaaaaaaataataataataaattaagatcacaactgtatatactatcaatattatatagaatataaagattcagtaatgaaccaacattatgtgtagtttaggctaacaacaacaaaaaaaaacataaaaatagccataagcaatacacgaacaattgctttaagttctggctaaaca

SEQ ID NO: 212432 - DNA, 850 bp, Cannabis indica
aacatgaacacatccaaatcattaaaagcatcatttgaaatccatatttcatgaaagaaaatcattaacctggctataatatcagttgttggaagttattttaccagaatctagatttactaacaagtatgttgattataatctataacctaataccctaaacatgaattcctaaaacaatgaattaaacacatataaagttgtagaaaaccttacattggtggtagcaaaataatatggctccttccactcagatctataacacgtgttcctttctgtcgtagagtagtaacaagatctaagcttggatctcattcaggtgttggaagatccacactatgattgagtacttgactagatatgagtcgacatgtaatttatcactatagggattgaaattgatgaagagaaagcgagggagatgaatttgaaatagagagagaaggctcttttctgtatttaacaaattaggctgaggagcttatgttatttgttgtatgttctatttataggctttcatctaggattaggtttaaattatatggaattaaaaaaaaaaacctaaaaaaacacttaagtggccggccacttagtgtagaccccactagttacaatcttaccattttatttcataattcatattttccttttacaaataccatattttaactttaaacctttttaaatgtttaattaatttattcaataattaaaattatttatcaaataaaatttccatttaacttatttattaattagaccttacaaagtctcttaattaataaataaaccccaaaacctcttttcttctcaactaagtccttgctttactgaaaattcataaataaga

SEQ ID NO: 212433 - DNA, 976 bp, Cannabis indica
gagagagagagagagagagagagagagagagagactgtatatatatatatatatgtgtatgtattggattggtttggtttgatttgaggtaaggggttgagagagttgggctcttatatatagggggcatgaatatgatgatgatcagtatatgtgatgactactactatggtaagaatttgtgtgcatattattttagcaccacgtgtctcatcttaataaaatattcctataactagaatatttctttgttttgaatcattaaagaaaaagtcatctatacaaattttacaatacacttctttctaaatggttatatttagtaaaattttgagaaatttagagaaaagtttaacatgtcaaaaatagagtttaaagagtttattgcacgaataatttttttattttatatgtgtgtgaaatagacaatttgaatattaatttttatattataaattattttgaattttttaaaaattttccaaaatatcttcaataattataggatacattttattataggatacatgactaaaaaaaaaaaaaaaaattagaaaaaaaaaaattgaactaaaaaattactcaaaaaaaccaaaacagttgggattacatcagtcactcaaaattataatagttcaccatatttatttgttataaaaataaaaaataaaaagttcatgctgatatttgtactaagtatgtgtacaaacttgatatattcagcatttgtcaataatttgaaataatcatatataggattaatattagaggactttcaacaacttttttactctatcatttaaaatatattattaaaattttatttttttattttatttcaaacttttacattacatgctatacattaatttttctatttttttaatctatatcatttaaatattattatttatatattttagatcttaatatctctttatatatttaacatttagaatacttatttatgtactct

SEQ ID NO: 212434 - DNA, 506 bp, Cannabis indica
aaaacccataatactttcattttgctttcacttaaacccaaaactcaaattttagcgataaaacccccaatactcatattctgttagcactttactacttccatcaaattttgactgttaactgtcatgttggattgtccacatgtatgcactatacacgtggcacacttttattagtccacataaaatttataatttaattatttaaatattataaaatttattttaaaaaattaagcttttaataaataaataaaaactaaaatatatatttaaaccgttctctctcttaactctctctcttttgcaaatctcacgctctctcttctctcttttttttgatctgtgtgcaaagaaaattggaaaaagaggatgctttagcaaaaacaatggtgagatacagagctctgcagccagacgtccccgccgataaaaccccatcggagacacctcatgctatccccaaccagcttctctctctctctgtctctctctctctctctctc

SEQ ID NO: 212435 - DNA, 637 bp, Cannabis indica
aaactactaagaagaacactaatcgatcttatctcgattagtgactttgtcgtgaacaactagtaatgataccttaatacataaaatataggctttcaatattttagtctgctagttgtatgaagcagactgtgtattcaatgtatatttgttctttaatcattaattcaaactataacccttttaatcttgaaaggcgtatattatatacattgtatacacagtctgcttcatacaactatgttgattttgtgtctcataactactaagacaacaataatcgtaaatcgattagtgactgtgttaagataaatcgtagaatttgaaatcaattagtgcacttgtcgtgaacaactattaatgatgccctaatacgaaatcagtggttgatttttatacagtgtttctacagctgctttttcccacaacaaatctctgccaaactggcccttatttgtataaaaatatataatttttgaataactaataaacgtgtgtgttaattcaaaaaaaataattaagtttaaattataataattatatacgaattattaataagcgaagtataataattacatagcccacggttccatattttattttactttgaaatctcttaatttaacctaacaagatg

SEQ ID NO: 212436 - DNA, 600 bp, Cannabis indica
caaaattgctgttatccatgtggctcatttcaactttgatgatagtattgtcattttgtcttctatttgatgatagtattgtcattttgtcttctatttcaaattctttgactcattcctgagatattataggaaatttctattacacccctccttaaataggtgttattgtaaatttttttatcaatttcagcattaaagaaaaaaaaaactaatctaatttttaatttataactgtgtacgatgtaactatttatgactatatataaatttttaaaaaatttagaataatttatagtactgaaaataaggtttaaacaattacttactacgcgtataaaaaaaaataaatcgcacgtgtagcaaaatatctaaatcttattatcaatattgtaaattattcgaatttttttaaaaatttgcaagtgtttttaaataattataacgtacacgtagggacggaggcaaaagttaagaataagggaggccaaaaaataaaaaaaaaaataataataattaagggggccaaaatacataattttttgaaaaaaataatatttttaacattaaagtgtcatttggtaacatttttattttcta

SEQ ID NO: 212437 - DNA, 579 bp, Cannabis indica
gaattcatgtttcgggttttgaaataacccttaactaaaagataactactcagaactagacattataatgataatcataataaatagtaagagtttctctctctaattcgtaacttttttttagacttctctcgtttgtagtctaagaggtcttatttatagtaatgggaaagttagataaatcctattagaattaggagtctatttatagtggatagataaattccattagaattaagattctatatttatcatagtattaggaaatatctcactaaaatgaaaagataactcattttttaaacaaaagataaaaaatcgcaactcttctttaaaatttatcttttttttcttcggtatctttttttagaaattcttgctgcaatggttgatagtattttggtccataactctctcgatattactcaaaattagacgattcaagatgttctgaaaagttaacaacgagaaccaaaaacttacatgttgagctctaagtccaattctgcatctaaggtcgtatttgtcagttaagtcttgcctcgtacaattgaactgccgacttccactattttccac

SEQ ID NO: 212438 - DNA, 932 bp, Cannabis indica
ggtaaattctaaaactacttatttggagccttagattatataggcccatggtcccccacactagttgagatcatattgtcttgtagactcaattaattagttttaatttatcaattagaattctaaataagattatcgtcttgtttctaaatttttactaagcaatgacttatttgagaagaaaaagaagatttagggtttgtttattaattaagagactttgtaaggtcaagttaataaataagttaaattataattttatttgataattaattataattattaaatagactagatttgatatttatagagttagaattaaattatgacatttgtgaaaggaaaatataagttttaaataaaatggcaaaattgaaactctgtagggtccactatggttcgaccataaaggttcaattaaagccattattttatttttttttaattctattttattctaaacttaatccttgaagctatccaataaatagaataagatgctcttattttctaccctgataactcagcctattagtctctcttattagacaaaatagaaaatagaaaagagcctctttaatttcaaaattaccttcttctctccttgaaattttgaagcctaaagtgaattgaggagtttctcacacaattcatgtcaatattcaagatagtgtggaagattgtgtttaaaattaaaaaagagatgatatttttaaattttggaaaaatcggatgagggtttcccctatctgcgcgtgcatggcctgattttttgggcaatttttttacaaaactcagttcagacaacatcctgaccgagatttctcaaacaaggctcgagcctaaccaagaaatgccacatgagggaccatacagtaaccaaaaaccccaaccattccaattttcaaaatttttttaacttttaaaaatta

SEQ ID NO: 212439 - DNA, 694 bp, Cannabis indica
aatttaattacaatttatgtactggggtgtaaatttcctttttttttatggtcgtgtacattatagttatttaagacagcctgcaaaattttaaaaaaaattaaaaaatgttaacacgccgaaaataaaattcaaactttttgccgcgtgactcttttatttagagatgtgcattataaaaacaccttataatttataacaattgtgttattgcaatatgatatttcaatttattaagtttcaccgattttacggtattattatctctaacctaaattattagttaaatataacaattgtggtgatttttgttaattaatatgatattaattttttttgtagcctttttcacttatacttttataactcactttttattcatttatatggtcatatgaaatataattcacaaatacatttcttttgcaattatacgcttattcctctacttttgtccctgacagccaccaccgccacaagcactgctttctcttttctcttctttctcatcatgtgcttccataagatcacttgcaagagaaccgccctagaagctgactcagtctccaaaccacctcacaacctcttttgctgcctctctcgccaccttggtcaagggggctttgacctagttttttacggtacgcttcctaagaccaaccaagagatttctctcaaggttatggactctgtg

SEQ ID NO: 212440 - DNA, 1091 bp, Cannabis indica
tatatttacgacaatttatatatatttttaatttggattataatttaaattgctgcgtgaattataatatagattacaaattaagttgagttgtgatttgaattgttgcctaaacaattaaaacatttattgtaaagcaagtatatttataatttataccaattttacggtttaaatgaaaaaaaaaaatactctcaaatgtataaatgaagaaatattttttttataagagatagaaagaatgactattgactacattagaagagtgtagttttttttttcttttttttttttattatagaaggagaatgagttgttcaattacttgcttatgatttgtcacggtcgaaatagcaaaaacgtgggtcccctagaagtcggcacttgggtacatgggtccctacaaataatacgatgcagatcttgccttcccaacttagttatattcttctctccaattctcaaaatatgatattgattcaacggtcctgatgggtccatctccaattgttttctactaaatattttagtggggccagtccctctatttctattttctcaaacaacactggtagatccaccgtccacgtcactctttcacaatgccaaatcaaatctttttttggtttatgtggcaaactctactctcttatggttgtgggtcccaattagaggtaacaaaatgtgtcattgtatcgtgttcgtattatattttatgactcgtttttatatttcgtgtcagacgtattaatccagtttttgactcgtgtttaattttctcaattctaacttgacccgtaaaaaatcgtatcgtgttcgtatcgactgtgacctgttttgctattattaaagttaaaattataaagaaaaattataaatttagattttattaaaaaatttatatacgtttatatattatataatttgttatatatataataaaattaaaaattttgttgaaaaaattaagttaaaatctttttaaacttaatattaaatcactaaatatatatttatatataataatattaataataagttaaagaaaccgtgtcaaacatatcaaactcgtgttaagcaggtcgtgtcgt

SEQ ID NO: 212441 - DNA, 740 bp, Cannabis indica
tactttttgacaatcgagttccatttaagtttgctcatttcccataggtagattgagagttttagccacatccttaacagtaaaggaataccattgtcccttgacaaagactttgccaacaataaaagagtcctcatcgaggcactcatcagtgatattagcataaaactccttcatattttgatcaacagagccatcaaaactgattaaagtatcaacccattgtctttctttcaacatattatataccccaaatggcttatgaccaatgacattgaaatttttgtcaacagtaaaattcctattctcatagtatttcatatctctagccttatcattgtaaaaaaataatgagaatggggcttgaagttttcaagagtaatacaagacaacctcttccttttctgaggtagaatagggctctgagtaacaatgggtctttttcctttgtccttctttggaactgcaacaaggacaacaactagttctgcactgacgggatcatcttcaggcacttcactttcagacccagaatcatcagcaggtgaatgttctttggagaaaaattcttcactagaattagacacaccctttgattcttgatgaacatcctcagtcttttcttttggtatagaatttgatgatgaaacacaagaagtctcttttgaggtttttgtcctttgacgatgaagtcaccactttcttcctttgagagctttttgggctgatcacttcgggtt

SEQ ID NO: 212442 - DNA, 485 bp, Cannabis indica
gtggcaggaggtccctttgggaaaataatggtctcctttttcaatttttttttgacagagagagaaaggagaaatggggaagaaggctttcgtgccttcgattttaatcaagcgtcgcaattcgttacaccagtaaaagtctacaaaagcgccagtaaaaaatgattcactaaccctaaaacgaaacacatcgttttaataagtttttgccgatgcaaatatgcctcggcaaaagttttctaccaactccaatttccacgctagaattttctcacttcttcttttatcaaggtccaatttgttaagtcctttttaacaaattagttgacaaaatatttttgatataatatgcatatttttattgagcaattaaattgattttattgtgttaatttcatgcctctaattgctcttttaattaatgggaagttcttttctcagctagttgcatttgtttgattttctcagctcttttaatttatgag

SEQ ID NO: 212443 - DNA, 598 bp, Cannabis indica
tagatatcagaaagtaaactcacccaatcaaaatcaaacaatcgtacattactcatatacttaaatctaggcctgtacggatactcaaacacaatgaataccaatataaagatagacaattatacacaattaccagtctaataataataactatagtcgttacttcataaagtaaccattctcaccattttcttaacacaaaaatttatgattcccaaccaggcatactaatgtctttgtcgttgtttaataaaacaaccctgatacctaaaactagtgtccaaatgtcactgttattattgaaccaaaaaacatgaataccaaattcacgatatccaaatgttaccgtcgttgtcaaaccagacaacctgaataccactccctagtatccatgtcactgtcgctacttaaataggatcactgacaagtatgaaacctatcaatagttttagtttagagtcataactttttacgattgtctcacgggaacaacccgaataccacaccttgctattcatgtcactatcgttacctaatgagataactagcaagtaggaaacctaataccaattttattttagagtaaagactttcatgg

SEQ ID NO: 212444 - DNA, 615 bp, Cannabis indica
tagtaaaggttggttgatcgagggacgaaccacctttaagatgggcacggttgaaccaatcttggctgaagcaatcagtgtcaaggaagctctcacatggataaagagacagcagtgggagcatgtaattgtggagagcgatagtcttggggtggtgcaagcattacgtagttctatacatatgatttctttgtttggtcaagtcattcaaagctgtaaaaatttacttgctgaattgtgtactgttgaggttatttttattaaacgatctgctaatgtagtggctcatagctttgctaggactactattttgtatcctgatcgtaccttcaatatggagtctgttcctactgatttgttaccttatttggtaactgagtttgttggttaataaagtttaacattttctagtaaaaaaaaatggttgatttgggttatctttcttcgatctattgaggaagatgagagagatcttagaagtgagcatggccgagatagagacggagaagacagggtgtcgcgaagtttttggtcttacaataaagggtaaatagtggcataagtacccaaagttttaggtttggtagcggtaaaatccaataattttttttagtg

SEQ ID NO: 212445 - DNA, 543 bp, Cannabis indica
aatgcaatttgaactcacaccaagtatcttccaaatcgttcaaccacatacaaggaatagtgtgaactattaggataaagtgtatatgtttgttcttattgatttctcaacacatgagcaagaataattgaaaaggaaaactgttttctttttctcctcttaatttcaaaaattatagtgattaaaaagtcatctgatttctcaaattaggcttagttaaaaccctttaattaaataatatttaattgtttaaataaataaatatctataaccaaatttggttacagatatttatgagggaatctctcaaatacttgagagaatatctcaacaacattgaaatatcttgttgaatcatttttcttttaaaaaaaaagaaatctattttattttattcctttattaataaaactagtaaagagaataaaaaaaattgaaagaattggtcagacaaaaaaaataaagagaaaatatatattattattattaaataataatataaatccaattttttctctagcttcccacttctcactcttatca

SEQ ID NO: 212446 - DNA, 880 bp, Cannabis indica
gatgactctgtagggtacctctctacttatatatgctattttgtttcttattgtttttaaattaagggcaaaactccaagctagctagtcatcatatatatattaacctttgacctaacctaaccctttacccaaataacaaaactagaattattttattgagacaacaaggtattacacccaagcaacctaagttttttacttttttttttttttaaaaaaaaaaaaaaaaaagaagatagttaattagtatataatcgaatttattttttaagtgtttttaattaattaattcttgccgtgcatagtttagtatgagtagccttcaaaagttaaatagtttttctactaaatttttttgatataattaatttttattgaattatacggccatatagcttttattcttttatatataaaacttaatcgaaaacctttttaataaaaacttaaacaactttggcccccaaaaaaaaacttcaaaaattctctataattaattatagccctttctaaagtacagatgatagaatattttttttttgaataaataaagattatgtgaagaaattttcgctaattaattaaaatccatcaataatgatatataaatatattttggaaataccccttaaggatgaaagaatcaactatatacaaggctcgcttaatcaaaggataatctgatatgttaacttctaggttattacggctaatattaagttttaaaacataataccatgattgtgtgttatggttaataattttgagtattgttatgtcatattttaggttgtctaatattatactgaggtgatattttataattaacattattagagttagtcccacattgctaatgtgtggaaataaattgtga

SEQ ID NO: 212447 - DNA, 670 bp, Cannabis indica
aatacaaagggataattgtctaaaagttataggttgtatatgtataatgtaactataaaaaggagtaatttgatacacttcctaaaaactttttagcctgatttgttagttcattaaataattacaatgtacataataaagaaacaaaatcaaactaaaaacatttttgattctttgaatgccaaaaaaaaataaggctaattagaatttttatttttttcccaaactgacatgtaccaaagtctgggacatgattcaacatgcaaaattcaagggcatgatttagtagatattaaaggctgaagatcatggttaatacataaacaatcactaaaattgaatgaaattaaacaaaaatctttaaatctaacaatctcaatagttcaaaaagaatttttaactgccaaaaaaattcaagagacatgatttgataaatattaaagttctgataaaaaaatcctaattagtcaaaaaaaaaaaacaaatgaagtatacaacaacagtgtaagttcaccataaactataataaagaaagaaaataaaaagacaaactcaagggtgttattatgtgcaattgtacttagtatgatatgatatattttatactgaatcaattttcaaatctcatttaaaaatttgtggcattcaaaacagaactgataatatatca

SEQ ID NO: 212448 - DNA, 1033 bp, Cannabis indica
ggattcaaccggccagtctttttagtatttttatgacatagtattttataattagttaatgtgttttttataatctttattaaattaaaataaataagatctcattaattatacttgataaaaatgctgaatattatatagatattctttagcattgctatatataagtcatgtagggttggggataatacgaattgagagagcatataggaaaaacaagaaaaaatatgtacatatataattaatggatgagagtgtggttactgtttagtgaatcattatacaatttgttgcacgaaatcatgactggtagtgggtacgtgatattattgtcaaattgtcaatgatgtgtgcttttcttttttcttctctttttctaatctggtcaagtactatcgaaaactatatatgtgtataaaaagataataattataactcatattcccaattaagatagtttttttagagagaaggaatgtcatgattcatttatttatgacggattaatccgttctgcagtgctaatgttataacactatatgtatcgtacaaatgctccaatatatgcagagaatatatgttagttttaatatacaatctgagcattatagaatcataaaatataatcaatatcttataaactataataatgttgatcatcaattaatatccaagatcaataattcaattttaaatcattaataataacaatgactaaaatatacctcattcagtgtttagtattatcttaaagagacttgaaccattcttatggacgtttcatgtgttagataaattaacaattaacccaagatctatttgtatataacatagaacacaataataagatataataattaggtatgtgtacctgattgatccatagcaattatctctgattgatccacagcagttactccaatttgatagtgcaatactatcaactaagtcttcctccctagatctctaaatcagaagcagtttattttctctgattatcaaaaggtatacaattgtgatgagacaatatgta

SEQ ID NO: 212449 - DNA, 479 bp, Cannabis indica
taatcagatttactaattaataaaagatcagaaattgcttttatgttgcatggttcacatgatttatttcatgattatgtttaatgtataaattctattaagtccagaacatatgtaaatatatgtatatatatttgttcatgattatagtgtcgtcagcacagtggaatataatcatcattatatgttcaacagtttaattcccgtgatttgtcagttcattggatttagactggcatgataatcaacgataaggtatacttacaccttggataagtgttttgtcatttccagggtattggcaaagtttaccaatatcggatgtataaagtatacattagaagggaccgatattcatcttggataagatatcataaacttaccgttatatctttctaaaatcaatattaatggttgatcttaggtctattgatcttaatcttgataaggttaggctcaacttcgttgtattatttatg

SEQ ID NO: 212450 - DNA, 1082 bp, Cannabis indica
gaatgctctgtacgagtcaaggagaacttcgtcttttctctaacttttaggtccgaaaaacaactattttaattgaaaggggtttggtgatttttttgtatggattattcagaattagagacctagaagcaaaggagagacttcaagagcaacgtggaggcaatccagaatgattctgccaattagttcttctcttctctttatctttctatgctattttctattttgattttaattttagatttgatgaatgttcttgagttaacgataattgttatttcttatttcttgattgtaaatttatctatatttgtacttaattccatatttgagattgatcaccttaggcatgtttatgatcccaattcaaaatctaaaaagtgacttgaaacaaaagtatttgcatagcctttgtgacatttagattattgtttaatgcaaattatatgttagtccatcttagagatgattatataatatgtgatttaggacctaaaagatctgaaaagagttaggttaatttttatagtctgtcattcactttaagaaagaagaatagtatttagcattaacaattggataattgaagcaacaaaatttgtttccctaatttctcatccttgattatacacttttattgcttaatttgattttcttgttaatccttctttttactttcatcaaaattattatttaccaaatagaaatacaagtcataatttagtggtagtcagttcaaccacccgtgggattgacctcacctgtgtgagtactacttgattacgtgcacttgtgtagctgtttataattttgcgtaacaagtttttggcaccattcctgggcaattatttaaaaattgatattacagaaattagactaaattctgctttggtttttcttccttacttcttgctaactattttgtcttaatttttcctatcctatgtcaggtgcctttagtttatgcgacgtcaaggagctagttcaagagtgcctgttgatcctgagattgagaagacctgtagacaaaatagaaggaacaagaggttagaaggagttgtgtaaagaccgcctaagattaa

SEQ ID NO: 212451 - DNA, 1243 bp, Cannabis indica
caaaggcaaccctgttggtgggaaatttaatctttaccttgacatcatctctcatcatcatcacattcggattaagccattgcacctctgtcgaactccctgccatacttcccagccttttaacgttgttaatggtctaagcattcgatgagaaccccttcattttaatccaatattccacctcatttagactagcttcttttcatttaccattagatggccatttctccgtaatcaaaatgccaccatggaaaatccatgttgacttcttgtgcactttttctgtaagaattttatcgtcagaggacaagcctaccaccgtgcattatttctccatagcaagtatttccactgaccactccctctctttctcccaaattctggagaaaaccgatttgaaaaacttagccgtgcagtgtcttctggccagcactcttcccacaagagagccatcctctggcagcctcgacgtgagactcccattgatcttccacctccacattcaaacgacccataagagaaatattattatccaaatcctcttctatcagaagagcacctttaccaccctacccacgatgaaaacacaacacaggaatgctccaaacaaagctcacacactcacagtcacgtaccacaaactcaagactaaccttgcagagagaaccatggtttatctatctcaacaaagagcatctcgtgtagtactaacttgagtttgaagttttttaactcctcaattagaactatgattttgaatgtaaataaattatcaaatgggagaaaattagaaataaataaagaggacaaagtctcattagaaaaaaacatatttttttttctccaaaatttatattgtctttttttgctgtattaaaatctattgatattggtaataattaataaaagcccttaataaaatacaaaattgaattttaactttagtgctgtcaaatgagaataatcgaaacttttctgtttcagccacttccttccttcttgctaaccttttctagcgcactttggttgccccttatttgttttcaaataaacaaataagtggcgttgacagctatgtattatgcaatataaaaatggttatggatggaagtactactacatggatattcaacttctttgactcttgtgttactcagaacctagagagagagaataataatggggaacgacagctctcgattacatcttccttttcgccatggtcaacgacctggaaaagcta

SEQ ID NO: 212452 - DNA, 780 bp, Cannabis indica
gattaattgataaaaaaaggtattcctcaccttataggaataaacagctgacggcccaaatattattatgggcctaaagcccaaagtgaaaatcaccacaaaaacaccgaaataccaaactcattacactagtcactattctctctctctctcctctctctctctctctagaatccatgggtggttctgtgaaagatgttcaatcgaagcaggtagctcgacgaccttgtccgtaccggtgctccggtcatcctccatttctgggcttcctggtgtgaagcttcaaagcacatggacaaagtcttctcccacctcgccatcgatttccctcttgctaatttcttaagggtttctctcttttcctctttttgtcaatttgggtacgaaatcttttttttttatgatgttgattgatctcctttgaatgttttaggttgaggctgaagagcaagctgaaatttctgaggcttattccatttcggctgtgccattctttgtcttcgccaaggtatggtttttgtgtactgttaatcaaagttttgttttgggcatttaggagtttgagttgttctaaggctatgggttgatcttgttgctgttgttaattattacagtgatttgattgggattgtatcactttctttatttagctgatttgcctaggtacataaattactgctctttcacttaaataatagtttttgttaaaaaatacaacttttgtttttcacattctggtgtgtgataaagtaaaggtcttgattcattcgccttctgtgt

SEQ ID NO: 212453 - DNA, 1185 bp, Cannabis indica
ttaaattattttttctaaataccaaaacaaagaaagagtttactgtaaacatttttttttcttcctttttttaatagatttcaatcacacacattattaatctaattactaaaactcgataggaattttacaaagtactcacccataatatgcaacaaaacagacctttttaaaaagactactatatattttatgtaaaatggtggtcaaaagtcttttagacagccataactatataattatatatgtataatgctcaaggttttactttacaactccaaagtcaaaaactttttatcatctttatttttggatcaagtttaaagaatttccctccccactcttcaattcaattttatataaaattgttcctaaaaataaaaaaagacaatctttttatatatgcatgcatcaacaatgacagctctcttaataatttctcatgattactatgtcaccaatataaataaataaccatttacccctttttcctaccaataaacaaataaactacaatgatggacacaccatctgttgtgtagaacttttgtccctaaaaagactactttcttaaataaaaatacaaaccaataaaaattaaacaattcagtcaaaactatactttagagagaatcaatgtttaaaattttggagcttaaaacattaatcaattaaatttttcattttttttttctttttgtattttcttgcacatgttatgattaggacaaatcatattttattttttcttatctcttttttattatttttatatgtaaatatatatattgtgtcttgtcatttcctgggacacacttcattaatagtgtaattattattttcaaaagaaagcataagtttctaaatgggccttaagtaaccagatttgtcagaaacaatacaacttgaagagtaagtccaaaatccaggattttctattgtaggcaaatggtagtaccattattattattatgttttttttatttgtcatgtcattaaatgagaacattttatcatttgtctttttctcttctggatttgatttactatgtgtccatcccatttattgataattatgaataaaaacaaaaaaaaataaaaataaaaatgagcaaaatttacaaattagagtatctttagaaagtggtgtaacacacaagaagaaaattttatcaaaaaaaaaaa

SEQ ID NO: 212454 - DNA, 637 bp, Cannabis indica
gtcaagacaactttccttaatggaattcttgacgagacaacctatatggagcaaccaaaaggttataaacttctaggataagaagataaagtttgcaagctaagtaagtccatttatggacttaaatgagcttctcgctcttagaacaaaaggcttgatgaaataatcaaaacctactgctttcaccaaaatgaagatgaaccttgtgaataccaactcaaggataatcaagtggtagtattcattgtcctttagtttgatgacattttgatcattgataacaatatcaagaaaatgactgacatgaacaaatggctaaacacccaattcgaaatgaaagacttgggtgaagctaattatgttcttggaattcaaattattaaaaaccagaacaacagatcacttgctctctcgcaagtagcttacattgatatggtgctaaagcacttctcaatgagcaatgtcaaaggggcagttattccttctagacatggctagcgactatctaaggagcagtgtcccactgatccctgagggatagaacatatgagaaaatttccttatgcttcaacagttggaagtctaatgtatgttatgctacgcactagaccaggcatttgctatgcactgggaattt

SEQ ID NO: 212455 - DNA, 1322 bp, Cannabis indica
ttaagttgaatcgaacaaaggtcaaggtaaaccccctttagagtttttttggaatgtcaatgatttgaaattctctggggtgattgtacatcaaaaaataattgaggaaaaagaaagtcagtgaggtcaaaaataatgaagtgtagttttacgtgggtaaaactgaagtcagatttgggaggtctgagttcggtttgatcacagtcctaaatatgagcggtggcctttcaacagaagaattgaatacacaatgcgatattgatcagatactgtgggaccatttctacaatgcaagaagggtgacctttaaaacccattggcaagcttttgaggcgtgtgatgctacatacgatgtgtacaagctggggttatatgcatttgttgaaggccttttgttgtcacgatccgagggtgtgtatatctggacagatatgctgaagttagtagaaaatgtagatagattatgtgagtatccttggggtctcctttcttatcagaagttgttgtctttcacagctaaaaatatgcagcagcttaggaaaaactacatggataaggtctcgagtaagtaagataagaggaataagaaatctaagaaggagaaaaaagttactcaactagaagcgaagtataatgtgtacggatatgcaccagccctacaatattgggagtttgaggtcatgcaagatgtaggaaagaagtatggccagtgcaaagggactagattccctcgaatgttgaaccgcgatgtgaagcaacctaatgcggctgtgttgtttgagaaaagggtatgtgaatctttctttatttatcattgttgttttgatatctactttgatagaagtgttatttgtgtttacatgtgactgttgtagttgttgtgcaatatttatgcgacattttttatgtttatgcaatatatgcttaagattttgcgactatatgcaatatatattttttttgcaatttacattattttgagcgacatcatgcgatatgtgtgcaatttatcctaaaatctatgtgcattttttattttgcaatttaaataatattttgagccacattgtgcaatttgtgtgtgatttactcacacattttgtattttgcaaatttacattatattttgagtgacattgtgcgatatatgtgcgattaccctaacatttgcattgtagtttttttttttttttttttttttgtttgatttcctattatattttgttgctaattattcataacatttgtatgctattttattgcaatataggtcgacattaattttcgattttttttttttgtttcagattgattgttcttct

SEQ ID NO: 212456 - DNA, 679 bp, Cannabis indica
aagaaacgaaatctaatagaaggaatatgattatgtagctgttatattttagtgaaaatttttaacaaatcgtatattttaagagtacgatcagatagtatcaaaatttcaagaaacaaaattactaattgttcttataaaaatctcagccatcgaatttaatgcttgtgtggggagtctaggtggcaaaaggtaggttagattcctaactcccaattgaaaagagtatgtgcttcttctttttcaatcaatatattttaactaaataatatttttctatataaaaaaactaataatatttatataataatacatgatataattttttgaccaatatttttaattgtcggctctcaattatcataactatataatatgaattaaagaaatattatatttaattaatattgtgttttatgtgttgctttgttgggcaaatgtcactttcgagttcaatttataaataatttataatttgattgggagacttcattaggattgtccaatcacacaccgacccattttaaaacccaatccaaaccacaatatatatatatatatttttaatttaaatatgtaattttattatgataaaattcatctcattcaatttgtactattttattgatagtatattcgatctgtactaagtgcagattttatattttaaatctaaatc

SEQ ID NO: 212457 - DNA, 506 bp, Cannabis indica
actcggttggctgaatagtcttccgtgagacaagaatgtacaaactacaactcatgtatcgacgagaaaccatgtgagtataagtgtgcatgacgaggcttcaaactcgttgcgtgaaagagaaacaaaacttagcatatattgtatgatatacaaactaagtaaaacagagtttggtgaatcaagataacagacagcaagacgtctatctccctggaagatggcatgcatgcgaagaaggtcatctcgacaccagagaatatagatatcagagttaaaacaatattaatctcgggaagttagatgacaagcaactgctcgccatcaaagttaactcagctccattcccagagaggcatccccatgagataaggcttaccgtatatccttaattatgcgttcatctcggcccaataaaagcgggatactcacacctgtgtgaattctaaatgaaactgcatttacatagtgtgatttttaatcaaattccatgatttgagggaata

SEQ ID NO: 212458 - DNA, 751 bp, Cannabis indica
attagcatcatagatgacttcttaagaaaagtatgagtgtttctcttgaagagcaaggatgaggttttcaatacttttgtcacttggaaaagattgattgaaaatcaaacaagatgcaaaattagaaagctaaggactgacaatggttgggagtattgctcaaagcaatttgatgagttatgtaaggaacatgggatagctagacacttaacaattagggatacacctcagcaaaatggtcttgttgaaaggatgaatagaactcttattgaaagagtaaggtgtatgctaagggtgctggtttggatagacccttttggggagaagctgttcagacagcctgctacttggtgaacaagtgtccatttgtcccattgaagtttaaaacaccacaagaagtgtggacaggtcaagtacctaagcatgatcacctaaaggtatttggctgcactgcctatgctcaccacaggaggtcaacctatagctctaaaatgcatgttcctaggctatcctgatggtgtgaagggttacaagctatgggttagaaccagcgaacaagaaatacatcattagcagggatgtggttttcaatgaggaagaaatggctatgaaaagggaggtcaggattactgcatcaaaaaatagtagcaacaaggaccaaattgaggtggacacaacctcatctagagcagcagagattgataaagtctctactgaagataacactataagtgacactcaaactagcctc

SEQ ID NO: 212459 - DNA, 502 bp, Cannabis indica
gtaaactatatgaagacaaatatgtaaaacaaaatgtaattatcaatttttatatttttttcccttaataaatacttgttttttatttattggctatgtttttattgtttatcttttagattatccaattaatgagacaaaatgaaacttaagtaagagcaagttgatatgtggtgacactaattatatcctatcataattaacaagtcacataacctgtcactaccggatgttgattatatttcgtgcaattcacaataacattttctttaatggacattaataaacacacaaatttcctcggccacaactattaaaacaaaacaaacaaaacccaataataacattttctaaatatattatcttacatattttttaattaaagtgttacacattttagtgttatgttaaagtggtccatcttagggtacgaataggatgactaagtacatcttattacgtaaaaacatcacatcattaaattaatatataataaaaaaaa

SEQ ID NO: 212460 - DNA, 742 bp, Cannabis indica
gaaggtgcgtagtctggtgtggctaaggaacttgagttttgggggagagttttcgatgatgatattatatcaagtcgttgaccgccatgagaggaagaaaaggaagctctggctcgagtcgactccagatgaaaccaaaaataaaattaaaataaaaaaaaaataaataagtgtgctgacgtgtcattgtgctgttctggtatcgggatgttgacacgtggacggtatcacaattgggaagaatctggggccctctgttacttttttttttaaaaaaaaataataataattaggatttataggggtagatttggtatttaagagaattattagtgtggttttgtcaagtcaagtctggtgtcaaattgtactcttttgaaatttttgatctaaacactcaatttgtatttttgaatctttctagtttatgttatttctttgtaatgatgtttaagaatgaactttttccttatagaaaatattctttttagtttatgttttgtaaaaattaccgctaatcttcttatttcgttaataatagtaaaatgaaaatttagacattatatttttcaaaataatataaaataatacaacattgttattggacaccaagatctctgtcaacattacaaaatgatatcttataataagtaattttttataaagtttgttaaattaagattcaatattaatttgtatcaatagtgatatcataacctacaaaaagaatgctatgcgacat

SEQ ID NO: 212461 - DNA, 939 bp, Cannabis indica
tatatatataagcaagcttagagtgacggtgggatggttccttttgctttgctctttatagttagtcttagttcagtgcatgtgatattcacatgccatgtcataagaaacatgggaattctcatacattgatgatcccttctagaaataccccatacatattaatgttacttacttactactacttacttagtgtacttactaatacaagtgtttgtaatcatagtaaagacaggtttgatctgctacaacttgcccatataatattggtaataggtgaaaaccaagtaagttccagatcccatgacagaactattccagggcatttcccaggatttatgaaaagggtgttgggttctttcttcttgctttgagagagagagagaaagagaaaagggttttaaaatggtgtacaacaaaattattagggtatcctatgctttctttaggttaggacactgcaaggaaaaaggtttggtttttaattttttcttttttttttgggttacaaacgtgttaggttgggtttgtttgtgtggatccgacaaaatatctatcatcaaatcgccacgattagttgactatggtccctcttcttgtatatgtttttccacttttctttttttattggagcaacgttaattacaatctcttaattaatgttcacgtctcaattatacataagaatattttttttttgaataatttacggtattagaaatagagttctaatattcaagtttaccgcgtgtatttaaaaaactttaaacttattttcaacaatgtaacctattcaaaaagtaaaattcaaaaagttgatgttgtaactttaacgaataccatcataaaaaaaatcaaaaaaaataatctaacatttgttttcgagcataaatattaactaaaagattgtaataaaaaattaatagtaagactgttctc

SEQ ID NO: 212462 - DNA, 575 bp, Cannabis indica
ttgtaagcttacactagttttaattaaaattaggttcttgttcttgggtatgctaatcctgttttacctgataaaacattctaaaatatatttttcaggttttgcaccttgtattccaattttatctgtggttattactgtgtttgtgtcttaatcactatagatttattctaataatcgaaatttattaatggtcagtgttggtgctgggtgttctcaactcctctctgacatgcaagctttcaaggttgagtttatcatatatatgctttacaatctcatatattttcctatttgatatttgaactaatttcttttgatttgatttggtaggcagcaaatcctggttgtattttggaagattttgttaggtggcactctcctcctgattggacagaagcagagccaatcattgaagacaaagatccttctaatgatggggacatattatctatgagaggtcaattaagtagtcgaatgcaaaaagaaggtataaaacatgcatacgtacaaatatatgaggttaagttacatgtttataaactaacttggggttcttcatgaaaagctccatt

SEQ ID NO: 212463 - DNA, 650 bp, Cannabis indica
attttaaaccatataggattttatttaatttgcatacatcatttttggcatcactccttttgaagtgtaatcttgatgtagtttcatgtaaacatctttatatgattaccatggagaaaagtattgtttatgtccatgtgatgttaatgccaatttttaatggcagcaagagaaaataatagttttaaggtattgaacttagctatgggagcataagtgtcaatgaaatcaataccttgtttttgagtataccccttagcaactaagcaggctttgaatctattgaccgagacatctaggttatatttaatcttataaacccatttgttgctaatgacatgttggtttggttgtagagaaatgtgattaggttctaatgcctctatttcggcatccattgggtgaagccacacttagtattagatggcttcatcatatgaagtaggtttagataatgtgtaaatggcgagtatggcagccctgaaaaaaattgaaaaaactattgtaagataggtaattagcaatgggatatgttgatgtagcaaccttatcataaatgtaatcttggagatacaacgactttgttatatttctacaagacttggtagaaatggttgtatcgctcccagactttggagaaattggagatg

SEQ ID NO: 212464 - DNA, 679 bp, Cannabis indica
taatttgtggaaattattattttcaataattataacaagtatgaattgtgtaattgaatagtatttaaatatttagttttgtttgataaaactatattaactaattaaatataatattattcttaaagagaaaaatatattattttagtgaaaataatatttattttaattcttgtaaaataagagattaatgagaattaattaattattatttactggcaaaataaataataaatcttatttgtggtaaaattaagaaattaattttggaccttaaaatatggcatacacgtataggcctagcccacacgtgtagggtgacatataaatgctcattaattttgtttgattattttaataatatgataaatcaaattaaattaattagttaattttttattatattattaaataatttatttaatcaaaaagataatactaaaataaaatgatttaactgatttttgttagtcagttatatggtatttatatttgaatttgaattaaattaaatattatcttttattttaaaggattacataaatggtttgtttataaccttatatatacgatatccatcaatacaacaaatagcttgagaaaataagagaatagagcgatactttttagagagaaaataagattgaaaaataacattaatttttaattctctctctct

SEQ ID NO: 212465 - DNA, 578 bp, Cannabis indica
tctttgaagaatttcccaggcattccgtcaggccccggtgccttaagagggggcatggaccaaaccaccttccgaatctcctccaccgtgggaacccgaataagaagctgattagcatcctccgaaatggaccgagagaccaagtcgtgaagcaagggttcctcaggggacaccgaagacagaatagacatgaaatttgaccgaaaatgctcaccaaccgcttgtctaccttcaatccactccgcatcattcaatcgaacagcatttataaaattcctcttgcgtttgatcacggtagcagcatggaaaaacttagagttcatatccccatctcgataccatagttccctggatttctgcttccaaatctccgcataccgggtttccacctcatctaattcaagtaagatgtccgcttccaatttcaaattgtcttccgaaggtacccttcgttgcacttccaccaagaaattgtttaaagtctttattttttccttacacattccaaaatgagttttattccacttagccaaacatcgtcgggtattatccaagcgggtaaccagttgtaagctctt

SEQ ID NO: 212466 - DNA, 745 bp, Cannabis indica
aataataataataataaatttcaaaaagtcattagtttgtaggaaaaagatggtgggtgacaaataaatgtgttggaaacataaataagctacatttgatgatcctaaaccctatctcatttatttgaaaggtcactttttggtgattggactggattaaatcatttttacaatataattttcgttttcaatttaagtttttctgtagaaaaattaatccaataactaataaactccttcatttagatttacacaaaaataaataaataatacgatttttttttatttttacacttctaaagtaattttttttacatttttacgaaaattcacataacaacttacaaaacaactaactaaacaatctaaatgcaatcaaaattcatgtagcaacctataaaaactaccagaacaaccaaaactgcaaatttaaaaaaaaaaaaaaaaactaaatatgtagagtacccctaaataacatttagcatttggaatccctatctacgtacatttcaaatattttatttttaagcaattattttaatttgttgttgatctactcattttattcttcatttttttcgacctttttactcttacatattttctaataaccaaaaatatgcacgatacaaaactatttgcgttagatacaagtgtaataattggagtagaatttataacaaccaattttcatatagcattccatcaaaaaaaaaactaaacaatagcttcattcatttctaag

SEQ ID NO: 212467 - DNA, 1083 bp, Cannabis indica
atctatacatatgtatatattttttttttgttatttgtctcataaaattagatctcacttttacaaggaatattgtttgtaaaataaaattcttttcataatctttttctttaaaaaaaacaaaaaaaaaatcttgataatttactcatactacaacaaaacaaaactgacaaaaacaaaaacaaagataaaatcaacaatttactaactttaaattgtcgtagaaaatataaaacaaatctatatacattaatatcttttttaatgtaggacttttacctaatttaataaaattggaactggcggacacttttgttagaacaaaattatataaatatatatatacccgtagaccgtataattatatattgatataattattgttgtttagtgggtgagattccttgtatatatgtacatatttcttttcattttttgattttaggtcagagggcattgattagaaaagaaaaaaaaaaaaaccctatgcactttccaattatattttgaataatgcttaaaaagaaagttctgtacgtacgtttctttacattttcacttatgaagatgggacacaaagacacgagtatcagaatcgtggccatatgtggtgttgacaaatatagatttgaatcatatttacatcaaattactttcatgcaaacaaaaatgtacttttttttaaccaaattatgatacaattatatcatgatattattatctatgtgtattttcaaattaaatttttaaatcataattttcaaattcgtatatatatatatagatcctaatatactctaatattaatttgtatacaggtatttatttcattcaacactggccagtacacactacttatagttgaacaataacgttctcttctctaaatattaatgctcctgttcagtattacttcgtttaacaataaatacggatttgatattgggtgatcagtagttgtgaaagatgtttagtagaatcaaatccaagatttcctctatttcttctagtagatcaccatcaccatctaccaatgataataatgatctccagcttggactcaaaaccctgctcatcattcac

SEQ ID NO: 212468 - DNA, 711 bp, Cannabis indica
aggattagacgagcaggacatccttcctactatttagccaaataatacagattacccgacccttttctaagagatcctcacgtgacacatgttggccaacaggtaggtcaagttgatacattggtgcaagcccaaataaatcaacttaagagcctcgttcaaggcctaactgacccaaaactcacagatctagaacttgaccggacaagaggatcatcattctcaccagaaattaatgctctcgacctaccgcctaagttcaaaatgccaacatgaaaaatgtacatgggcaagaaagatcctttgtctcacattaaatactttaaaattcaaatgaatttacaagcggtgaaaggtaaggtacggtgcagaattttcccaactaccttagcggaggtcgcccaacagtggtacttcaagttagctctaggaaagtttagttcattgaaatctttcatgtcagagtttcatgcaaagttctcttcttctcggcaactcccatctcacttagaggacctggtcgaagtgaaacaaataccaagagaacccttgagagcttacattagcagcttcatgactgaagctacaaaagtgaaagggttacccgaggaagagaggcttgttgcaatcttatgaggtatagagcctgtagaagaattgtggaaagacattaaaagacttactatatggtcaatggtagaattcttggac

SEQ ID NO: 212469 - DNA, 540 bp, Cannabis indica
tgtagaggtcggtaccgtgtgggtctcgattggagtggttctgtgggtctccgtcggagtcgtctccgtcggaggtggcggtcgtctcgagtcggaggtgggggtcgcggtttggttcgggcgaagtgggcagagagagtttgtttgagaaggagagagaaagggttagaaattatgaggagggtattttagggattttgtaaaagtgtcctattttttaaattaccctaattattggttctcctaactaattatcccgtataaaatgcataaaaattcaaatttccctattcttattagtccaattaagtatcagatctcatataattatatataataatttttagagagtatcgctagccaatcgcaaagcgacatgtctaaagtactaggcactaatactctataacaatgctcttttttttttacaaaaaaaaactcaaaaattgaggacaagcatctgtcgaaacataatctcctaatctagtaacagaggttgccaatgtatgagcaacatcattcgctgatcgcgaaatgaca

SEQ ID NO: 212470 - DNA, 579 bp, Cannabis indica
tgatccaggtctttctggtttgtttttgttttgcttaatttatggccttaatttcattttctgaaaatgttcaaactttgatgtaaaacagaggagcttttcaaaaacagggttttcctcatgagagctgcttgccattattctcagccagaaaacaaaatacacaaatgatgagggaattttgaagctgggggctagctagacccaaaggatcttggtttgtgtcagcctggtttggtacatgatctgccatattgctcaaatgtgacaactatttttcttttactaactaatagaacctttaatcactttcacatgtaaatttttctttttttctttttctttttttttcttttttatttacatgtaatcattattaatgtaaatcaattttaagggcacattacgattgaccatgtggaatgtgaaaccgttgtttaggctttgacaaatgacctcttgaaccagattacaaaaccatcaactctcgttaaggtggtaatatatcgttgtattcgacgtctctatactcttctctccatctgcctacgactttttatttacttttcaaatactaac

SEQ ID NO: 212471 - DNA, 716 bp, Cannabis indica
ctctccttagggctagccttacctggcgtagatggggacaacccgcttaaaaaggtcttgacgaacattcattaacgggattaaaattcccatgcttaccctaagagacaagagcgacacctggtagcccttaagggtgttcacaaatgcgagtggtgtgggttgcagttttacttacatatgtggtttttgtaatttttcaaaccgcaaccacaccgcgagatacttaaaactagcaaaaaacccaccgtaaaaatacagcatagcgcagtacaatttaagcggttcacactatcatcattatcaaacattataataaaaatataaaaatcaatctaataaatttttaataatacaaaaaataaaaaaatcatattaaaattttaacatcataacatatatactaatcaacaaattattatattaaattgtctttaaaaaataatgtaatatacacatatattacattcttatatgaaaaaaagaataaaaatcatattgaaaaaatctgtaactttgtaatacatatagtgcagtgtgatttgaactacaattattaaattcaaaaccgcaaaccgtactacattacgcgatttaacaaaaatgcaaactacaacagtactacaaaagatttcaaaccccattttttatacggtggcaatttgtgtgatgtgaacagtttgatgaacacttctagtagccttgtcctccttttc

SEQ ID NO: 212472 - DNA, 1030 bp, Cannabis indica
ttggacctagacctcaaactcggacccgggacctagaccgaacacggacccggacccacctgacccaggacttggaccccacactcacacccgaaccaagaccaaactcagactcgcacctgcacttggacccagaccccaaacccagatgggacccaagtcttgaacggaacaggacagtactcgggacctagacccagattcgacccaagactagacccaaacccagaccgattcaagatagaacctgaccccaaactcgatcccatacctgacctgatgagaattgacatgaatttaataagcataggagatgaaatctaaaagtaaaaacaagtgataagagtgaattcacatgagatatcataggagatcaaatttaaatgtgaaaaataaatgataagagtgaatttaaaaaattattatgttccaaatttgtatcacctacattttaactaagtaagctatatttttgtattatttatcggaattttcattggataagcaattaggatcagccaccgaggatgaggcaaaaaaaagacttacttttaaaaaatatgtcatcttaaaagaagggcctaataattaatttttggctaattagcaattttttttaccgaactttgacatgtactaaattatgccccctgaatttttttggctattaaaaattctccctgaactattaagattgttagatttaaggacttttatctaattttagtaaaaaaattctaacatagatgaaagtttagggggcatgatttagtacatatcaaagtttgaggggcatcatttggtagaaagtatggggagcatgatttattacataaataatcaatgaaacagtaaaattgaatgaaattggacaaaagtccttaaatctaacaatctcaatagttcagggggaatttttaacggccaaaaaagttcaagaggcatgatttggtatatgtcaaagttcgggggcaaaaattgttaattagccttaattttctaaggctcaaaaactatcttctaagactac

SEQ ID NO: 212473 - DNA, 751 bp, Cannabis indica
ctagagagaaaagagtgatctaaaagagaaacacactcagatatcagttgtaagagcttttaagaagaagaacactttgttccttctcttaagtcaatacaatacaaggggagtaaggctattactacacttatggggccaaacctctttaaaaactttggtgttcattttactttattgtttttgttctctttcacttacattacttaatcgctttattatttgactcactgtcgttggctaaaagagaggtcaacatatacatattttaagtttgatttatgatttatcagttggagaaaaagataggtaggactatattaggttgagaaagaggagagagtgagagagataactttggtcatgccagtcgtgtagttgaagtttttaagtttttatacatacatgttttaattttttaagttttttcatttgtaatatatgatttgtgtttaatttaaaattggtattgttttgtgttagaatctcatagtatttttttttttgaaaaaaaaaatctaaaagtagtattaattatttgtactaaattattatagttaatatcataataaattataaaattttcttcgaatcactacaactagcaaatgagagtcaaatcaccacgtccatgttcccaaatgaaaatttatttttcattaatttggtgtataatttaaataaaagaaattataaaaaaggtgtttcacgtccaacacactttgactagagtggggttcctagtatgagt

SEQ ID NO: 212474 - DNA, 538 bp, Cannabis indica
atatattaacttaaatgttatttttttttttataaatattgatatttaggaacaatcttaagcaaaacattgatagttattttaatatatatattgttctaaaattatctattttcattgttatttatgtattataagttttacaacatttatgaaatacaaattatgatttcgaactatactaatccatccttaagtagattgatttagtttgatttgagcatttagtttgtttggtttggttttaaattttaaaaaaatcattattattgatttggttcgaaaaataaaataaatatccaaatcaaactaatctatgaacacaattaccacaaggatttttcaagtaataatgtattattagttttcaaaagaaataattattgtcaacaaagctagcttagtgtttagcattttctatccaaaataaatgttatatataatacatgtgaggcacttctaaatttgttcaaccattgataataatcattaattttccttgcagtgtattattattaatataattttttgcttaata

SEQ ID NO: 212475 - DNA, 701 bp, Cannabis indica
ttttaacttcttctttaattatgcacctcatattaatttattttctgaagtctagggaatccaagagaaatataaaaatcatcaataaaaaattatcatcataacaattctttttttctctgttaaaatttatatcttcctctttgattatacactcccgtattgacttatttttgaagtctaaggaatcaaagaaaaacataaaatctataaagaatttggcagcataacggcatagagacattaaactctcttattttttctttggctatatctcacttttgaagatcttttatggcttagaaagcctagatcaaagtgaaccaaagaaaaaaataagaaaatttactggagaagaaaagaaaaaagtttagaaagatgaaaagaaaataaggataaccctaatacttactacagaacttctttgaagatgagaatatgttagtattttctctgcaaattttggcagagtttttttcttttctttccttttctcctccccgtccgattttttttcctccatataagctattttttttacgatatgttgatatgagagtggagaggtgagtggtgggtggttatgagttactggagagaaaagtggaaaaatattaaaatataataatatattttttttttcctttttttttgaatgagtcctactttttttctgtattatttttctaatttattactat

SEQ ID NO: 212476 - DNA, 521 bp, Cannabis indica
gacaagggttgtcacatcttattttttttttattttttttaattacaaacaaattataaaaatgagtgataaaattatattactactgccatttttgttaagttcttctttttcatcttattttcatttttcttacttttagttcttgaaaatttcagccacctttatgtgtggattacagttaaaagttggctttagttagttattgatcactttttgatttttcaaaagccattttccctctaattcttccctccaaccgttgttgcttttaatcctataattcttcatattatttcatttccatagctattacccgttcaaattcttctttccttgttgtcaaaaaaaccctacaaaaaatctcaaaaaacattctcgatccgctaaaggaaagaggaatttcaaagacaatcctcctagccctacctcacctgttgctaccaaacaaaaatcagttggtgaatcaacgaagaagagaaaacctaaacgtcctcaacctcttgtggaagaatctgact

SEQ ID NO: 212477 - DNA, 520 bp, Cannabis indica
aaaaagtttaggggcacgatttgctacatataaaattcaaggggaaaaattactaattagcctttaatatttaattgcattatgacattttttctagggtttggcgaatttgacgacatcaataattgaccaacttgttgcgaatgtgaggcggatacaaaagttgggagtgagaaaaatagcagttacagcactagaacctcttggatgtcttcccccattcacagcctcttcttcattccaaaattgttctcaaattttcaactctgtctctgattttcacaaccaaatattgcatcaaaaattgcaagctctaaacaatcagaccagttcattatcaaactctttgccagtcttagttcttgatctccataccacgttcatgtctgcatttgagaatttgaagaagaatattactactactaccactgcaggtaataaacgtgtccaaattagtattaattaattaattagtattattgtatattgagtacttctatttgtggtaggaaatttgaga

SEQ ID NO: 212478 - DNA, 1137 bp, Cannabis indica
ttagcatccgaaataattttttagtcaaattttttctcatggtcatgtacgttatagttatttaagacatcctgcaaaattttaagaaatttggaaaagtttaacacgccgaaaattatgttcaaacagtgtgttgcacgcgtgactattttattttatacgcgtgtaaaatagactgtttgaacattattttctatattgtaaattattccgaatttttcaaaattttgtaggatatcttaaatagctataacgtacatgaatatgaaaaaaaattagactaaaaattttttctggatgccgaaacaagttaagggtgcatcagtacatcccttttaagggggtgcattgtagaatcacccattattattattgtaatttttttcaattttttttaaaatacagagaatttgaattaatattatttaagttaagaagttattaatgttattgaaattataatagttatttaaatgattgaataaatgctcgtggatctactaccgacactaattatatttgacaaaataagtccttttaaattttatttttagtttttttcggttggaaatattttctttatagtaacttttgttattattttctataatttcttatgtattgatacttattttggttaattgtagtaaaaataaaatataaatttacaataatattatatttattttgtgtttcaacccactaatgtaaagtttgtttatgtgcagttaaaagaccattgtctcttcaaacttttagaggagggatatcaaatttttaaaacaaattgtgtgacgctgatgacgttgagaaaaaataacttaaacttttgatactgattttattattgcttttatggattggtaaccttatgttaattctcagcttcattaatatatgttttctttatttatatttaattattcaatagaaaaaactaagataattttagaacttctactgatttaagtacacagtaattctgtttatggtcatgttttttgatttatttattgttcatgtatatgttatatgatatagtatagatgcaagttcaattcatcaagcttgtgtactgttagaacttcccactttatgtttttttttttctgattgtaactgtatatatatatatat

SEQ ID NO: 212479 - DNA, 564 bp, Cannabis indica
aggagggatatcaaatttttaaaacaaattgtgtgacgctgatgacgttgagaaaaaataacttaaacttttgatacttattttattattgtttttatggattggtaaccttatgttaattctcagcttcattaatatatgttttctttatttatgtttaattattcagtagaaaaaactaagataattttagaacttctactgatttaagtacacagtaattctgtttatggtcatgttttttgattatttattgttcatgtatatgttatatgatatagtatagatgcaagttcaattcatcaagtttgtgtattgttagaacttcccactttatgttttttttcttgtgattgtaactgtatatatatatatatttttgttgtcttaattatgtgtggctttttatgtttctcatttttagtttttttttattagtgaccaatattattgtgatgatattgtcttgattaatcttctcaggtcttagtttacaaaaattagtaaaatatatacctatttattgatacagatgtgcaaggttttagaaactacaaaatgtgt

SEQ ID NO: 212480 - DNA, 623 bp, Cannabis indica
atatatttcgaaatcttatgagtaataatttatacttaccaaattacatacattttttcaaaaaaaaaaaaagttaattacagcataattagtgctaatgaatcaatgataattcatcaataattagtaacaaattgattttttttggactaattcatacaaatagtatgtagctacatattgttaatgtgattataattaattgataaattaataagttttatatatacaatatatttttaattttatcacttgggtttatgtattaatttaacaccctttgctaattacataagataattcgaatatttgaggagccaatataaatgtacgtacattactattaattgataaaagtgttaaataaattaacaatatgaaattaataagatcaaagaatcataagaattattactactattattactagctattatcattattattatattgatagttgtttttctcgtttatgttgtgtgatttgtttattcatttttttctaaactaacttttttttcttttgcaaaataataactccactttttttattttttaagggttatttacttatttatttattataaaaattacttttgacgtagataatgttaatttattta

SEQ ID NO: 212481 - DNA, 1256 bp, Cannabis indica
aacattttcttaacaaacaatcctcctgcctcaccacaattaagacctggcaagcttctcaaccttctcttaagctccaaatcaccagaactcaagctgagctcgatcagttgttaaataacaatcagtcaactccccattctactcaacaaatatctcacctccaatcagagcttaaccgacttctcctaaaagatgaaatctattggaaacaaagatcaagggttgcttggcttcgagctggagataagaatactcggtttttccaccaaagagcttctaaccgaaaacgcaataactacattcgtggattaaccctccctgatggttccatcactcatgatacacaaaccattttcactcaattccattcctactatactaacctttttacctcccaaggaacttcttcatctgctatctcttccattcttcagggggttaccaactctctctcccctgctcaatctgcttttcttgctgatgagtttaccgctgacgagataaaaacagccatgttcagtctctctggagacaaatctcccggtcctgatggtttgaattctttcttttatcagaaaaattgggacactcttggatatgatctcactcagggtcttcttcatatccttaataatcagggggatttcactcaaatcaataacactatcttggtccttatccctaaaaagaagaaccctaaaactgttcgtgattttcttctaattagcctctgtaacactttgtacaaatgcctttccaaagtcttggctaatcgacttaaatcggtgcttcactctgttattagccccaatcaaagtgcctttctcactggcaggcaaattactgacaatatagttatagccaatgaaatcattcatgccattcattctagaaaatctggcaaattacgttgggttgcgattaagttggatatggaaaaggcctttgatagagttgaatggtccttcatctctcactttcttcatcacattggggctcctcctatgtttacttctctcatcactaaatgcctttccactgtcacctaccaattatccctcaatggtaacttatcaaatgtgttctcttcttcccgtggcattcgtcaaggtgatcccctatcaccttatcttttcttaatcgtggctgaaggtttgtctgcagctatccacatccatgaggaggctgcccttttctctggtattaaaatttgtcgtggcgccccctccttttcccatcttctctttgctgat

SEQ ID NO: 212482 - DNA, 807 bp, Cannabis indica
gttaaaaaatgccacttgtgatttgaggatagtgagcgaaaaaaaaaagccaccgaaaatccaaaaataccgatccaaaaagttgagcaaaagagtcacttgtgatcagggatagtgagccaaaaaagagccgcttatgatcgagtttccaagatggtgagcatataaaatagccaccatcttgaggggacgttagagagtcttacattgttaatgtgtggaaagataatagaatatataagagaaatgagctactcctcccattgccaattgattttgagatgaaaccccattcaccttaccccaaattctaacaaaccaaaactcaaatcaacacaacacaaattcttaattttagatggaaaattatgatcaaaatactcatcataaaaatagctgtttgttgtgacaaaaaatgtatttttgttacaaaacttcttgctattaatttaaatctaaatggtacttttttaatcaaattcggaatactgtagaaagcaaaaggttgtgaatactgagatgttaagaagaagcttcctcgcttgtccagtacttgctcgctccttcaccaaaaccaaagcataaacaatgtcatttttcatatcttgatttgtttttcctaaagcaaaaggtcctcgcctgtccagtacgtacgtaaatataattatatatgatataagaagctaggttttaaatcagtaaaacaacaaagattttttctgtaacataatccagacatttttctgttagaaacgcagccggaatcaaaaaaaaaaaaaaaaaaaaacaaaaaaaaaaaaaaaaaaa

SEQ ID NO: 212483 - DNA, 653 bp, Cannabis indica
tacaaatacaacatatgtgttaccttctggtggcgttttatacgtagtagtgttgtaggttggttcggttggtttgctgcatttttctcaatttccttataagtgttaacggtgacaacttgtcaagtacattgtaatcataacttttgagtaatgacacataaaaatgacaaaatgatcttaacgtaaaaatgttagagaaaagatgtaagatgtttttttatttaaaattgactctaaaattactaggttctcaatacccttttaatggagtgaaggggtatttatagttgggctatattgaccttgtttataaaatgagttgtaagtgatctctatagggaccatgtactattataatgaccagtggtagtgggatggagatattgttggttaggtatcaggtgatactgttacaagtacgactccactacttcactacaaaaaaaatttgaattttagttacaaaataattttggactgaaagtgaaagatgttgtgaccaaaagtttttagttactttttttttgtaacgatgttatgattaaaaagttctgtagctaaaagttttaatcacaataaaaataaaattatcactaaaagtacactttagagcaagtgcaaggaggtttggcatatatctatatatgcag

SEQ ID NO: 212484 - DNA, 509 bp, Cannabis indica
aattttggagttcttaagagaatttggatcttattgatacatgtagtacttatgaatccatttatccttgcaaatcacaggactctaattgtcacaatcacctcatatggggaccgacatccttattaatcatacttttggttgggtcaagactttgataccatttgtaatgcccatgatccacctgtgtagtcacatacctacttagtgtacacgagtacactacttgttgcttcctaaaatgatgattggctttgtaaaacacaagttcttctaatgtgatttgtctttactcgcatacttcttaaaaaaatttctcaagagattgtccattctaaaattgctccaagtcaaacatgcttaattttagagttctttaattatgggctaccaaaaaaaaaaatgcatcttggtgatatcttccttcattgacaattaaaaactcaatattatttctccatttttttcaatttggcttgagttatcactactttagttaaaatactagt

SEQ ID NO: 212485 - DNA, 591 bp, Cannabis indica
caatgcaaactttattttctttccatcagaactcaactctagttctgttttattatctgataatcttgatgtagcaaaagtgaatagataatcatgttagctggttgaagggatgcattcaaatcgaaaagaaacccaaaagagtaatttccaaatttgtctcgttgctgctcactaaggtttttttttttttaagtagtgaattttgggcaaattactaaataatagacaaaagtgaaatgattaaattttctttcttatttcttaaatattttaatttttttatttgttaaacaagtttagcagttaacgtgtcatccttttttgctactgtagtttgcttttaatgggatcaaattataaaataaagctaatatataggggttttataggttagagtgttatatatttatgttaatattatgataagaaaaattaatgagatgcactttcaatggctgaacaagtgtgagaatgattacaatatctaaaactatatgaaaatagtcaatatgattatggaaaccaatggagattcaatagtacttatatatatttataggttgagtgatatacttttttggcatgtac

SEQ ID NO: 212486 - DNA, 850 bp, Cannabis indica
gcaataataatcttcttcatatgacgaaaaaaagctttgtacaactgttttttttacataattattagttttattcgaacaaaacaaaattagtaacatttgaaaaatgctactaaatcatattttaaaaaattactattaaaaatgatataatatatcttcattttattttgttttatatttttgagtagtaagtacaaattaataagtttacaaactttacttttgttatactaataattgtttttttcaatttgagaccaaaccaataccaaaagcaatacctcaacaccttcctttcctctcattgatttattttttagctaatactatatatatatatatatatatatatatatatatttacccatatttatatatatatatatatatttgattatcatttttttaccataattttttctttaatatttctatataaaaattgaactataaacaggaaatatctttaaattaaaaacaaatataatgtgtgtatatgtctcccatgcactatatacattacaaaattaattacttttacgataaaacttggtaaaacttgtgactaaaaataaaaaaattatgactaattataaataataatttttatgttgtgattaaaaagttcgtaactaaaatattagtcacgaaaatcacaatttattgtgactaaaaatgtttttagtgatcacaatattgttgtgactataactaaaactaaattagtgataacttatatcaaaatattatgttttagttataagtaactttttattgtgactaaactatatgacactgtgtaggtaataaatatcttcattttaaaatttacaaaaaaaaaagatat

SEQ ID NO: 212487 - DNA, 653 bp, Cannabis indica
ttgattcttgatctactaaccatacatgtttggtcttcactgcagctgcttgaaacttgggattacttaaatccaattgagttaaagctcaaaggttataatggcgaattagtatcggtccaagctagaggaaaagcttgcctcaagtttcagaacaaatttttgattttagacaatattttgtttattctaaattttagtagaaactttatttctgtttcatgttatacaaacataacattttcaattgaattttttgaggtcgatttctcgtaatggcattcaattatgggtttctcacatggaataagggctttatgttttaagacataatataccaattgcattaatgaacgaacttattaatgttgctaaaccgagaaaccataaaaagaaaaagattgacaatgaagatgaaacatatctatggcatttacatcttggtcacataggctatgatagacttcacaggctaaccaaaggtagtccattgaaaaatgtcaccatgggtgaattaccagtttgtgaatcttgcctagaaggcaaaatgactaagcgttctttctctgcaaagggagagtgtgccaaagaacctctaagattagtacattcagatgtctacacaccgctaaatgtaaaagatagtggaggtt

SEQ ID NO: 212488 - DNA, 747 bp, Cannabis indica
cgaaagctacgaagaggcaatttcatgtagaaataagtcaaaatagcttcactccatagatgaggagatgaattcattccagaagaacaagacttatgttgttgtaccaaagtgagagaataaaaagattgtggagtgcatatagattctcaaggtaaaagagggaatcaatgagaatgaactagtgaggctcaaagccatattattggctaaggattttactcatgtggaaggaatagactacactaaaatattctcacttgtggtaaagtacaaaacaataagattgaagctatctttagtagctcaaatggagtttgaagttgaacagcttgatgttaagactaccttcctaaatagattcttggatgaagagatctacatgaagcaaccatctgagttttaagtaaaagggaaaggagttgaattaatatgcaagcttaatatatctttatatggcttgaaacagtctccaagataatggaataaacattttgatacctatatgcaacaaatcgagttcaaacaatttgcatatgatcactgcttgtattttaagaatcttgaacaatttacaatcatgttcttattgctctatgtggatgatgtgctcatcatgagcaaggataaatctgtgattaaaagtatcaaagccaagctgaaaaaagaatttgagatgaaggaccttggaatagttcaaaaaatacttggtattgaaggaagggaccattatcctcaaatagtccg

SEQ ID NO: 212489 - DNA, 901 bp, Cannabis indica
ataataataatgaatagaatgagagagagcattgaaacaatgataggccacaaaattgtcgtgtagctaaaacaaattgggtagataattgagaaggtggttgataaggcataatcaaaagaagcaatcaatcaatcaaaatcgttgaatgatctcaacccaaacaacaatcaacatcgtttaggtgatgaaatgttcgattttaaggtcctctttcttgatcaaacggttgggttgtggacaaagataatgatgatgagtatatgagtatgtataatacatataatataagtagtgagagagagagagtgaagaggaaacagttaagcgataaatccggtgagatataggataggagagagggaagggagtagtacggagagaagaggagggaatctgatgcggacatgacgcgtccgaaatcagaggaaagacccaataattgctccccacgctgcccgacactcatcattctgtcgccattgtctcaccaacctcttccttcccttccctctctccccatacgtccctttcaactctctcttcttcttcttcttctttcttttcttttcactctttgtttcttattttgtttatttatttatatcaaaactatatacatatttttggtatgaagagaagaagggaagaatcccaaaagaaaattaaaaagaaaaaatgtttttgacataaaataagtatacaaaaatgtcaaaaaaattaagttttataattttttttatattttacggtattttttttttataaaaatacggaatgctggttttgtattatgagacagtaacataatttttttacaacaatataaaatgttgtttttaattggtttataacaacgttatttttacgttgttgttaccggaaagtttcaaaaaaacat

SEQ ID NO: 212490 - DNA, 726 bp, Cannabis indica
tttttttttctagtgagctcgtcgaatatattttttggagaaccaaaataaaaaaataaccacaaaataaccatagagaaggaagaaaaaatgtattttatagcctctatcttccacacctacggatagaactatcacaacaccacgagaacactcagaaaatgatcattaattccagcaaaatgaaacaagaacagtaaaatcgacgttaaaaaaaataaattatggaaaaaaaccgtaaaacaacactaaaataacacaaaaaaaaaactaaaaaactaaaaaataaacacaatataatgcagtataaaacttataaaaatacacctctacaggttgtgtgcttcagttggagtattgtttctctaaactgcgttctattgttttaaacgagtttattaattaataaatctcttttttattcaaaaaaaaaaaaaacttataaaaatacacagtaaaaaagaaaaaatacaacctagtagaatttttgtgaaaaattgaaaattagtataatttgtaaatttctcaaaaaagagcaacttaaaggagagagcaccgaaaattgatattaaattcaaactaaaattaaacaaagagaaaaatgtgggggagggatagagttactctagaattactagtaaagaaccatggcgaaagaggaagagagaggaaaagattgccgagtgaggacagcttgggtttttcttttcaatttgggcaaaatga

SEQ ID NO: 212491 - DNA, 680 bp, Cannabis indica
ccctgtgctgaaatttttattctctggagagtatgaaattcatggttcttcccaaccctatactttgtaggagtaaaatataagtctcaccaccaaactagcccaccaaaaaactcacaagttcttgtaccagcccaacaactctaacttgaaattttagttctagaaaatctataccttaaatagtctttcttttctggtacctataaagatcagtatcatcatgtgtaactgtgtcaacacaataaaacttactattcaatgtggtatagaaagattaaaggctctcagataaactaattgagcaacacctttaaatttgaaattgagaaggctaatatttgatactctttgttaaactaagtcttaagaattcgaccaatgttcacagttcaagtttacttaaacatacacgaaaaaaaaaacataaaaaaaagaaagagatactcaagaacatatgttatcaaatcatctttcttgaataagacccattagaacaagagtacctacatacatgtgcaccctctacgacaccatgtaaactcagtaaattgtcattaatgattacaataacaataacaaagcagaaagcatcaaagactatatcagaatataaataaaataaagcacgacatagaaaaagcttgtgaacactgcatcgacaacaaccacaaaaaata

SEQ ID NO: 212492 - DNA, 508 bp, Cannabis indica
aaaaaaagaaaaagaagagaataccaacatccagtttgaaaaattaaaaatagaaagttagctctaaattttattccattcaaaatgtttatataataaagcatgtgcaaaggtgggaaattgtttaaattagttattatttgcagtaatttatcagttaagcatcataattcttgcaaattcatcataattcacttgaccatcgccatcaatatcagcctctcttatcatttgttcagcttcttcgtctgttaatctttctcccaagtttatcattacttgtcttaactgcacaatttatcaataatagtgttaaaattgtttgagattgaaattgaagtaaatttaattattaacttaatttataattgttagagttacttaattaatttttaataataataaaaaaagagatgactagttatttaaaagagttgtacttatatatataaaaataataataataaaagagagtagcaatttattttaggtaaatggcggcaaaact

SEQ ID NO: 212493 - DNA, 1046 bp, Cannabis indica
  modified_base (33)..(33): a, c, t, g, unknown or other
  modified_base (44)..(44): a, c, t, g, unknown or other
tacgctagccccgtatggatgacacagtaatancttgagccaanaatgccaaacactgaagaagtattacagtgagactgtaattaagattttttgtggagacgaagtaagaagtctcttatctataagtagttttatttttcaatcaaggatgaaatctgtaatggtcttccatttcaatgtaaatttgaatatgatgtaactctaaaagtttagctataatatatgatatgacaaggtttttagtgagacaattgtgcataacattaaaaaagcagaaatagcatacctcaagcgtctactcggatcaatgccagcatatgtttagggggagaatgaagcaaaaaaaaaatctcaagactatggggataggggtgggcaatatccgattcaatccaattgaactaatcagatccattaaatccaactacaaaaaattagatatccgattacaattagatttgattggatgctaaaagtgatacgaaccacaccgacagttgtgatgaaacccgataccaattatggtagcctctaagaattctcaaaatttggatgtcgaatcgcaacccaatgcttacttaagcatgaaccttagtatgaaggaagatatgtcaggtcgaacaccacaaggaatactccttgatgagtttgaatagttctttcaagaactcaagaagaaaacgtctcaaaattttattcataattaatttgattttctaacgtgtttataaggctttatatagccaacttacaaccaagaaaaaaaggaaactaaagcaaagataattttccaaatacaacaaagacaaaataaagaaaacaaaattaaaaaggaaagttgtcaatagccttgaaaagcgcaatcaaccacaaaagagtcctaaattgagtctacttggatgagaagcacaaatttttgctttccttcagtgttgaccacgatcttctcttgttttagaattctttggactaggatgttaagttcctatatgaatcttttggctcgcgccctggccaccggaccaactcgaacttgacttgta

SEQ ID NO: 212494 - DNA, 710 bp, Cannabis indica
gatgacgcaatcttcctcttctcatctctctcggagtttctctctaaaaaaacacagtctaaaagtccctaaaaatgaaccctaaaagtcctatttatatcccataaaaatcctttgaattaaaaaaaaaacaaaattaaaaaaaatctagaatcgtgctctcgtctcggcgaacgttgaggctcgctgtagccatgacttgctgaaaaatttctgtcgggtgttcatattagtattttggtcataactttttcaatataactacaaaattagacaattcaagatccattactaaaaaaaaaaaaaaacaaagacaattcaagatgttttaaaaatttaaagacgagatctacaactttcatgttcaactccaagtccaattctgcttctaaggtcatcaaaaatcacaattgcattccattttgtcaaaccaagctcacttacttctactattttctaccaaaatgtgctaaaatccctccaaaggactccaaatgcacaattagtctttaaaatagcctaacaaattataatcacaataatcaataatttaaagaatcaatttaagaatattaatacataaattagccatatttataggataaaatattgacttattaaatttccctacatttgactcttgcttgtcctcaagtaagttaatgataaaatgaatggtgcttaaacaaattgatctttatgaaaaataa

SEQ ID NO: 212495 - DNA, 579 bp, Cannabis indica
ctccaattaactctatctattctttcatttaaagtaatctatatatctatataaaggagaagtatgaggcggtgacatgacactctaaaaacactccaattaactctatctattctctcatttaaagtaataaaataatactctaaaatcactttttatctaatttttaattttcaattatttttataaatactaattgaataattaataagaaatatatttatacaattcaaaaaaatgtcaaattaagtaaaattaatactaatcgtgtacatatcttatttttaattttttttttaatatttatctattttttcctatttttttaaaaaattattaatctatatatatatatatttaattttaagtatatatataatatacatataatttttttataataaatcaatagtacagtacgaaatttttgtttttcatatcaaaattcctaaaatattctttttctattaattaaacaacactactaattaataaccctaaagctatatatgttttatcaatttggctgctctcactttctttttttctatttttccgtttctttagtcttttagagca

SEQ ID NO: 212496 - DNA, 667 bp, Cannabis indica
aataataataataaaagaaagtgtaaatgccactttgaaagtcaaaataacagtttgaaaccctgtaactatatttgataaattgaaagaaattgtcataataaggtcctggcagaaaaagttgaatgtccaagtcaagtcaacaaaatctaatgaataggcaaattatatctgctcaattttccaagctcaaatggttaaattcttcccctatttgcaagtttccaaatacaactccaagaaccaaagttacccaactacaaactacatgctcatgtttcccctaaagaaaagtgataccatttaaatcacaatcctaaacatcatagtacacatccacacacagctaaaaataagtcgaagcaaaacataaaatgcctttatgatagaattacattttaattacagacatgatgatacactataatattacagatacagaagggaaaaaaaagctggatagtggatacttcgttaaaaatgtaaaaattgcaaaacaaagttgcatcatacctgcacagctataaacgagtacattgtatgattaagcttccagtgccctagttcgtgagctataacagctacaatttcttcatcatctttgcactacaagaaaaaaaacatagccaagtaccaattgtcactaatatgtaatgacagcaaaacg

SEQ ID NO: 212497 - DNA, 810 bp, Cannabis indica
aggacgtgcaaaattacagaagggtcaattccgacctaccaggaaaaaacgtccaggtttgctcttagaaattttatcaatgctaattttacttcgagcaacagaccttttccgatttttacctttttggtcgggatatctggatcgatctcgatctcttctagttcttccacaggtccaacattgctgcttaggtccgcaagtcgaggatccacatcttcatccccaccttaggaagttccctacttagaaattttttttccttgtctatgctctggctaagggatacttcctttttagccttggccacgacaagtgtaatatcccagaaaataaataatatttaaatagacatattttattaaatatgtaattattttggtaacgaagtaagattatgatcttacttagggtaactactgagaatttattgaatgatatatatagcataatttattaattatggagattatattgggatatatgggtatcgaggataccatttttgaaataaaatattttttagggcccgacaattgtggaaatttaacgatgtgcttagtaacgtcacgacgttaatggatggattattttgaggatattctggactagtttagaattttagaatgtcggtttggtggattagtaaaattaccataatgcccctaagttattttaaaatttaagtttcttggagggtaatttagtctttctttagaataggtattttatgttttaattgtttatgggctaacttttaaaaaaaaagaccaggagctatacaattccacatcatctgggggaaggtcg

SEQ ID NO: 212498 - DNA, 350 bp, Cannabis indica
cttcattgcatcaccggagaaacccttcccccaatcacacacttgaaatcaagtcccaaagccataaattaaatctcctgctgccaaaattagaaaaagagaaaactttctcactaacctgcaattttagatataggtataactataattaaatttcttacaaaatatggtaattttagtcataaataacaggttaattgcttaaatgtctaaatgatcagcttcgtttggcagggatgagtttcttgggtggtgcgatgaggaagaagaatcggtggttttgaggatttaggtcttttttaacaaataagatttattttaaatgaatgaataaaaacgtaaaaaaaaaa

SEQ ID NO: 212499 - DNA, 802 bp, Cannabis indica
tcttagcttatacataactacggaaacaaccagcgtttcacgtgcaattatatttatttaatgatatatattcaaattttcaaattttgagatttttttttaataatatgagtaattatttactattttttttttcatttaaaaatgtaacaaaataaaataaaataaaaaatcaatcatacaaattcttatttaataaataaagaaaataaatatatatcttcaagcattatagtaaaaagaaaatttgaaaaatccttatacaaattaaggcctacaaaataatcaataaatctatataaaaatgaccatctatatgatctcaaaattgttgaatcattatcttgtagtcgggactacattaattcaaactggtgtcatcaccgtatctcacttatagttgctactatattcaaattcattattgtcatcatcgtatctcactacaccatttataaacaggttacatgcgtcgtatttagattttattttttgacacaatattaacaccatatacttgtaatacatgtgttaaaatggcatgactcatgaatataaattgccaccccttttgatgagatcggactatcttccaactatttgcatcattatttaagtcggtaaaaaaagaatacttaatgacaaaaaaagagaaatattttttttttcaaaaaagttgagtttaggagaataaaaaaaattacaaacaaatatgaaatactatgaaattattaggggtagacattttttatttattttttatcttaattttagggatggacttaattagagagatttttaa

SEQ ID NO: 212500 - DNA, 1343 bp, Cannabis indica
  modified_base (1283)..(1283): a, c, t, g, unknown or other
aatttaagccaaacatgccttaaatgacttatgtatatcaagggacttgtttggttgttttgttaaaaaatgatttttctcccttaaagtgagtgggataaaagggtataactaagaccctttaagcctttttattaataaatatttttcttttgtttttttcaagtgttattgaaatatatacagaaatcgtttaggatttagggttacatattttcactcaaaccatctctctcttccaccaacatccctctctctatccctttctcttccatcttcgtgtagcagcccattcatgccagtaatcaaccattttcgacaacaaacaatcaatggagtccggatctgaaatgctcatctcgctgtgtggtctctttttccttttcttttttgaaatgctcatctctctccttctctcttttctcaagtgaatgaaggtttgcaatggacgaagcttctagttgatggtggacgaagcctaaaagtttatcgcagtttggagtcaaagtcgtcagtggacggagctattctgtttggttcgtcgtgcatcctggagtgagcgttgttgtataacatttttttttgttgattaatggatcttttgtataatgttatatcttcaataaaccagatgctattagatatctaaatttttataatcttctgtgtaattaattttcaagaatctgaaaaagttttaatttgataatatagtttatgatatatttttaaatataatttttttaccttaatttcttttgagttttgattctgattcttataatagactggagattaagaacaattttatctcattttaccccaattttcttttaccaactgagataaaaaaatattgatatcaaaaaataaaaataaagaaaaaaggaaccactattttatcccagtttttatattataactgggataaaaggtaaaaggtgctaaaagtgaatattttatcccggtttttatatagactttttatcgcagtggcatatctccctatttttattttagtgaaaactgggataaaatgcccctaaaaattaagattaaagcccttttttgtagtagtggtagtccacatcttgggtgcaccttcaagtggctttaggtgtcatctccgtcttctccaaaggtctttgtcatctcttcaacttcgtaggagaggtcttgtttttctacctagtgccaaagagcagaggaggtcttcttggtaggcaataatgagcattataacaatcataggcagtttcctttattttcaagtcagcaaccgntaccgagtcgtgttgggagcttgatgtcaagtagtatattcatgagatagctcgaaggtc

SEQ ID NO: 212501 - DNA, 530 bp, Cannabis indica
atagaaaactacaacatcttcaacttataataatttataataattaagtactcttaaaataattaaaacgtgatgagtttaatcctttagaagtaattattttttttctttatttatatttaattcaattactttaataattttaaaagagaaatgagctcatatactatttttgtaatttttttttttcaaatttacggtttcagcttctaaactagtttcttcagtatgtgggttgctgtacaaattttagttgcgatttaggttgttccgttagttgcaataggaatttctatgtggaatttcataaaaatacaaaaaaaaaacaaaaaacaaaattgttttgaagtataaaaataaaaaagcccaattctaacattctatcatattatattaattaattttattttttaagactataatgttcaatgttataaatttattgataaaagtaatattaagtattatttgggaaaaaacatatagtaaatacatattattacatttgaaaacatatatatatatatata

SEQ ID NO: 212502 - DNA, 1205 bp, Cannabis indica
cgttaacccccttcgggggtaaaagctcatacttaggagtgacacccccaagacccaacatgaggagggtgccagcggccgtctcggggtgtcaattccgagactccttagatgttgtgggtagccttggtgtcatgaggatgcattatatcaaccatatcttacgtaggtagaatgcatgacttgtaccatgagagtgtagggagtaggggtatacccctagactaaccctttagggggtaagggttgtacccctagactaatcctttaggggttaaagggtgtacccctagactaaccccatgtagatcattgcatttgaggtaggggaagtagtatatacaccctaaattggtttaactcccacaggtgtgtggtgatcgtttatcctatttatgagggtgctagtccactgtccccctatggttagtcaccttgctcaagctagggggaaagatgaccgtcagacttctcttccaacggtcatgaccaacaatcatgactttacacattatttatcaattcaatctcggtatcctcgtgccacatgtcatcattttttccacatcactattataaaaatttgagtaaacatttgcctccaagtttttagcagtatgactatactgtagaaacttccttgtgtagcctgtgattcaatttagttgttgatgacttagtggtatggtgtcgagaatgccatgcttatactagaattgcatttcaaaacccaaaaaataattctctcacttttcatatttttacaacatatcccaatgattaattttttcctttacaaataaaattaaattacaaggaaaaaaattattaacaaaaaaaataatctaaatatttacaaagataaaaataaataaattacttgtatcattataataatccttggaagctttgaagtttccatcttcatagtgggtaagttctctacacttcctcttgcaattttcttgcttggaatttgaaatttgatgaagcttcttcttggtagtttttccatggtcgaaaatggcattgaatcgttggaatttttaagtttttgattgacatgtgagtgtttgacgattgggttatgtagcataggctatgggtaatgtgtttttggctttggtttgatgaaatttagtgaaggaatgactaattttgaaacttttggttgagagtgttcttgagctttggaagaacattag

SEQ ID NO: 212503 - DNA, 877 bp, Cannabis indica
tatatagaattttaaattgcttttgttaaaaaaatattaatataaaataaataaataaattaggtggtatatagagaaaaatagggagtttttttacaaaaatattgaattttgacaaaatttacaattttactgtcacacaattttctttacaaaaactatctttttataaacaaccgtaaaacaacaaaatagaacaattaaaacaaaagtggaacaactaaaaataaccgtagaaaaacagtgaaaacttaatgcagtacacaatataaaacttatagtatttttaaaaaaaaaattccgtctcgcaataaaatagtaaaaagattaaaaatttgagtatatagtgtaatgattatagaaaaatatgattgttattattattatttaagtaagtgtttttttttcgtaatacattatctttatgtcatgatttaaatttgttgtcatcactatatgcacttgtaattgccattaccacaaataaatcattgagttagctatgtatttttagacataatctgaattattcaatcataaaaataatagaatcaataaatcaattgaaaactcatgcaatatttataaatattattactatttaatttgtttgactcttaattaagatgaagagtatgaattgacatcatatctagtatttgactattattttaacccattctgtagtgcttgatgtaaataactaaattcataaaataaaattaaaattaaatagttacttaaagtaaatagttgtaaattatagatatttttatgttaaaattttaaataatcgtatatatgatttttttgaaaaaaatctttcaaaaaatcttaatactcatatatagctcaaaataattaagcaaaaaaaaaa

SEQ ID NO: 212504 - DNA, 722 bp, Cannabis indica
aaattaaatcaattgtctttatttaagatggatctcacttattaaaatgacttcccacataaatctgtctaagtttgtgtataatttatgtgtgtattttattattaattttagattaaatcagttaagtgaatttttactatatttataagtaaaaatatcattatttttttattagaaagctttactttataaaattaaacacaaaactaatattagaaaaaataaaataaaatgttacttcattatcagactattcttttagatggacatcctttttgtttacatcgataaagacatttatatttttccatacataaaagaattataaaccaaacgtgtttatataaaaatattcattatagttatattagacatttaacataagttttggaatttttttttttgaataatttacaatgttaaaattagaattcaaacaatctatctatattatatgtgcataaaaaatttatatatatatataaatatttgtaaacttaattccttaaattttgaatttaaccccataaattattataattttcataaaactagtgaaatacctattaaaattacattatatactgtcatatatatatatggggtatatataaaaaaaaatttgacatcacaaaatagggatgcctttaccgataaaagtaaaattattaaaaatctcttacgatgatcttatttattaacctgtattttaatctatt

SEQ ID NO: 212505 - DNA, 504 bp, Cannabis indica
ttttgttatttattttttaaaaatatactatagaatattctttataatagcgaataaaaaaagtaatttacggcataaatacctaattttgacttctagttgtagataaatacttaagtttaatttttaacattaataacacctaaattatatttttaaaacttccgtaggtacctgaccattaagtgtcaagttaatgattacgtggtagtccttgattggtccatgtcattaaattttcactttttatttagaaatgaatttaaatataacaataagaaaataacacgtggataatgacttacacttaacgactaggtacttacagaaattcaaaaaatataacttggtggtattaccgacaaaaattaaacttaagtatttatctacaatcgagagttagacttagatagttacgctacaaattactaaaaataatagagtgatttgtgagtgtgtagagaacactatagagaagagagagtagagaggtcacatgtgtct

SEQ ID NO: 212506 - DNA, 674 bp, Cannabis indica
gtatataaatatttaattattgaaaattgtttgtacctaatttagcctgtttttatttggggcagattaaatgaatatagctattattgaatgtattatcatatcattaattgacttaccttataattaaagatcataacaaacaaatgcatatgcagaccaataattaagggtgagttttctaatattttttcaattaaatttttattttttaattataaaaataaaaatattttcaagaaacatgttctataaaattattttcactttttaattttaaaaataaaaatcaattttttttaaaaaaaaaatcacttccaaatttttttaaattataatctatttttactttttctatcaatattttaggccccaacttcggcctcaaacctagactcgcctcaaagctcgacccaaccccttgtacctgaatttgaacctcgactcagacgcagaaccccagtgcggccctagatgtagacccccgaccccaaacgctgaccccaaatcccaaacctcatgttagaaccttattttaccaagatatctgacttttactaatatgcatgtttgatgatcatataaatattataacatcctaaaaatataaaaaacttacaaaaatggtcaaaataagacataaatagtttaggatcctcacattgcaccctcga

SEQ ID NO: 212507 - DNA, 1091 bp, Cannabis indica
tttcctaccacactagaagaggccgccgagtagtggtacttcaagctgcatcgaaataactcatggaatgccttctccttgtaattccacacatagttttcttcctcccgtcaactttcctcgcatcaagtagacttgttcaaagtaaagcagatgccaggagaaccccttagagcctatataagtatatatatgactaaggacaccaaagttaaggggttgaccgaagaaggaaggttggccgatatattggggggcattgagccacttggagaactgtagaaggatatcaagaggctgactgtggagtcaagtgctgaatttttagatcaagcatatggattcattaagctcgaaaaagttgttcgccgcgtggatattgtcggacaaaagaaaagccaacaacatgccacatcaataggagcctccgttgagaatccacaatacccaagcagctcaaactcaaatgggaacaggtctaacaacggcaataggtagggtaatgggaagaacagcgaattcactggatatgccaaatagcaacctagcaaaaatgcctcaaaatttactgccttctcagtcctaacagatgacatagatttaatctacaggacaacgaagtctatggtcccatacaagaaaccttctcccatgaagaaagatgtaagtaaaagagatacatccaaattttgtcgttttcatgcagactacggccacgacacgaatgaatgtaataatttgaagtgggaaattgagtttttgatcagaaggaataacccacacttacagaaatatgtcatggccaaccagatttagagggccaccaaagcagacaataatcagaactagttgatgcctccaccaatggacaggcatttacaggtcattattgggggtccacatcttgctggagattcgggaaaagcttgagaaaagtatgattgaaccttacagtatgaacgaaatgaaacaatgttggtcgtgcaggaaagaaaacaaaaaataccatgcgtaggggaaccaacaataaccttcactgaagcagatgccagccacgtccattttccacacaaagatcccttgatggaggc

SEQ ID NO: 212508 - DNA, 1038 bp, Cannabis indica
gtacattttatgtatttttttgtgctaaatttttttttcaatatttaattatattaataatttcaatactattttatactaatttaaaaaaatacaaaatctaattttttatttaacaaaacaaaaagttcattcgataacttttataaaatacaagatctaaaataatattatatattgggtaaatactattttagatcatgtgttttgtaaaagtttccaatttgactttctgttttgttaaatgataaaatagaccctatattttccaaaataagaaaaatgggacactgagttcaattttcgactattttatttttaatataaccaacttaatttaagacaatttctaacccgaacagatacagaaaatgtaacaaattttgtcatagcatctctataacaaattaattttattttgacaaaaaatcagttcatgatcaaatttgtacaattttttaacaaaataaaaagtctaattagtaacttttacaaaatacatggtataaaatagtatttacccttatatattatattattaattataagaataaattaaataaaagtttgttgggttgaatgaattaatatggagagtgtctactaccacaatatataccaaatctcttgagatggatatggtgcttggcgcaccggcggtggtctatcatttatggtcctgccgtaacgaagttgtatggaataattaaagaataacaaaaaagaaaattattcatatatagtttctataaaaatttaataaatacctgttgcgccctacaatgaagtaatgaacataagtgaaagttaattttaattagtacgttctatctggtatgaacaacattataattattatttttaatttagtatatattaaaaaaaaatagtaatattttaagtgcctgcgtagtcccctatgtacataaatataatactatataatagagtcttgcatacaaaaattaattatttataagcaaaacattgataaatcatctctaattatatattgacgaaaaaatattaaacattatc

SEQ ID NO: 212509 - DNA, 579 bp, Cannabis indica
aaatgaggggaatcactaaaatatccaactatgttttaatatgctattttttcttttagcattttacaagttaaaatatatatatatatttttttttttgtaatcttaaaattttattcaaacactttcaggcaagagcatcatactgactaaaaatacaatcggacaaaaaatatatattattaataaagtgatttggtaaaaatatttttttttattattatcatttacataaacttttattattactttatggaaatatagtttcataattaatacacaaagaagtctcatcagtggtccaagttcaaatcctccttcccgcaatgtcacacacaaaaataaacaaataatagagaaagaagacattacgagttaagtttgtttatttattattaaaaattcatataccaattcacataaaaaaaaatttatgaacaatccaaaccatacattttttttaaaaaaaattagaaaatggtaatctccctaataataataataataataataataataataatattcaaaattcataatttactttaaactcttcaaactaaatttttttaaaaaatt

SEQ ID NO: 212510 - DNA, 911 bp, Cannabis indica
ttaagtatataattaattataagataatttacgaaattccctcaattatgaagtttggtaacctctagactcgaaaaattatagctaaactcctcaatctccatagtccttccatccactttggtctattaagtgccatagtcgactaccacgatgtacacaagtatacacgtggtaatattttattagtccacctaattttaataattaaaaattaaaaataatttcaaaattaaaaaatttaaaaaataattttttttctctttcctaatttttcttctttaagcttcttctcttcttcttcacatgaccaaaaaaaaaaaaaaaaccaccacccaccaacccccaccccaaaactcagcaccactccagctagaccctgatcccgacaagacaacgtctgtaaagcccgcttagttaatttggaaattagcagttgtttatgattaattatgaaattatttatagctatttaaataatttattatactgttatttatgttattcagtagcttgcatattttgtaattccggtgcccggtattttggaactcggcgtttggctcagtagaaatcacaacttagtatgttagtagtttggggacgggttttagacattgggaatgtcgggaatggccgggaatttagaatttcccaaaaatacccctttagtatgatttatgtgattttatggtggaggggcaaaatggtctttttgccccaattagtgttttgtcttttagtgacttttttatttgaaaaataaatgttatttgtttatttattggctgaaatgaaatggtttaagtggcattattctcttatttttcttcatttctacacttagcaaaaaaattagaaaactttgaaaaaagagaactctctctcattctctctctctatttcggctg

SEQ ID NO: 212511 - DNA, 1137 bp, Cannabis indica
ataagcacacgtaattatcactacaacgtatcatgatattctgaacaacttatcactcttccttttatctgtcgcctcttcctataaaaatcaccatttctgcaagtctttgatgtccccttctctcatatatataaatatacatataataaatctgtaaattagagactaatttgaagagagagaaagagagaggagggtttactaagtttctagagagagaaaggaagctcgtctttagctctctctctctatctctttccctttccttcccccctttgtgcccttcgtctctgtatttttgcttgcttcatctgatttagttttcaaggtaagagactttctttttctctgggttttattttttctgtattttttttttttgcatcttcgatttcttatggggtctaaagttgctttattttatggtcttttattactattattttttaaaaattaattatttatttttggagagaaagtaaagggggaaaaataattatttagggtgaattacttgttcacatgtcggtttgcgatcactatcatgaaaaatggagatttagtttaattgatctagtttctggatgtatgagtttttgaatttttgagctatttttggaagacccttttttaaaattttggtcttagctttttcccctttttgagtttattgtttttcgtttgcagatctagtcatatttttggtaatattcttgggttattaatcgaagacggggcggtcaagatgtcgtcgcttagtagggaacttgtgttcctgatcttacagtttctcgacgaagaaaagttcaaagagactgttcacaagtaaatctactgctaattatttatttaatttttagttccctttaatagaaaatttgttagtggtattttcttctctgtttttgcttcttatgtactttatgcctcattaattgtttcttttttttttttgtttattattttatatttttcataaataggctagaacaggtaatctgggtttttctttaatatgaagtatttttgaggattgaggttcacagtggcaattgggatgaggttgaaaagtcttaatctgggttcacaaaagtagatgataatcggtattccgatgaaaaatatttttttgag

SEQ ID NO: 212512 - DNA, 582 bp, Cannabis indica
agatacatcctctttaattattgcaatctcaatcaagagatctctcaaccatctggtctcctttccaatggtagctagagctatgaactttgcttccattgtggaatgaaaaatacaagtttgtttcttaaatcccaagaaactgcccctccacttagggtaaatactagggctgcacacgggttgggttttcaggtttttggttggtcgggttcaggttttcgaatttcaggtgttataaatgcacaattgaacttggtttttgggtggtcgggtaaggcgggttttgggtcaggtatatcgggtttcacatggttgggttccagtgttatttgaatgacttcacgtttcctcggcaacaaaaaaaatatatattatataatacatatatatggttatagataattaaaaaatatatataatgcagagtagtcattgtcaaatcaatagccattaaagtattatactacatttattatataaaaattaattaaataatatatattataaaaattataaaaccatataatataaatattaatttaagaatgaaagaaactgtgaagtgtgaaactaaaacga

SEQ ID NO: 212513 - DNA, 1229 bp, Cannabis indica
atacttcccaaccttttcaataggtgatacagtaggcattccgagagaaacaatctgctccattacacagagaaaataaacccgtcttagaaatagtgtaaaattaataaataaccaacaacacagcattgagaacactccacatagtttgtgacaacttcactgtttaacagaaagttaaaaagtacctctttcttcaacttcactctgacatgatcccaacggaaaggtgcatcttccccagctgcaagaggagaactgctagtgtgcccatgatggatagcttcttcctcgggactcacaggagattcaattcgtcgtaacccttttaacctttcatcgtcttgaatgaacccaagaactctttccactgattcccgagtcccacatatgctgccattgattccttctggtgcaagaatgatacctcctgaaacacgctgaacaggatcagcttgtgaggctttaactagtggatagacaaccaaacatatgaatactatcatagcttgaaatacaaatgtgagtgaggactaaaaagtttatcagctaacagaatgtgatcctgatttctagcaaaccaaacattagtcaatatctatttaaaacttgctgaccttgttcatcaattatctcaatacaatgtaagaaatgtaaatggtcggaattaaataaatgcagcatagttcatgaacaaataagttgtcatacatcaagttgcttcaatcctcataccaacatttctttgggattttgcaattgcaaagtaaacagagtcaacatattaaagtcagttcctttaacgacaccacattcttagagctaacgattaataaaactgagagaaaattatgaataagcaaatagaaaagaaaaataagtaccaattcctcgcagagttctttcaagggttgtcgtaaatgggcatggtcgggaaaatcagcgaacttgtagaaggagaccaccacaagaggttcagaatcggactcatcaacttcaagttcttcgcttctcgttccagccgcggtcgaaatgggaatggggttagcatatccacagaagcttgtggaagtaaggttcatggttcgagggaaaccggagagagaagaacgagagagtatggggattcgagagaggggtttcgggagggagttcaaattagggcttatggaaaacgacggcgaggaagacgatgatgatgttagcatcctcatgggaactaaagaagg

SEQ ID NO: 212514 - DNA, 806 bp, Cannabis indica
tatatatatgaatataataataataattaactacactaataataacaacaacccttgaaccgcaaagacattacatgtgccatttacttattaataattcttatctactcattaccaatctaatatggtcaccacacttttgaatggcaaatatatataacattgttattgaatattactagtggttaacatcttcatttcaagaagtgttagatagtcttacattattaatgtgtgaaaagataatatagtatatatagaggaataggctactcgtcatattgccaattagttttgatataaaacctcattcatcttatctcaaattccaacatgatattagagcaaaaccaaaaaagaaaaaaaaactctttaatgaccattcgaccccaccagaaaaaaaaaaaaacccgatggaatctcattcatcttatcttaaattttaacatagtatcaaaaaaagaaacaaaaaaaaaaaaaactaatagactatctgaccccaacaaaaaaatcccatggaacctcattaatcttatctcaaattttaataagaagtgacattatataattgttagcgatattttttaaaaattattaattaaattatatggtatctgatacttaattgtactaacatcgatataataataataataaaaaaaagtgctaagagtaatattagcatttctctatattataggttaattagtgggaccttctcttatacaatgcacacaaaagagcattatagtgcagtgatggatgagaataaagtgtaggttatatagctaaagtagggtattgcg

SEQ ID NO: 212515 - DNA, 502 bp, Cannabis indica
aaactaagtggtctttacatataccctattataggtgatgattttcaaccattgggaacttcaaattagcgactgttttgaaccgtcgcctattctactcattttgcgacggacgtataagtgacggttataaaaaccgacgagaatacttcacccaactatttaaaaacgttaggaaaaaccatttttgtattagtgtcatcttagaatgagtttttggtatttataatttgacccctcaacaaattataaattaacttatggtatctacaaattaattttcatgacaacataacataattggctacttaattttgtctcatatttataatagcgtatacattatacacatgtactcacaataaatttttaatcctacactttctacctaaaccaatacactttctacctaaaccaatattattcttttacaaaccgtcgatgagagagtaatgcaatatgcagttcgtcttttacagcctaactttatgtgaatgacaag

SEQ ID NO: 212516 - DNA, 1030 bp, Cannabis indica
gatgattccgagctacagaagtcatgccaaaatcgccctcttgttcaaataaagccccatcaacattaactttgagatctgtttaactcaagtgcaatccaacgctcaagatttcgccccccatcatgcagcggagacaacgaaagacccttccttccttgagcaaatttatactgattaagcatgtttctagctgatgcaacaatatttgaagcaggccaactcttcttctgccaaacaaattcatttcgcgggcgccaaatagccccactcaccacagtcacttcctccatttcaccttcgtgccctctaccgaagatccccaacagccagctgctgaatgttgtagcctccgcccacacgtcgaccatgctgcgattccaagcatctttagcaaactcacactccaccaacgcatggtgaacagtttttgcatgagcgttacatagcggacaatcaacattgacgggaacatgacatttttggagctgaatacaagttgggagcacacccaaagtagccctccataagaagtttctgatcttaggaggtatctgtagcgaccaaagacgcttccaaaaatcagtattggcatcacagcaccaagcacctttagattcttgcaaaaatttataggcacttttaaccgaataattcccacaagtctcaagtctctaattccaaccatcatttacgatcgaatcactaagctggacaaaataaagtcatgatcacgtgaaacaaacaaatctctcacaacatcctcatcccaagcgtgacactcttacttttataaaaatttcaatagtataacattcttcaaaaatattataattatgatctaacgtattattatttaatatgtattctaatttttagcaacaatcactttttagctttaattttttattaaaaaaaatgaatagtatcaatgctattgtatagtatctatgcaaatttttatatggcatccatctctctctaatggtatatcatctcaatattttgctacctaatatgtccatctcag

SEQ ID NO: 212517 - DNA, 419 bp, Cannabis indica
tttgtcccttttttagtctaacttgcctctatttataattacatagtcaggcaattaattacagagttgactgtaatctttacaacaattataccccctaaaatcgtggggtttgattacatatcacgtaatagaaatgcggttaatatttgaatatcacacagttgtgattattttgcttttacttggtcaaggtaatcgtgtattaaacacgttttaaatcatgacgctctgggatatctcgataggaactcagtgtcgatgaccttgatagcgagctggagtttttcccctatctttccaagtttgataatatacgcctcgttgcttcttcacttgaagatataacacttcattttgacaatcgcagttcttaatctcaaagagtacttcaaaagttaacatcatttgaatgtcag

SEQ ID NO: 212518 - DNA, 1046 bp, Cannabis indica
aaaaaagttagtagtaagattgcaattttaatgtatatatttatgtatatataaaggaccaaaattataaacttttgcacaaagcccccgaaatactttgaccggtccacattgtccatatattgtagcaatattcttaatgtttcttctgttattatatattctattgatttttattttattttcattttaattctaaaactattacaatcatagactaacatattagataattatatatattttaagaaaaaatatacactatagtacacttataaaaataattatttttgacaaaagaaaataaattgtaaaaaaagaaaaatatttatcatcatttattcacacattactacaaaatttagtttggtgtcagttctaatatcggttaatattaaaatcgaacgctaaaaaattaatctaaattattaagtgtcaattttatagttgacaccaaagagtactcaatgatgtcagttagtagatcgagactaaaaaaaactaaaactaaaggtaaaataatatttaaaaaaataacataaacataaacaacctttttggtcttgtttttaaaccaacacttaagaggttaaaaaaatactttaagtgtcggttctaaggtgaaaaacttctttaaaataataaatatatccaattttttttttttaaaataaatagataaataacaattggggtataaaaaaaatatgacagagccctaaaaaaaattaaaaaactctaactccatctctttctctctctaacctgacctctctctctttctctgttgcttcggtgcagtgctggagggaacctgcgctagccattaacgggtaggcgaggaaccagcaatccaccccaagccctaaaagttaaaaccccaatcctctctttcatccctcttcttctctctcctaatagcgcacacaaactagaagctacccattgttggcgttgatggtccatggtgggcctcaaattttagttcctatcgccccttagtttttcttctagctcgtctctctcctcacagcttcctctctcgc

SEQ ID NO: 212519 - DNA, 659 bp, Cannabis indica
atcaaatttcaaaaaataatgatttataaaataaaaatttttttacaagaaaataaagataaaacttcaagcctaaattagactatattctaatcagaatttggacaaagtcaaaatatagaagttttagatatctttttcatctttccaacgcattcataatcaactcatttggagtttgtatgtaaaagttatacatattttactgagagatgttgaagcaggaaatcgaattccgtggtcacgaccaaaaatgttgtggttgcgaccaaaagtgggcagaatggtttttttttttcacttttctacagtggtcgcaactagactatctatggtcacgaccacggctccgtacgggacatggacaacttcatcttttctcaattttggctaaaactttattttaatgaaagggggtcacaaattttagtggagatagacagaatggaactctagaaacacaagaagaagactcttggagcgagcgtgggcgattcgtgacaatcctccatctaatttctttctcttctcttaatttcttatgtttttatttgtgtttagtttaattatggatttaattatgagctaaactccttatttagggatttgatggatattgactgagattatttcatagagtaatgctatttgattgttct

SEQ ID NO: 212520 - DNA, 931 bp, Cannabis indica
tgaagcaaaccctaaaaaagtctaggctttgatagacatgccatcaccaacaaagtctaaggaagtacaagccctaacaggaaggatggctggacctgatagattcatttcgaagtcaactgataagtgtttgccattcttcaatgtatagcgaggcaacaagaaatttaagtggacagaagagtgtgaggaggcctttcaagaatattaaaaggcaattggcgatacctccagttttggcgaaaccaataactggagaaatgttacttctctatctagctatctcagaagacgcgattagtgtggctatagtacgagaagagggaaagcaccaacaacctgtttactatgtcagtaaaaggttactggggcaaagacgaggtaccctcgtcttgaaaaacttcctttatgccttatccacgcctctcgcaagttacggccttacttctaggcagacccaataaaagtgttaattgatcaacccctgagacaagttttatcaaaaccagaaggttctagaagattgataaaatggtcaattgaacaagggcagtttgacataacttatcaacctcaaacatccatcaagggccaagctttggcagacttcttaatagaaggataactctagaagaaaatctgcctgttcaccgagacacgaactcttggaagttatacgtggatgatgcatccaacgagtagggttcgggtgtagaggtaatattaatttcaccagaaggctttaagttcattatacttttagatttgaattcaacgcgtcagacaacgatgttgagtatgaagccttgatcgctggcttgaggatagctgaggtgttgaaggtcaagaatctcatatgtcatagtgactcaaaactaattataaatcaggtactcgaggaataccatgctaagggcctgaaaatggctaa

SEQ ID NO: 212521 - DNA, 413 bp, Cannabis indica
caaacggagcaacccaaatcacaactaaaatttacataacagccaacatagaaactaccagatcaaccactagagcaatatttaaaatgtaaatttgaaaaaaaaattaaaaaatggtatatgaaataattttcctataatatatatatacaaaaattgtaaaaaattgaggtgttcttgcgaagaggaaaaaaggggtatcgaagcctagttcgaagggcaaccctgtgctgcgagagaatcctgaactcccgtcaatccaggaagatgatgatgcggctacaccagaggtgttcttggatccctgtgaagctcttgaaccagaatggaaggaggtggcatcgatccctgcgaaacagaccccatctgcgatgagttgggcggacgaggctgaagctcatgatttccaggag

SEQ ID NO: 212522 - DNA, 960 bp, Cannabis indica
aacagagacaaaacccacaaggaagaaggtaagttccaaagattttgtttagtagtagttgaagatgataagtggggtacctggatttaatgcagtattgcatttagtgctctcacatggtgcttttttgaagccagtgaagcattaatggcttagacttttgctcttcagaagagaagataggaagagagagacagagagagagagagaggagtctacttgaatactcttcagtctttgagcaaaagaaaaaatctagagagaactcaattaagatgtcaaacaagaaaatgatattataactatttgttttggttacaaaaaacaaaaagaaagaaaatagaaaaagataactttctttcttagtggctagttgaagcatgaatgactgtcttactgttctttttcatttgttgttgttgtttctttttttttttttttagtttgtagaataatgatcataataggataagttcacaatgtctttctctaaacaatagtatcaaaacaaatacaaaatgtgctggctaccacagtagcatgtgtgggaaatatacaattgggcaaagagatcatgaatatggagacaataatactactgacactgtctatacttctgtttcttgggatagagagaagaagagaggtcatggatccgtttccaatggttttcatagttggtgtattcaatacaaatacaatatacattataacatgtcagttgtttggtatttttaaatgagaaaatgctaacctttcaaaatgtaatataaccattagtataattaagaattaaatttcatataattttaaaaaaaaaatactaaaatatattattggtgtttaatatttttttgatgtcatattattattagtataattaaatattaagtatcgtataacttagaaaaaataactttttcatcactagtgcctaataatttttataagagaaatgtt

SEQ ID NO: 212523 - DNA, 811 bp, Cannabis indica
ataaaaattacaatcacaggaaaaaaaaaaaatgaaaaataacatcccaaaaaatagaatatcattaccttaattttccaaaaatcccatgttctttctagtgatatccatctcttcaaatactgtagaatcctaattttacacctttttctaatttgaactgctaaaaaacgattggaattattttaataaaattatttttattaaattttttaaaaggttatgaaatcattttttaatcatctttcattgtcagttattatgccacctcatagtcaattttccctctaaaaagagatgaaattactactctatcctttgttataataccacatcatcaatacaaacggtatttttaaacaaaataaacagaaggactaaatgtatgcatataaaattatacaaggactatttgtaacaagctgaatagattaaggggcataatagtatagtgtcataagtacagggggtaaaaaagataattattctaaagtttattataattttttttagaacttgtggttgaatatatacttatattaaatttttaagtgttttattaacagtttatttgatttcttaataatatttgatttaacatttatttgtttaaatgtaatcttgaaactaaaattataaaagttaaattcatatgtatcataactacatttcttacattgattatgtgaaaagataacctaatttccatattatggtcattctattctgttttattaaaataaatctgataccatcaaaatttaaattttgctataaaattatctttttaaatttatgtatttaatttctt

SEQ ID NO: 212524 - DNA, 679 bp, Cannabis indica
agtatttttaaattttattcaagggggattttagaaaataatcattgttaaatgaaaagaagttgactggctaagcaatatgataattttataatgaaatgcatgtgattgatttgattatgtacaaccaatggtaatgagcctatattttcctttctaaatggggacaaagtgccataagcttataatcatagaaagcattgcacttgttgctaacattaatgcattgaatcacttgattataataattgatttttattaaaatatgtccaaataaatataataacatttgttaatcttttaatttgttgtcaacatacacaagctatatacattattttaatatagagtcatcaaatattgaataccaatttgagctcttccttttggaaaccacttataaggtaatttacaagctaaaattaaaggaggggactctctaaaaaaaataaataaaaatagaagagatgataaaaccagaaaaaactacagtatatatctatctaggcacttaacaaaaaaaccttaataagctacgaatattcaaatattctttccctaggctataaacttctagataaaaataatttctcgaatatataatctctatatttgttgtatatgatagttatatgatacccataaacaatatatcctttagaatgaggcaaaattataa

SEQ ID NO: 212525 - DNA, 720 bp, Cannabis indica
atatatatatttatacagcctgcagcaagccaattacgaccatatgccattgttattataatccagattagaggcgtgtattaaaatgatttatatatgtaaataaaactaacatattagttgcacctaaaacaaaatgattattaaaacaaagtagtactaatcatcgactatgaatatttttaattaatatatatcgatggaaacaatgagctttaacaattgtaacaagtatatattccattatctaaactatactacatatatatcaactataaatacaccacaacacatataaagttcaagacaaggcagtgaagtactgaagaagaatatatggcatcaaaatcaactgaaggtacacacatattataatatatactagtggaataaggcacatacaaggcatgtgctgcatcttttattaatactttcttaattattgagaaaaaatacatataccattttctttaaaagttctttaggaaaaagaatttgaattaccttaaatcgcaataaaagagcagaagttaattttctgaaaaaggagaacgtcgtttatagtataagcgcgagaatactttagatagcaaaaatttgaattccatatccaatacaactcaacaattaaatttagaattttatattactatcttctcttatatttcatatttatataaatatatatggatgactgcagttatatttttattgtaacta

SEQ ID NO: 212526 - DNA, 616 bp, Cannabis indica
atgagtaatttgaaacgatttatttatctgaactgtccatacatgtattggacagatggccagatatcatttgtggcatatgatttccatttctatatggaaaatagccataggcactaggcagcttcttctgtcttcttatatatttttatttttgcatgaaaagggaaaaaaattcacagttaaacagataaaaaagtctaactgtccaacaggttatgcacaactcagagagctgcacaaacacaaaaatatcagaagagaaatgacccaaataaaaaccaaactaattacataatgaacctaaatgcatactgtacttaaaggaatggtcatacaaaaagagcaaaatgccaggctccacaataaacaggttgcaaaacaacattgttacaacatccaacaaaccaaacacatagtaaaatcagatttactttggtttttgatgttttttttgttttatttgtcatgaacttcctttccatcatttttcctatcaaacttactgtaaaattgtaatctttcacagagactagtaagatttaataattatattttgcaatgaagttgctttttgaattcttatacagttgtacatagtttggtagcatatata

SEQ ID NO: 212527 - DNA, 639 bp, Cannabis indica
gtttgttgagccaccaaccttggggtcagatcccatgtacgcctcatcgtatctgttgtaacagatagctgcggagtgaccatagcgcccacagacctggcaagtgggtttgggtccatttgaacgaccaccacgacctcttccactttgatttccaccaccacgagagtaatttcctcgaccgcctcctgcttggttctgattagagtgataatgatttggatgatagttgcctcgaccacaattaccagtgttggagcgattagctagatcatcattgggagtgactgaagagttagcagatttgttgttggtgttgaggctcaagttctgaagccgctccatcttgctgtcaaaggcgagtaagatcccctgtagttcttgccaagtagtggaggatcgagcttcaatctgcaagactataggtagatattcaatgtcaagaccagaagtcacattagatatgagttggttctttgggtaagggtcccctgccaaggcaagtgaatcagaccaggccttcttctgcttcaagtattcttccatggacatagagcctttgcgtgttgtctgaatgagagttcgagtatcatccattttgaacttcaagtgtgcaccgtacaagttctccaaagcttt

SEQ ID NO: 212528 - DNA, 586 bp, Cannabis indica
aattaattgagtctacaagataacattatctcaggtagtgtggggaccatgaggctatataatcaaactcctaataagtagttctaaaatttaccgagtaaattccctattttattaattcctcctgactctactataaattctgaattgtactcataattacatagggcactttattcactaagaataaatacgatataaattatctattgtttcaatctaaataatcattgaaaaaaaaaagttttaatgaaatttaatttaaaaatatcaataaaattagataattatttttttatacataaatcttaatttaaaattaaattagacattaagtcaattaattaattatattttataacaaatttattagttatataatttaaaatatctaaatttatttacttattttattatttaataaatttagctacatatattttcttatacataaacttaaaactagattaaatttcatatattttaaaaaaaatataattgaattgtattagatttaattttattattattattatttaaattaataatcaagtaataacaactaggagtgtttattggatcacat

SEQ ID NO: 212529 - DNA, 656 bp, Cannabis indica
tggcaattcctgattggtccacgccattaatttgttttgtaaaaaaataatttaaatataccaataagaaaatgacacgtggatagtaatttggcatttaactgacagatacttacggagtttcaaaaatataatttcggtattattaccgttaaaaattaaacttaaatatttgtttacaactaagaattaattaaacttaaatatttatatcacaaattaatttattagtaatttacactcctcttcttaaactttaattatgtaaacagttttatattataattatattatgatatgttccgagtaataatattttgagtattgtatttagacgggcttgaaatagagattcgagtgacgcatttttatcttggagatgacaagacaaatatagtctttttacatacttttaagaagtgtcaagaagaaaagcagtgattctttttagtggagaggcattttggaaagcagagaagcgatttttaaaggctctatttcagttgcagcttcaggttgttctattaatttctggcatcagccttggatcccttagctagattttaatgaatttgtggagctgatggaaagtatcagggtcgaggatatacaattcaaactctgagagatgtttcaattgataatgattggaatga

SEQ ID NO: 212530 - DNA, 557 bp, Cannabis indica
taatttaaaaactaaactttaagaaaggtttgatttgatctttctatatattaatttttttaaaaaagaaatatctttaatggtttttataaaatttaagaataaggttcgacatttactttttattcaaaaaagattcttcattgacttgacattatcatttttaatactaaatttattgattttaaaaacatattataaaataaagaaaaagttaaaaaaaataaaatcctaaattaaaaatcagtttttccattggtactctctttcttcttctttccttcctcttctcacaaagatgactggctacacatctcgaaggtacaggggcaacggaggcagaggacgacagatcaaaggaaaaagacaagatcgagatttatggaatttcgagaagtcggtggtactccgatcgtcttaacaaagaattgcgtgagagagaaattgtgtgagacgtgttctcagccattcatgtcctctgtttcgttgccgatatcaatggagatttgtgataaatttcgtcgtacatgttgttggaagcgagagagaggagagca

SEQ ID NO: 212531 - DNA, 631 bp, Cannabis indica
aaagttttcaggtttatcaaaaaataattaaaatcctaaaattattttttttaaaagcaactctaaaatcatttaatagagtaaaatttttaaattttatcaatggagatcacttaataacaacagtaaatttattatatatgtatttaatatttatcgttgtttttattatatattgtgttatcttaatctttacattattttttttttttgaatgaaagtttgatctttattaaataacgactttcgctaccaaactaggtagcaaaacagctggaacagactccaatctgaagctacaattaggatacaatgtagtcgccctagcaaaggaatgatccactacattagttgatcgcttaacaaaagaaacaaaaatattatttaaattagcaagcaaattcttacaatcttgagtaaccagtccaaagaacaaaattattctgtcgagcaatgaatagcttggaccaaattaaggcagtctttttccacatacacttccctccaaccgctgtctttgatccagcttaaggcctctcggacacctatggcctcagcaagcacgggttcaacttaaccaaagaacagtttaatgtgtctttcaatgagtagttccgacccattacgaaca

SEQ ID NO: 212532 - DNA, 770 bp, Cannabis indica
taggggatcctcaatcgtaaaaaaggactatgccatgattttttaatttaaattagttggtaaagtttttattaatgtttatctaaactagtagcttattattataaactagtttataaacgcacacacgtgacgtccctaagaattagtgcattacaatcatcgttacagatttttaaaaaacattcaagagacaacggtaataatatactaatctctctactcattctctcccttcatttctcttctcattttttttttcctaataatcgtttctcttcattaggctttcatgtcattacatccagaaacaactttgtacatcgaattccctctcagtcgtccttgtcgtcgaagattttcataaaacaatcgagtcacaactagtaataatatactcattctctccctctttttcttcttctatttttttctgaataattaatcgtttctatgatcaatttcctgctacaaagaaagaacaattaataacttattttatttttaggcacattcattcattcttcgacccattttttttaattaaataaaattaattttaataataatagaaaaacattttcctcaagaaaaagaaaagaaaaacatttagttgaatttttttaataattttttaatggctatctaatcttaaaaaaaaataaaaataaagaatattagttgatattttatattattaaataaatactcattattagttgttacttttatatttttgaataaagggtgtaattaaatttaaataatag

SEQ ID NO: 212533 - DNA, 668 bp, Cannabis indica
gaaattcatgaaagacattccgttaaagaaaagaaagatgggaaactttgacaccatgggattgaccgaggagtgcagtgcaattttacaaaagaagctctctcctaaattgaaagatcctgagagttttaccataccatgcactattagaagaatagagggtatcaatgcgttgtctgatttgagggctagtatcaacttgatgcctttttaagtatttaagagattgtaacttagagaagccaagccaacaactctgacattgcaactagctgaccattctttggctcatcctagaggggtaaatgaagatgtccttgttaaggtggacaagtttatttttctagctaactttatagtccttgagatggaggaggatataaaagttcccattattcttgggagacccttcttggaaataggcaaagctctaattgatgtgaaaaggatgagttaaaggtgaaagtccaaggagatgaagttctgttcaatgtactcaaggctatgacttatcctgaagctagtgacaactactttttggttgaggtggtggaaaagttggtggcaactaggaagcctattgaagaccctcttaatttgactttggtacgagaggatgttgttaatcaagatagaaaagaggcgatggaatatgctttgtagcttga

SEQ ID NO: 212534 - DNA, 627 bp, Cannabis indica
ggatgttacgcttgaaattgctagaccgagtaccttatcttggggtacgtcgattttgttatgtgaagaagaaggacgaaaccttatgagtgcgtattgaccactgggagttaaatgaattaacggtaaggaataagtatcctttgctaaggatagatgatacgttgatcaattataaggaaagaccgtcttctctaagatcaatcttcgatctggttattaccagttggagattcgagaggaagatattcccaaaatagcttttcgtatctgatgacttcataattatcatcattaatagaattctaatttcttctgacacaaaggaagcatatgagggatatttttggatggtgttgcaacgtctctaggaacataagcttttgctaaatacaagaaacgcgagttttaccggccccaagtaagtttcttagtacatgagatgaacatagatagtatcttgatagacccggtgatgattgaagcaattcagaattggctttggccaggtctgcaaatgaggttaaaaattcctggggtcggtaggatgctaaaatttctacacccttagcggaagttaaatcaaaagaattgaaagtttgtatggattaacaagtgtgaaggtag

SEQ ID NO: 212535 - DNA, 699 bp, Cannabis indica
ctatttggttaaataaaaattaataaagaatttttaaaataagaaaactagtaagaagcaaataattaagaaaattgaccgttaataaaacctagggttttgatttcaattgttctattgattatggcctaatatgattatctccttattattaatttctatgcaatagcaagtttactaaggtaatttctagtcttctcagatatataagtttcaattacatgcaaactttctactctcgttataaatttcacatgcaacaagcatactacaatttggtattttagtgacactatttagtgacacacatttttgtgcatgtcactaaagagtaaggagtgatttttagtgacacacaattagactctaaatttttggtgttagcctcccataatgtgagttactaaaaatatgaagagccactaaaaaataatacccatactttttttattttttttctaattaaaaatgttgatatatagagtcacgccgtgagagactggaaaagcgtgtcccgacatgcatggcgcgtcactatatcataactctaaatttatttaaaataattaaaattaaaattcagatatagtgacacacaaaatatgttggtatatatttacccaatcgctattcgcgcgtcactgtaagttaattaatgaaatggtttggttatctcaaaaaatgctaagttcaataaaa

SEQ ID NO: 212536 - DNA, 585 bp, Cannabis indica
catgcctttgctggtaaccctctgagatccaagaccccaaaaattggggaccctctttccccgacccaagctctcgaaactctcaaaatttggattttggaggccacacatttcccttcgtcgccaaattttaaggtcttgccctttagaaagggtaggcctttagcctcttctctcgatgggaccggtgattcttcctctccaaattggcatctaggttggcttgctttggctgatttcaaggacttgttggccaagttgggcactgagattaacggcaactcgttggtttatctgggctcgcaagcggaggacgacatcgtttactgggcaattgatgtttttgaagagactaagttggttcctaaattgggtagtctgaggttctattttgttgagcttagaacgctcattactaattaaattgtctgtattatatataaaggtgaataatgagaaaaagatgaaaatgaaattctttattaaaaagatgaggtttgggggactcaggagagagagaaagaaaaggctgtagaaaaacgaagaagaagaaaaaaaagaaaaaaaaaaagaaaagaaaagaag

SEQ ID NO: 212537 - DNA, 755 bp, Cannabis indica
atatatatattatatatatagatgtgataatatataaatgtagtttttatttttaaatataaataataacattaatttttttatataaaatatctatataatttttattttaaaatatatataataatattataaaattaataaataatattttgttaagtaatttagatattttattaaaattaacgtataaaattaaaaaatctcattaaattaaaaatttcgttatatagttacattttatatagattagatatgtatatatataattagttagtatagaatagaggtggtgggattattaaggaaatactaatagtatgttgaattctcatgaagtaaaatcaaagtcattttctaagattttccaccaagtgttgaattcaccactctatgctctaagctttaaggctcaaattatttataatttaacacattcaataattctttgttgtcccttttttgtagttttatatgctcaaaggtcaacccacattaattttgtaagatttgtttattttatttttccccaaatccacttaaacttgagagttgagaagaagttggcaaggtaattatatataaaataaataaatatattttattagggtgtatttactaagtggttagaattacactatattttaaaatataatatgtggttagatataaaataataattacaaataaattctttggtaaaataattaataaattacgcaagaatattattcaataagtacaatatatatata

SEQ ID NO: 212538 - DNA, 713 bp, Cannabis indica
tatggaaagtatgttgattctgtttgagttgtcactactgagtacaattttttcgatgcaaagcagggtttattttaagaaaattttgtatagctataaaatcgtgtttgtggcagtctctagagtttttatgtattataaataggacctagagaatagccaaatgaattcatctctccaagtcttttttatttcatattttcatatttgtgtgaagagtgttccttgtgagattgttctttcactattattcgaataggataaagagctccattgaacaagagaagaagtcttcaggagaaaacttgtacaagacttactttgggagaaagtaaacacgcactcatcaaaagttgaagggagtttgttgttggtggtgttcgaaaattagattggaaaagtacattacaaaagattgcgacaaatcattagagagagtctaaatttgcccaagtcaattatataccattattgttgcttcctcttcctctattgctattgtttcttggactatagttaccaccaccaaatccatctttgttacaagataagcagtgggtgaagagttattaaaggactcattgttaccaaaaagtgagctcaatctatctagcttattgtcaaagctcataagaatgtcatgtattatctgccaagttattttctctcttgcttcaatctgcagcactataggcaaatattccacaccgaaa

SEQ ID NO: 212539 - DNA, 816 bp, Cannabis indica
ctctcttaatttcaaaaattataatgtcaaagaagtgttttgaattctcaaatcaggtttttatttatagtagttaaaaatcctttaattaaatcatatttaattatttaaataaataaatatctataaccaaattttgttagtgatatttatgagagaatttctcaactacttgagagagaatatcttaacaactttttaaattcaaatatatacctaattgaattaattaactcaaaaagacaaactccatagggacaggctttatgctaggcatctaccttgtcttgtttaggacaaagatgttgtcttttgtcatcacaatttttgtcttaacaaatcttatcttgacaaattttgtactaatttttttttgtctttttcctatttaattaatttgaaaaattatttatttattacaaaaataaataattactatttaactaattcaaaatagattttttcgaacgatattatactactctttatcccttgatagtgttttaaggtggtaatttggggatcatggactaataattctaagctccaataaactaaattatttattgagtctcatcaaccaaataatcattgtttattaattccattattactccactaataatatagaattgaactcttaacaattatagaattaaatttactgagttttactgcagtgtctattgatataatcgattccagtgattagccctccatgggattaattattggcattatatttatgtgtggataatctgaaagttatttgagtatgtgttatgtgtgaaatagtttaaatgcccttgtatgtgt

SEQ ID NO: 212540 - DNA, 738 bp, Cannabis indica
aaaaaattaataaaaaaaaagttcttaatttttgtttctcattttttattaaaaaatttaataaaaatttattcaactctatttcatcacccattacgaaacacaaccatagagcgttatatttcattataaactgtcacttaatttggaaaattgtacggtaagggtaattttagggtgtataaataattataaaagaatatgagtgaaatgaataaatataatgaatctaaaagtacaaatgcaaaattatgttattaatagcaagaatagccacagtgaccctaattaagacgataaagaaattattaagcaaagaattacaaaagtaagtataattttaagagcacacaccaattatcttgattttttttttaaatgccttaaaaatttcaagccaaacatattgcatgttgtagaagagggtaggacatgtaatgatacaagtggatgaaaataataaaaaacgatttcatccaaacaaaagaaaataataaaaaacaaaattttccaagaccaaaccagagattttgtcttctcttcttattatttaataatttaacaggcgtaaagaaaattaaaataaaattaactaaaacccaaaaaacagaacctttttcagattaatgagttgcatgactagtcaatttatcaccaccaaaaaaaaaaaataaaatgcagtgcaagtaaaattcaatgagctataatgtatatacacacaattatcaacatatataa

SEQ ID NO: 212541 - DNA, 504 bp, Cannabis indica
ttcaaagttaatcaaaacagatgtatgtactgtttataatttcaacccttttatagcaaccaaccccacataacaaagacattattaggctaagaagaatatttagcattagataaaagagagttggaacaaagacatcatattaggcaagttagaaattaacataatttgggtaattcaaacaaatatatgtacacgtattattaatgattaatgtatggttttgtcttgttcattttatggatgaaatttgcaataataacattgaacaagaaacactcacaaataaatataagtatgagtaatttgcagcgaaaatatttaagtttaattcccggttacagtacttctgtcacacttctggaatttccgtagatacctccattatgtgttagattcttgggtaatagtgtgagagttgaaacactttgagagaactcatcagagaatcgattttgactgtattgtacatgttcttaatcaataaaaaaggtagtggtagtg

SEQ ID NO: 212542 - DNA, 529 bp, Cannabis indica
acggggatagggttatgggttggtgtatgggtggctgattataattcgggttatagagcaactgtgagagcgagcagatggagattgtacatgtcggggcggttaggcctagagcgtacagtctttgggacatcaaggcttatttgtatagtcattgggcgacaaacttttgtatacacaataaaacttttgtaaacgggatcccggtttaatataagtatattattttagtgttcataattaattaagtaaaaatttaattaatcacgattttcaataaactcgttgattagcaacgagttgcacagttagttaaaaatcacgttaacatgcctaaactagtaaggtgttacacatatggttcatgatttctacagccgtgagagtattggcaaaccctgtcttcaaggtgtcgaccatgctatagagcataaagtgttgagctttgttgttagcattctgccaatgctcgaacttttccttaactgccttggtcgcatcacctgggtgctcaggagcttcttcagtt

SEQ ID NO: 212543 - DNA, 604 bp, Cannabis indica
aaaactcatttaataagaaattagtgtaaatttgttttatattcatgttgctctaagttatgaatttgtatgtgatatggtatatcatgaaggaaataaagaaaaaataactaaaaatagaatattattttaaatttgtgtatatttattttgcactaaggtttatttttttatgcgctatgtaatatctttagagcacactataagattctcaataattatgttgattaggtgccctttgttaggttttgtgttggttaattcccctgttttctttgtaactgctattttggtttctaacttttttttctttcattcttttcttcattttcttttaaatttcactccaactgttcccgcccatgctcctgctatcgccaattgccttctgcttctacttttctagccgatttttcgatggatctactcgccaactcaataaattccacgctctactatctccttacctgatgtcactaataatccacccttttatcgatccaatcatgtgcttttgttccatgttctcaccacaaggattgtctacaaacctggttttgtggactaaatgtctggacattggaaatgatgctttgttgggttt

SEQ ID NO: 212544 - DNA, 902 bp, Cannabis indica
ctacaaagaagaagaacaacagtagtgctaacttcgagagaaggtgttacaaagctttcgggagattgcttttcaagtcttacatcgggaggaagtaagcactcttcaaggagatcaaagggagttcgagcacttgaagtttcagcaagattcgattagaagttagaatacatcaagcttgcagcatgtaataagatggagtctatttatgcataagtcaactactttgtatttttgggatctatcttatgaatcttatctctgggcatggtctcatggactagtaacaatctgaaaaagattgttgaaaccacgtacaaaaactttgtgtgtgtttacttttctgcactgtttatttttctggtttcttctggaggtacagagttattttctatagttacagtcagagttgttttctgtagatacaaaaaaaattgttttagtaccagtttttttattccgcatttaattaaataataaagctgagaattttaaaatacagaattacactatataactatatatgataactaatggtccacttaattaatttataacataataattaacttatttataaaagtaagtatatatcgatcattgtttgatttgttttggttgatttatattatgtacagagcaaacacttactagaatgatattagtgatgactacaagtgatatatggtaatggttcacttaattaatttataataaaatgattcacttatgtataaatgtgagtactattgtttgatttattttatatacagagcaaatctactaagaatgatattaataataactacaagtgagatacttggatgacatcaactttaaatgtaatagtgaccaagtgagttacagtgatgacaattctttttttttttagagttttttta

SEQ ID NO: 212545 - DNA, 1138 bp, Cannabis indica
gttgtatgagattgagttgttatgaaagttgataacatgattgttataactgttgctaacttggttgtggtataagattgatttgctaatatggttgtgatatgagattagcttactaatataattgttgtaagggttgttaaactaaatcggttgttttatgcgattgaattgttgtaatggttgttgcatgagattaaattgttataagagttataagagttgctaacatgtttgtcgtgtgagcttgagtaactaacatgattgttgtaagaattgctaatatcaactaatgatctttagaggaatatacaatattttatacatgtttccacattaaatagtgtaatgattatgaacagatacaaccttacttatcaaatacttacattaatataatcaaccttaatagttattagagctaaagtatgtgattatatatgataaataaagtcatattggtttctaaaaatatcatcactaaaaatcaaactatgggaccaaccaaaaaagtcacaaattaaaacataactcaaaatatttatcagtaaattgtagtataatcaattagtataataaatagtaagggattttcctttgtaagagcatctccaatagtagcaattttttaaaggtgctaaatatttctagtagatgatataatattttattttatcttctttcaaattattttggcactcttacttctaaaaaatattctaatgatataacacctttcaagaatattatatttatgatctcacacattattgtattataaatctttttttttattaaattattatatatatattgcatctttaatttttatttaaaaaatatagcatcaatatcattgtgtggcatcaatataaatttcaagaataacattcttttatcttcaatagtatagcatccctatattttgtcacctaaattttctacctcatcaagcattctccaaaatgctattattagagatgctttaagaatcctcaaagcacattaactgattacatttaataaaatgaaatttttacatgaaaaatccattttacacaatttattacaaaattactcacacacgcctatgactacatttttacttacaaagttgcttttattacacaaataccac

SEQ ID NO: 212546 - DNA, 738 bp, Cannabis indica
ttccatcatattttgtcatagtgggcatcttgaacccttgggggtatggcaatgccgagatgtgaggagcaaaaggctcaggttcctcatcagaatcgtatcccccgacacttccttgggcattcattaactgctgaatttgttgttctaatgctgttatccgtgggtcatttaccacaggagcaggagcattgagaccggccggtggaggagcgttcacattaagctggggtgcatattctccttgttgtggaggaatgtcatactgtgcccgataaggagcctccctctgtgcgtgccccctgttcaagtggtctctcaagtcaggttgtcgcctttggttcagatggtcccgaaggtcagagctccttgcatcacgtggggggtatcgagggtgctcctcataatatggaggaggtgcattgtcttgaacgctcacagatcggctccttgagtcggaacggtaactctcccccatgaagctcaccgtcctctgttgttgcggcccccgaggtgcaggccgttgttgggcatatgattgtgttgcggcaatccgagatcttgataaataactatcgtctcggggtgagtggggtcgcgcacgctgtggtctagtctccctgggtgctggtctcggacggacatagttatcacgagagatggtgcgttgtctttcccgtccatgtcccctaggttgaggtacctgtcgagcatggttgtctcggtagtcttcttgcc

SEQ ID NO: 212547 - DNA, 714 bp, Cannabis indica
tatatatatatatttaaaggaaaacaaagtcctacaaatcaggcaactagtggagaataaaatattcattagcatttatctatttaacatgagtaatattgctcttaagtatataatggtattttactagtgattaataattaataaaaattattaaattacacaagcaataacaataagagatttttacacaaaagacttaaaaccacactttcttttatattttgatttttttttttatagatttcctaaattgtattttttttttctttagaaacaattttgttttaatgttgctttcatatcagcaatgtaaaaataataagaaaacaattgtttgtaattttataaaataaaaaattaaaatcggtgaaaatattacaaaaaacttgtatatttatatttttgtaatttttttttatcatttttaagtatttttaaaaataaggggatgactataaaaatatctctaacaaattaattcaacaataataatttttttttaagaataataataatattgagtgcttttaatataataattaatactattttagagtctacattttacaaaaattatcgattagatcatgtattttataaaataacaatttagtcaatgtattttccaaatagtacttgagctcaattttctataattttttcaatacaaccaacttaaagatatattttctagcatacaaatatattcac

SEQ ID NO: 212548 - DNA, 522 bp, Cannabis indica
tatatattttttaaaataaaatttgttttagccctagtgtattagagtacaattataaatttagcccaaatataatattaatgtaatttttttgactaaaatttaacacaaaatttacatcattttattaaagatagtataaataaactaaaatattttcataaccctccataaaaaatgctctaagaggaagctaattaagtttacaatattatgttttggacctcaattcttaatggatgtgtctatatagatacaaaaaacttcttcggataatatcctaaagtaatattgtaattgcaatcaatcattcacatgattcaaatactttaaataaactcaataatatcaaaattaaggcaatgtatgaaatttggatgtaaatggaatataaacaaaactttaaggaattttactttttttgggattgaagtgattaaagaaaacaaggaattgaaatgatcttctaatagttaaaaaaaaaagggggaaagagatgtttttttctaaaaaaaaaaaaaa

SEQ ID NO: 212549 - DNA, 810 bp, Cannabis indica
tcgcaattccagcactcaatggttttgagctctggtaattatttggattcctatatttggacctcctatctttagatttacttcgataattcgatcttccatggccaggccctctagttgaatttcttcctcttgactctgtatgtaatgctgaagaggttgatgattcacccaactccctgcgtccaatctcttcactgagaactagatcacgaacatcgtcaaattttaacttattgcttcccgattagctactcacaactgtgactgtagcattccagttctctggtagacaagacaaaagtattaatgcttgtacttctttgtcgaactcaattccaactgaactcaactaggttgtgacagtattgagttcatttagatgttgagctaccaatgcacctcccgtcatccccaaattgaataatcacctcatcaaaagaactttgtttgaggctgatggcttctcatacatattagagagtgctgacataagatcagccgtgttcttttcttttgcgatattgaaagcaacattacgagacaacgtcaatcgaataactctgagggcttgtctatcgagaagattccattcttcatctttcataccctctggcttcttttgtgagagaggttgatagagctttttctggtatagatagtcttcgatctgcatcttacaaaatccaaaatctgcgaaatcaaatatctcaagtttcaccgttcctacgcctgcggccattgctacaactcaaatctaacttctggatagaatttataaccacaactctgatacaagttgttaagaaa

SEQ ID NO: 212550 - DNA, 523 bp, Cannabis indica
tcatgggctcaggtttactaaatccaaccttgttctcatgcgcgagatatatattttcccaagtttgactaagctcgatataaatggtgtaaactggcacgtacttgtcgtgcttcttttatttcttcttatcttaaatgaacccttagagtcgtcctttctctttgagctagaggcccctgggttatcagctttagtcaagatagtacttgttaaaatagtgctgggtttgcttcccgagccagtttttaacaagttcatctcttttcgagcttcttcctttcgaacaaacacctgagccctctcgttgaactcaatgatgtttttcactggacgaccctacaagttgtcccacagttcgcctccagcagtgaagaacctccgattatattttcggaggaagatgaaaaagacgtgaggtaccctcacgtcggcccattggtaatcaccatctagctcgctaataagaggataaaaagggtgttggtggacaatgaaaatttagtgaacatcctttacaggg

SEQ ID NO: 212551 - DNA, 637 bp, Cannabis indica
accatcttttcgacctttcttcgcactatcattgctatactccacatccatttttcttttactaccacccccaccccgcgggctcaatttattcataacattagccacaataacatgagaaagttttgggctcaaaggaaaagaattagacttaggcatacctttagaaccacgaacctttgacgaattaacacgcttccaagtcttagctttttgtgctttgataaggggttcaaaagtttgttgaaaagcatgactaaaagataaatgttcatttaaaggatcatgcaaaatttcttttccgttatcaattggttgaagtggcaccttactgggaccccctgtttgactcaaaacattacattgcacatgcactcaacccgaggaagctaccacatcatgtgacccaccattaatcacctccttacctttcaacaactcagctacactatgtgacgccacaccatcccccatcttagccgactcacactctctcaccacattattatctttattaacttcacccataacacattgaacaccaccacccacaatatcatctttattaacttcacccatataatccatatcaccactaattccaggatcaacaccagcactcttctcctcctcttca

SEQ ID NO: 212552 - DNA, 769 bp, Cannabis indica
gctcctaagttgtctaattcgaacttgacagagaacagtgctcaccgctctccgaatgaatcaaagctcttcctttccctccaaagtttaagaacccttcctagcatcaataccccaagaaggaagatccattatcaaacatccactacttcaaagtgcagaccgatttgcaaggtgtgagagatgatgtcaggtgcaaaatctcccttgctacactgacaagcctagcttagttgtggtaccttaagctcttcccttaatcaattaactcatggaaagatctagtggatgcttttgaaaaaaaatttgctcctccccaaaaattccaaatcaaacccaatgatttggtggatgtcaagcaatagggaggcgaatctctcaaggactacatccaacgattctgctaagaccaaaagtcttaatgaggacgcaagggtaatggcactcgcaactgggctcaaggagatgagtcctatgtggtctgaccttcatctcaaggcagaaaacaccatgaatggcttcttagatagagcatatggctttatcaaactagaagaagtcatcacccgagccaagggctcgaagggtggcaagaagaaatcactatattctgaagcccctgttattaaggcacacagaaatgggaagaaaggaggataaaacagagggaaaagagaaaacaacaatggtaagacaggcaactcccccacgtggaaagaatcctaagactagaggcaagcccttaagagagtatgagcctcgcttcacc

SEQ ID NO: 212553 - DNA, 839 bp, Cannabis indica
agaatgaaatttggttttagtaaaaagaagttgaaaacaaaattaagtgtttgtaaaagaatgaggtagttacactataattacaagtactaagttgatgctacaaaagtataataataataataataataataataataaaaagtattaagatatcaactaaattcaaaagtactttcactaagtatgttaactaaattattgttccaactttaaaattattctatatatgtgcaaaaaaaaaatttgattttgtagttagaaactgtaatgatcttaaagacaaagaaaaaattgcaatgataacattgccactcttcttatcctaaaagtatgttttatattaatttaagccacaaataattctcctaccatataacccaaagaaccaatcaaacaccactccactacacataaaacttttttctactacaatcaattataaactaaagtaactttgtcaatattttctttcataaaaaaaaaaagaaaagaaaagaaaagaattaggaccccactatgagtaataattgatatagtactagtactattactatttgtcattttctgattagtgtatgctaaataatttttaaattgaaaaatataaatttgaatgacttagactaactaaggattatcgcgtgattaatttgacacttgacgatcacgtacttacggaaatttcggaaatatatcttatatattattactgtaaaaattaaatttaaatatttatttacatctagtgattaaacttaaatatttataccgcaaattactcaattttctttctttttacaaaaaattagaccccatatataaagtaataattgata

SEQ ID NO: 212554 - DNA, 1116 bp, Cannabis indica
gattaacaattaaaacattctttttgattttcggaagagacgttttagcacaacctgaactgaacttagagaaacatcttaatttttaatttgagcacttgaaggctttttataaaagaatcctaataatgtttcggttgttgaacaaaattattatatattgttattaagagtaggataaatattattttagactctgtgttttgtaaaagttacagattggactatatgttttgttaaatgataaaatggatcctgtattttttaaaatggtaaaaataggaccttgagcttaatttttgataatttttttttaatataacatttgtcataacacatttagatcgaattattattaaattttattttgataaaaaatcagttcagagttctatttgtaccattttaagaaaatatagagttaatttttgtcatttaacaaaaataaaaagataaattttgcaaaatacagaatccacaataatatttaccctaaaaaataaaaaagaaccagcaacatttttttttttcagaaaaagaattagaaaattaataaccatacaattgtaaaataataataataaataaaaaaaaaaaacttaataaaccagtgatgttccatgctagggattgtttaaagaaaagacatgtcgttttcactttacaatttttattaagggtcaaaccccgattcgctctctaaaccctaaactagttctttctcactcgcttgaacaacctgctcggacgcccatacaaaagaaaaaaaaaaaaaaaaaccttcctttaactgagaacttacaatgaggccttcatggcgtctgttacttctccgatctcgcgttggcccggggtctcgtgtctccgtacaccgctcgtactctcaggtaccatcttttcccaaccacgagtcctttcgatctctcacttcactcattcacactggttcgctttccccttcaaaatccattttttgtcctaatttcgtcaatcacttaaaccctggaatctcttcgtttcggaatttctcgtccgaaccgaagcttgaatttaaggattcggatcacgcggttgtattagaaattttctccaaaccgatgagtttggaggagatta

SEQ ID NO: 212555 - DNA, 521 bp, Cannabis indica
ttaattcacgcccatgatcgtttgtttgccttctacgtaagtaacttcgtgttttttttactatcgaaaacaaaaaattaaaaaacaattcaatatttttttcgaacctaattacctatattatatcaattggctagtaagaatcatagatttcaattctacaattgagaccttgtgttttatacatatattaagaaaatattgatataacgtaaattattggtttttggtgatattgggtgaattttaattcaactaatatgatttttggtgctttttgggtgaattttcaaagatgggtatatgccattagtctgcctacgtctttttgatacgtgaatagttatagtcttaatttttcataatatgaaagtgtgtatattatagttattaatttaatatattataaaatatttgatcagaaatttaaaatgatttaagatatagaaagtatgttttaaagtatttatttaacacgaataaaaaaaaaaaaaaaaaatatgtgcaatatgccttttgaa

SEQ ID NO: 212556 - DNA, 573 bp, Cannabis indica
gaatacatacctaccgcttaacgattaagtacttacaaaaatttcagaattataactataaatattacgaaagcaatccttttaagtatttaagtgcaactacaagttaaactttagtatgcaaattactcatcataatattccaaaaaaaaatccatataaagccctatcgtcattacaatgacctcatcacctccacctagactgccacgttgtactaattaagaaacttcagtacttacttccacgaaagtgcatatgaaagagcatgtcataaccaaataactaataataaaataaaatcacaataagataataattttataatatgtatatatatatatatatttgatggaagtgactcttaagtctaagcacacaccactctttttcaaccatatatttttcttctctctctctttctctctctctccaatgaatttccaccaaaaccctaaccctaatatgactcataaccacgttttggggggaatatcgaccctctcatggactttgaactctctgatttcttagtctttgaggatggaggtgtagtacttgatcatcatcatc

SEQ ID NO: 212557 - DNA, 732 bp, Cannabis indica
ctgaaaaataagaaagcacttctttcaactttacctttgatggcaaatttgaaaataacccaaaattaggggtatttattaagtttgaagaatatacgtggaaaatgatgggaaacaaaaatttggaggaagtacttcgtctaatatttttatatttgttggagccacaaaattgaatttaaatttgaggatttaggaatacaacgttctcaatattttaaaatattattaaaattaatgaatgaatgtgactcattttatttttattttttggttagaagaatgaatatgacttgaaaatgtcggatagccattaaaaatttaaagtcaaaaggttgatgaacgtggccacttattaatggagggaacattttaaaccacataaccttgctaattgactaaaataaccccttcatactattgtagacttgtagtagtgactttataattagaagagcaaatactagtggtgcgtttgaaaaacaatgacaaaaaacaaaaggatataactaataattgagtaattttttttttcctttttttttttaaacatttgatggaatttttttttgaaacttgaatcttcgtttaaatataaataagtaaataattgtaaggaaggaggcaatcaagggaaaaagtagggaaaaagataatggataaagtcaataacaatttgcattaaaaatccaaatgtgtcccaacgacaccacctaatcctggtctgttagg

SEQ ID NO: 212558 - DNA, 602 bp, Cannabis indica
ttgatatttaattacattattaaatactagacaccattagtggcgcctttagtatttttcatatatatatatagaggtcaattctgaattttagtaggtcataaaaaaatatatttgaacctttatttaaaatgaaatatgatattttcaaaatcaataaaagaaatgtgtattgttgaaagggggattttttttttttttttggcttctaagtagagtgggccctaggcacaggcttagttgtctatgctcaaggtcgggcctatatatacatatcttttgaataagaaaaaacttcattaatttaaatcaaataacaagcatctttaatatcattgggaatgtcactcgtgttaaacacacaatcagatataaaataagacgcttttgctaaacaataagcgaccttatttgtagatcgtttgacaaaaaataaaaaaaaaccaaaagaaaagtcattaacagacttacaatcctcaactcgaaaataagaacaccagcagacaagctgtgacaaagagcttgaaccagcaacaaacagtctattttgagtaccatcttcttgtgtggttgctgtttaatccaactcaaggcctctttaa

SEQ ID NO: 212559 - DNA, 937 bp, Cannabis indica
ggttgcataaaagttatttcatcgttgaataaaatattatatatatcaatataattcagaaacatgtacaaaaaatataagcatgaaaataaaatacaataccatacaattcaaatccataatcaaggtgaactcttcaacactaaaataaacgcaacgaccagcaatgtttgctcaaaattcctttgaattggactgttacatctcttaagagaataccatgaacaactaaaatgaaataacataaataaaagtcacttattttcctgaccaagtagactagcaatctccactactcttagtggagctttaacatcagaatcaagatctggaacagtggtcctcttattccaaaaactaagaacaccaaagaaaatttgaagcaaaatagaataagcctttatggcattcttggctgccacattcatctttgcattcctcaattcattatagagaaagataagaccccattcacatccagacaaccaaaaactcagtgaataactttcccaaaattcctttggattgccttgttaaacctccctcaacaaaagaatgtgaacaacttggggatgaaattcatactcaaggaaatccaagaaataacctaattgagtatcacaaaatattttcatcacattccttgaattttttttcttgatgttcttaataacaccataagtacaataattgacacatttagacctgtaataatcagaaggatggaatttgtattcccaatcctgcatagatatatagaaacacgaaaatagaaaattaaattttataacatacaaaggttcaaaatcgtattaaaactataaataaacttaagaaaagaatggaacaactaaaaaatatcaagaaagtcagaatacatagtacattggaacaatctataaatatcatcacggatatcaaccaaaacaataatgaa

SEQ ID NO: 212560 - DNA, 732 bp, Cannabis indica
agttaaactaggaatataaaattgagattttaggttaggttaacctaataggtaataactaaagatataaaatagattcattagaggcaaaatagtatattaggaatttaataatccatgtgtatcattttaagtaaacatcttagtgaaaatgatcattttaggtaaatgtctctaattgagatttaaggtcatatccaatgagagatacaaatactaaagtctaaaaaggctatttataaagataaaaataaaggagactttataactaatagagttatctacaatgcatttcttagtttggagtgtattatccatgactctaaataatttttttaataagataaataaaatatcatatattatacattaattgtagtatttaaggatagagcattatataatgtaaaattaaatatgggtgttggagatgaagtaaacattttaaaaaataaataaaaaattcagacatctatcttggcaaaatttgaaaaatcaattaagataatgaatcaatgtcaagagaataaaaataaaataaataagtcatgtacttgtatgagagtattaataagttaatagacgtaatttagttaaccatattatgggctgtaaagttacaaaatttaaaaataaagaaaaaattacaactaaaaaataaactagctaaagagcatattacatatttgaatataataaacaatactctaattgaaactaatattaatcaat

SEQ ID NO: 212561 - DNA, 591 bp, Cannabis indica
ctatcacattatatctacactttgtattaaaaaaaacaaatgtctagcattactatatattcataataataaaaaaaaattgaactgacaatgtacatctaacaacacatcccatatgcaacccttactacactactaatattgacttattttttgtttatgtaatttcaaccttattatgctgcttttattttttatttatttttttttttgtagtcattatgctgcttttattttagttagttttgttgtgttatttgttttgtggttggtttccttttgtatttatttctcattaaagtagaacctaatgttgtgttgaagaggttcatagtaaaaggattcacataaaattaaaaaaaaatatatatgtattttaattagttaggatatatatttataataaaaaataatattaatggtgtaatatttaatctaaatttcatattataatagatgtcaagagtttaaacctcactattctgtcttacaaaaaaaattatattaggcccttcactttaaattttagatcagatgtataaattgtcaagaatataagaattttaggagatttttctttttttttttttg

SEQ ID NO: 212562 - DNA, 754 bp, Cannabis indica
tattttgcattgaacagttccaggaagttttcccaggtcattatagtaacatcatgagtcagggacaccatgtcccaccacactagagcgtcttcttggaactggaatgtggcacaggccactctatcatagtcggtgacgcccataaagtttagaattcttgtaatcactgttaaccatttttcggctttcataacatcaagacctcccaagaaaactggaggtgcctgcttgcggaacctttcattcagttgttccattttgtaaactgcagcgactagtcctgcctgcacaacaggggtaggagctacctacatttctggagcagggattgcaagagcaccctgctatctcaggcattggatctcctcatctcgctcattaattttggcttgcatttctacaaacttgtttttccaatcttgggcagcttgtggcgggttaacatcaccttggccgcatgccctgcctctaggacctctacctcagccacgaacatttgggggaatctgaactccctgaccaccactagatctaaccgcattacccagactcttggtgtttcgcctggtgtccatactattagaatagcctgcgtaaccaagagctactttggtcagatcgttatcaagtatacttactaattgctgcttatttggaaattaaaaacatgcacccattcagctatcaggctactatcatgcttcctaacatgcttttcttaaaccatgctattaaaataaactattaaagc

SEQ ID NO: 212563 - DNA, 985 bp, Cannabis indica
aatgtagttaacatcatatacatggaaactgaaaagaaattaaattaatatccagtaagacataccaattcatgcacataatgattaatggaaagaactggctggtgattttctgttgttatgaggtgctgttgaaataatgttcatgaatgccactgaaaacgacaaagtcaatttagttcaggattgacatgtcctttcttaacatgaatattgtttgcaggtatgcaaagcacccagtgttgttgggcattgagttattaaacgaaccatctgcagccacagttccattggataccttagtttcatattacagacaaggctatcaaattgtacggaaatactctgcatcagcgtatgtaatagtttgccaaagaatcggaaatgcagatcccttggaactttatcaggcaaacattggatcgcataatttagtagttgatttgcactattacaatctatttgacactttctttgtgaatatgagttcttcggataatatacaattcatatacaagagcagggaagctcaactgcaagccttgaacaatgccaatggcccacttatttttattggtatgccaagatccaattataccacttaaatatacttgaagagaagatctaagtgttaaactttaatggagaatttctataagtaaaagttcaagctacctcattctctatttatgagagagatcaagtgttaaactttcatgtctataagtaaaagttcaagttatttctttatttactagagacttatttcttcatgtttaggttgtacgagttataatgcttgaaagcttgatgtattttcaggagagtgggtgaatgagtggaatgttacaagtggttctcaaacagattatcaagacttcggtagggctcaattggaggtttataatgcagcttcatttggatgggcttactggacgttaaaaaacgacagaaaacattgggattttgaatggaacatcaggaa

SEQ ID NO: 212564 - DNA, 535 bp, Cannabis indica
gagtgtagctcttatcccaatcagcaaggtgctttccacatagagcaactttatccataatatccaaagaattaccaatatcccaactctccttaaccacttggatacacaatggatctctacgccaagaattttcaaatctaaaacacgtaacttcagaattaaaggtcttcacagttacttcaagaaggattggacagtggtcagagctagacacttccaaattaataagcttagttgagctaaaaatgtttaaccaactttgagatacaagggctctacccaaccttacttcaatccaattcaaagtccctctacccttctcctaagtgtatggataccctgagagatcaagatcacacaaactgctgtcctccaaggattgatggaagccatcgtttaaccagtcagggtatggaacctcccctttcttatcatcctgtgataatacgttattgaggtcaccaataacacaccaaggaagatttttgtcagcagaaagggtgcgcagtaagttccaagttcaaaaccgtaa

SEQ ID NO: 212565 - DNA, 814 bp, Cannabis indica
ctcatcatttatcgtcatgacatgtgaccaatccatcgagttttcaagattgccgaacccaaaaatattttatttcaaaaattgtatataaaatacccacatattttaataaagtctccgtaattaataaattatgattaattattcatttacttaataattcactaattaactcataattagcttaagtgagattataatgctactttaatgttcatacaattacatatttaataaaatatgtccaatttaacataataataattttagggatattatagtacttgccagagaatgtcattgtacaaggatgggtatcagggaagtgcagtctcaagtgaaattacttggacaaatattgagtcttaagttgaacatttgattataacagactcaccattaagtttcatatagagtttctaaggaaatctcacatgagactaaggttgtacatgcctacaaggccatgacaagattcttgtcgaggtcaaaagaggatagaaaactagccacccgcctggaacaaaggcctaagtcggctaggtttcccaagcttcgagagggtaggccaaggtcctatgacgtagccaagaactggtcagggttaccaaacccagacatgaacaatgtagctttgagggtgaaaccctgggctggccaaccccgatgattaagtcctagtccgtctgaggctcaagtatgatccgtagggccatctagggttaattttgaatctaaatgtttggttttttcaaaactcaagatgtgcctcgtgttctttatgactgaaagagtcaagaatcacacgaaggcc

SEQ ID NO: 212566 - DNA, 696 bp, Cannabis indica
catccaaatatccatttaagaaagcagttgacatctaactgttcaacctccaagtcattgtgtgcagcaatggctagcatcattcttatggttttgtacttcacaataggtgagaaggatatctgtgtaggctacctcctcaacctgtgtgaaccacttaactaccaatctagctttgtatctaggtggctcaccctctgccattccctctttttctttaaacaaccatttgcatgagacaaccttcttgtcttgtggcctaggcgccagaatccaagttttattcttcttcaaggactgcatttcttctcccatagcagcaagccactttttctttgatttgcaagcaatggcttcttcataggtagttggttcaggttcactctcatattgaaccacagctaaggcataggctatcaaatcagcctcagcatacctgctagggggtttgatctctgcaacatcaaagtctttgccttccttggctgtcaagtgcatgaaatcatgcttattaaagactacatccctacatataacaatcttaggcttcccattttcaatatgccatagtctatatcctttaacacccttaggatatccaaaaaagaaacatttaatggccctaggttctaatttttcaagtttctgatgtgcatatgcagtacatccaaatatctttaagtgattcaagttagg

SEQ ID NO: 212567 - DNA, 1194 bp, Cannabis indica
caatactattaacttgtggactagagttctgtaacactcgaaccgcgtaaaaatcttagtctcttcttctctaatttatttcttttttaagcttatttattttacaattagtttctgaaaattttagtaaacaatgagtaatcgtttactaacacatcattgaaattttttttaaaaaataaaaataactcattttatattgacaattggttactactacatttgcaattaaaacattaatatttgtaaccagttaaaaaaaaaaaagaaaaattactctatatactatttttttaactttttttttctttcaaatttatggtgtgggtttcgaaagtggtttcttcggtgaattctatatgggttgctatacgatttttggttaagatttaggttgctccgctagttgcaataaggatttttatgtataattccgtaaaaatacaaaaaaaaaaaatatatatatatattttaaagtgtaaaaatgaaaaagcccctaaaaaaaattttctaaaccaatcaacatgtattattttatttataatttttgtttaaaaggttgcaacatgtactaactcaataactaatggaaataactaattatactctcgaacacttttcaatggatattacctattaatagttattaaataaatttaattataaatattaatttaaaatatcaaatcattagattttaatccaatagcgaataataaaatagaaatttaaaatttttacttaattttagctacttaattaaaaaaataataaaaaatatctctatttacactatattaaaaatatgtttatatataaaatatttaagtcaaactcatcacttttttctttttgccgatttgtttttttaaagttttttttcccgtccgatggaacaatctcagcccatataatataaaaataaaagatttttctacttagataaaaaaattaagtattaaaactcaaatttttctagtactaccaattcatgagtgatactcattaatgtacccatatatattggagttctcaatagaaaccagttagtactagtctatcaaatataaaaataatattataaagtgaaagattaaaatatattgatattgctgagatatttagttatcattataaaaagtgtgtgaagtaggggtgttcaatggacatatataatatttttaagtttattta

SEQ ID NO: 212568 - DNA, 503 bp, Cannabis indica
ttttcatgggatcaactcgtactgcaccactatactaaagtagtttggtaaggttttttttttttttttgtaatttaaaaaggaattttagttctaaaacagaacaagatacaaacaagctgaaaacaacacagaacaacagctcaaagagccaacaagaggttactaaaaaccagcagcaaaaaactagactaccaagaccgaactaaattaattaaatactactcctttttcctcagggtactacaagtcatgctcaagattctagcttgagcaaccttcctaacttccatgctcaatttacaaggagagacacaagccaaatcaaatatacaactatttctgttcttccaaatcatataaatggcagcagcaaaaattgtatttattatacgattttggatgccaagatgaccccgtaaacaccattgctagacgttaatgatatctttcggccacatcacatgtcccagccatcgccaatttcagcaaagttcttggag

SEQ ID NO: 212569 - DNA, 603 bp, Cannabis indica
acaactattttgtattttggactttaacaacaaagattttccccaaaggtaaaaaataaaagaatactataatatatgtaaatttgaatattaaatatgagtaataatatgcccatcaaacacattcccaataattctttcaaaaaaaaaaaaaacactataccccaataaaattaaattaaactaattgtatccttcatttttttttttaaaaaaaaaaaaattattatcccttgatttcaacgttttcacaccatcaatctcatatcttggttaccctctcaacaaaaaaaaattaataaaaataaatagctattacaacatttcatgttaatgattgcatctatattcaactcactaattgaatccaatgtctcaaacaacctctctaaaccacaaatcatgttatatttttcaactcaatcattctcaatcacttcaagcttaaggagtgtgtatataaattattatatgttataataataatgataagtgtaagtaaaagttatctcttggttcaagtagagatagtatttttttttctgcatgtccatggaattttaaaaaatcgaaaatctcatagatagatagagaggtaggaat

SEQ ID NO: 212570 - DNA, 537 bp, Cannabis indica
cttaactacttgagagaacatcttaaccacttggagagaatttctcaactactttgagggaatatctcaaccaactaaatatctataactactttttaaatttaatttcaaataaatgtttatcttttgcattaattaattaaccaaaaaacaaatccagttgggacatccctacattacgggcgcctgtcacttaattgatcatagatcatttgatttcaattttgagatggttaaactctagcttaaatttattgcacgagttctttaacttattcgtcacaagcttattgtagaaccagctcaatacttataccttggaaactcaatagtgcaattgagtgagattgttaatcgtagatataaacatctataacttctataactatttagaagtgaaattatatttttcttagagcttggcataacgcgatgagttttctttaaattaattttttattagttagtaaatattaagtttttgtgttgtcattatcttataatgatatttatctaattaaaaaaaaaagaaattag

SEQ ID NO: 212571 - DNA, 676 bp, Cannabis indica
ttttttttttgaaaaaacttgagctttcttaaaacaggaagcaatacaaagcaaataaagctacaagctaaatggaaggtaaagaaccattccaaactaactcattatctaatccaagacctagcttagctaaattatgagcaagaacattactttccctagggatgtaagagatagctagccttggactgaaagataacaagtttttaatattaaccagtacatcatctaacacactattattccaattacaagaattaagtttgtctactattgatttacaatctgtcagcaagacatctacagggagagaaatcatctgagcccattgaattgcctgaaaaatagccttagcttcagcaaccgcaggtggcaccaacccaaaaaaaggagtagaaaaaccagctttgactgcattatcagcatctaaaaccaccactccgatactgtgcctccaattattagaatcaatggcggcatctgtgaaaagtttaagccctctagaagaagatggctgcactggattcgaaagaggagctgattggaaacctgtggcatgatgttgctgtgcatccaaaaacttaaagaaaaaagtaagagcccaatcatacacttcttttggttgaaccgtatactgattatgaacaaaattgttcctttggttccataaagacca

SEQ ID NO: 212572 - DNA, 731 bp, Cannabis indica
aacaacatctgcatcatcagggagttcttctattatgcatctcttcaacttaggcccagctaatgtagagtgttctgtagttgtcttctgactagggccaccaacaactgccaattcaagacagtcccctccaaaagtcccagatagatccacataaacctcaactttcctatacctcttccttctcatgtcatcaattttgaaaagaaataaataaaaatacagcgattaaatcctatgcgtacacgtgtaccgttagtcatactaacggatgtggtatgaacggacaaacacgagagtccagcttaggtactattgccgctattattggagcttggggattaatctgcatcaacatgaactatttggggacttttgccgcaaatatccctatatataattcacatgtaaaaaatatatttcttcttttttttttttttttttttttacttttttttttaaatttggcatatattcctctcttgttaacttgaattactacttttgatagtgcctaaaattttccttttacttaaaattaaatggataattgtgcaatctaattcaattacacatctattgcgtttaacaattttttttttttgaaataattaataaagttaaacgtggaactaggagtaatttttcttcttttttttttatttttttcagttcttaccgtatttttaaaattttatttttaagaatagtcgtaactgttttttaactta

SEQ ID NO: 212573 - DNA, 724 bp, Cannabis indica
gtgtcaaatttagcataaccataaatgtacttttttatttataatattgtcatttattattaaatatcaatgagtaactttaatatatattttaattacaatgttatcattatttattttgaaaaatatttagtttattgtagtgatagcttagtagtttattaattacacctcttctcataaaaataaagtcccaactttgaatctccatctctcactatcaaaaaatatttatatgtatatgggtaactatttaatggttacatttttattgtaaacatcatgattacatttttttacctgtaataaatagataaaaattctttttttagaattgattaattataattaactattttttttttaaaaaataattaaataaatatttaacatacctcttttagtaattaaaatttatagataatttttttataagtatataaatccctactataattattttaacagttaagatatttaattataatatttataattttttttttttttacaaaatggtagatttatttttatataaattaaaattctctctttataataaatttttaaataattaataatttttttaaattagatgatgatgcatcaagctagtctaagtagtatatgttcactaatactacatttgatatttgtggtgagatgtgatagaggtgatttatgtggctcttgataagattgggaactaccctttgaggtttga

SEQ ID NO: 212574 - DNA, 705 bp, Cannabis indica
  modified_base (95)..(95): a, c, t, g, unknown or other
aggactgatagaaatccttagataggtgaaaggaacttcacctctttagaaaaccaggagcatcaaaaatttcgttgtatctctgaatgagtcanaccatgacaatagatagctgatttggaggattaggttgcaaacccgaagccgagagaacagtttaacgaccctgtagcaagtagatgatactcttgaagtcaccattgcaaaataatagaacatcatccgcaaacatgagatgattcaaaatcatatccttgcatctatggtgaaaggtgaaatcggttttctgcccaagtttcctcatgatccttgttaaatattccatacccagaaacaaaaagcaaaggggacataggatcgccttgtcttagtcccctttttgcctcaaagtagccatgtagggatccattaatcatcaaatgaaaacctgggggttcggatgcacaacattacaagttgaatgaactgatcagggaagtgcaatccatacaaaatttcttcaatgaagttccattcaattgtgtcataagctttttgcaagtcaagcttgataacacaactaggctttgtcaacttccttccataatgacgaactagatcttggcatatcattacgttgtgtgcaataaatctcccttgaacaaatcctccctgattacctgctatcaagtgtggtaatatactgttgagtctcgagcatattag

SEQ ID NO: 212575 - DNA, 1151 bp, Cannabis indica
ttcatgtctgaaagggttattagagatgttgggaattatattggtaccttcgttaaatgggatccaaataacttccaaggagtgtggaggaattatctcagaattcgtgtttcaatacgggtcgatttaccacttgaaagaaatatgaagttggagatgaagagtggtgcttcatgtactgttggttttatgtatgaagatctaccaaccttttgttttatctattgcattcttggccattccgagcagttttgtgatcgtctttttgatatccctatgcacttgatagagaagccttataatcttgaactgaaggctcctccgcgtagaagacaccataatattggagctcagtggcttcgttcagggtcgacggttagtgcaggcagttcaagcttccaagggagccaccaatgttcggaggccaatgagagacaggctggaggagttcaattacacaatcagcgatcaggtatcaatatccttgattttagggggttggtgctggagtctcgggcagatatcatgttcaagaaatcactgggggtaatggaggagatttggagaaattgaaggggcttcttaatgactctgttaataatagtgtttccctccaactggctgattcaaaaaaaagaaagacaactttacttgagggtccatgtgggcttattgggccatctatgaatgaacctacttttatttggcctaatgaaggggatggtaatgtttttgataacaatgaaaggaacaatacaagtatgatggacacaggtgacttgggcttgggttcgaaaggtgatggtaactcaaaaaacttgtttggggcgggtactggtttgcagtcccgccatccattatgaatgttttaagctggaattgtcggggggcttgggaaccaacggactttccaattcctaaaagagattgtgactcacactactacaagaaaaggcttttaatcccagtttttaagactttttatcctggttttcgctaatataaaaaccgggatatatgacagtgggataaaaaatctttgaaaaaactaggataaaaaagtacttttatcccggttgggataaaaagtgtcattttatcccgtttctcataaaaactggagtaaagtaccgtttattccactttttcgt

SEQ ID NO: 212576 - DNA, 830 bp, Cannabis indica
ttaatgcgtctttcagtctaaaagagttataagcattgctatttgtcattttatggtgtcattagctttttttttttattgaaaattttttatttttatattttaaaacagttttttatttttattttacgaaatttcacacagaaagtctaatagcaattaactgatcaatctaaatcgcaactaaaattcgtatgacaactcacatgataactaccgaaaaaactcaaaccgtaaatttaaaaataaaaataaaaaatatatataaggaattctcctattttatattacctgatataaatttacattaatagtaataatattttaatttttgtggtatttagcacattaggtgcccatagcatttttaaaaaaattaatatagcgtgatgaggaaaaaacacacacgtaattatttcacacctccaaatgtgttatggttagggaagttaattctatctcattgaaaaaaaaacaaagattaattaattcatagtttgtgtagctgttttgtactagtacgtggtaataattaataattaagaaaatttagatttaattaatatataatttgcaggctttcactgggaagacaatgaatggtgccacaacatacgtgttaatagatatacttaagagaaatcgtgatactgacataacatatggagatctattggataccttgtctgacatcttcgaacgaagtttagctgaccaagtcaaatgctttaattccagaagattagcaagacttttcggtcaataaaattaaatcaggttaatttcttattaaatttttatttatcattaattatatgtatatatatata

SEQ ID NO: 212577 - DNA, 781 bp, Cannabis indica
aaacacaatcataaaacaaattcaaaaaattagaatgagcctaaaataaaacttacgcacaaatttgaaaaatattttgggactaaacctcatcacaccataatatattttggcactaaaattacactatcccatccttattttcttctccattttttcttttttcttttttttaacagtatcttcttctcaatcttggattgacttggaaccctaaaaataaaaacatgaattaaaacccagaaaaaaaaaattgatttcatgttcttcactcatccccattcttcatcattttcaaaatcaaagtatctctactcaaatctaagaaagctcaataatcattagccataacacattaatcaataccaattcttttcaaaatataccattcaaacccattaatcattaattattcaaaaaaaaaaaagcccattactcattactacactatacattttttttccatatttattatctaatggaactgagagcataaaagtagtcaaagcatttaaagggagagagctcacctcagtcgatgcagagtgatagtagaaagactgcaatggcgtgtttttatgactaaagctcgacggtggagagtcattgaagccgacgaagatatagagagaaagggataccgcgaggggagagtgagaaagtacaggaaacccagatcttggagttttcaagggttgggaatctcgtggtggggtctgtttaggccatagaaggccggagatgctccgtctgactttgagcagtgagaaccagagagaga

SEQ ID NO: 212578 - DNA, 1272 bp, Cannabis indica
tttcaattagaagattaatgtacattttactattaataacatacattattataacacaattatgttttacctactaaatatactgacacatattttatttttataaaacaaatcgttcaaataattatactattttaattattaattaaaataaaaaactaaaatattaaataaaactaacactacgtggcttggcacgtaacaatcacctagtatatatatataaatgtaaccattattttaatggttacatttttattgtaactattatggttacattttttttagccattggatcactattaaatgattgtaattaatttagaaattaaataaaaaataacttataacttgatattaacctgttaatttatttatttttaaaactttaattaagatcaattatattttaaaattaaattaagtataattaattaattctaaaaataaaatttttacctattagtaacctactattacaggtaaaaaaaatgtaactattgaatagtcaaaaaaaaatgtaactattgaatagtcacccatataatgctatagataatatgtatattttttttttaagttagtagtatcttttttacaacaaagttaaaaagcgtttaaaaaaataaaggtctttttaagtagggttgtaacttgtaagtacacatttaccgacctatatttaagatagaatggccttgctcatcacttattataaggctattttatttataacttttatcccttaaaattaggatttatgcatgattgtacccttaaatttcttagtcagttaataaacttaacatttgtgtaatatttagttgaaacaaaaatgtaagtttttctaattaactcaagaagaataatcatttcaattagatttagttactaaatctcatcgctaactctataaatacacacattacagggttggccctagacataaataggctaggcctgcgcttagggtgcactcatttttatgtgcccaaataaaaaaaaatatcttttaaaaaaatatataattttttttaataatttttaaaaatactatttattttaatagttaaaagtctaaaataaaaatacttatctttattatttcaactgaggaccggccatggttacaattatgtaattatctttattattgggaaatttacatggtctacaaacttttgccatttttttacaaacatattttcagtacaatatttttacttttttacgagttgattttttataagtttcatactgcagtatactgtg

SEQ ID NO: 212579 - DNA, 367 bp, Cannabis indica
gctcacattttttgggggcccaaaataaaaaataaaaggtctcattaaacttttattttaagtaaaattaagtgtattgtaaataataaatattcataatttggttggttgggatgtatgacacattacacaatggtgtgagttcgaatcccgtgatattttttcagtaatttttttttatatatatttctaaaagtgagggccttaaaattaaatagccttaggcccatatattttcagggccaaccttggtaaatgtccagcagtatggttgccacatatacctccatgcacctctcgaaggatgtagtcgcactcattgccattgacacattatagaagtggttggttaaaacttctacaatag

SEQ ID NO: 212580 - DNA, 613 bp, Cannabis indica
tttttttttttctatttctccttaattctttctaatttttttaatattttattaaagcataaatttacaaattaatattttactataattttaataaattttttataaaaatatctatcttaaattaattattatttaaaaaaacacataacaataaatataaattaaattaagaatattaaattaaataattatttaattatttatatgtatgtattcataattatatacatgtgaagttttttttactttgcagaatataaaaaaagtatttttttataaaaaaaattattttgaattgaataaaaaaaaagcaagtgtgagattatgtagaagaagatacaagtgtgagattatgaatcaaattttttcataatgcattatttttacattccaatcatataaagttaatgtcatcattgtagttcctattgatatcctcaaatttcttaacttaacactcaatttatcgtttttatagttgatcaataaagttccacatgtaaatatagtaatttctaaactaataattcttttagaaaaaataaatttacaaaacaaaaataaattaaaataaattcataatattcaaaaaaacattatatacatatta

SEQ ID NO: 212581 - DNA, 795 bp, Cannabis indica
gctttatgggtcctgagacttccttgcactgctctttgggctatgataagctctcttctatctgtgaggtcattaccctccatctttaggtacttatttttcatagttgggacatctatgagttcttttattattatcatgatactatgtctattaccatgtttaaaaaattcattgtgtgtctttggagaatttggtattgacaaaataaatgggtaaatgaaaaagtttgtgtacatgatgaccttctgtttaattagagtatggatttcttaaagtagttctctttagccaaatagttgtaacactcatcttggtattcttcctgagaatcagtcagttgttagatggatcaaaccaccttccgaggtaatgaaaatcaagtgtgatgttggtttaagttttgagttggataaattcagggctggggaggtgtttcgttatcattctggtattgtaatagcttctggtacttggacttggaatagttatttctctcttgatgttgctgaggcattgggtatctacactggggtcctacttgcttgtcgtcttggctatcaaagggtgatttttttggagtctggttgtcttactgttatcaatatcattcatcatagaaagttaaccagtcttatttaggttgtattattagagatattattgtttattgtaactattttagtgtatatttttttttatagtactgttctaagattgctaacagtgtgacttcactttggctaaagttgcttttgtctctgattgatcattatgtttggtggcttggtcacc

SEQ ID NO: 212582 - DNA, 871 bp, Cannabis indica
tgtttttgtgaaacaatcccttagtattataaggaaaattataagagtttattttttggggggtaagttgaaaaataccacttttattaatcaattaatcaaatttacctctaattttatatttaattgaaacatacctatttttatatgtattgtacctaaaataccctgacataagagagttacatggagagtatcttgaagtgacaggggcaaaattggtacaatgtttaaaaaaagaggtaaaaatgatagactttaaaaaatatggtaaaaataaaagaggacaatataaaaagggtatagagtgtagttttctctaaattatatataaagttaaggggttatgagttttttggttttttacatttgtatgggtttttttatgccatatttttgtaaaaaaaaatgaaaatcctatatttgtaaacaataataagttttgtcgggaaagtcgtcgtggagggacttgggttcgggtctggtcgaagtccaaaatattaattaagaaaaaaaaaactatttaaaaaatattgaaagtaatgttttttttaaaaaaaaaaaaaaattgattctcaattaaaaaattgaaaaagtgaaaattgttttacagaacatgcttttgaaaaatatttctcttttctaattttaaaaacagaaaactgattaaaaaagtgttaccaaatgccacaaaaactaacagaagtattttaccaaccgtcagcctttttttataataattattaaattaaatatgtgaaaatttgatgcaattcttattgtaattagtcttgtttctgtgataaaattttgaagtgttttagtcttgtttgtatgacatattttcttttgttgttggttcgttctttgt

SEQ ID NO: 212583 - DNA, 562 bp, Cannabis indica
ttaattttttaatttttttcttcaccaaaaattcaagcttagaggagaaaaaatcgcgtttggtagacggacgctgagtagaagagaaaataagggtggggtaccaaaaatgtgtagcaaactatataggggaattattttatataattagtttttttgggttttttttttctcttcaaatttacggtttgaatggttttggtagttgtttcagtaatttttatataggatatgtggatttcagtttagtgtaaaaaaataaaagatatatatatttatacaaaaaatattataaaatttctaaagatattttattttaataatttgttttttaaggtaaaatttaaatttttaattttattaatttttttttaaacatttttcttttaatttatattgttgaagtatatttatatttttcaaaaaattattttagtttatatgtattttttttaataatgggtgtatttatcattttataaagttcatgtagaattcctctttatatatatatataagaatttacttatttacctcactaattaattattaaaattaaaaa

SEQ ID NO: 212584 - DNA, 666 bp, Cannabis indica
aaacaaatgacttggaccaattagatgatgtcacgtgtgtatctagttggcatttgacagtaaatttaacgctagatacctcatttgcaacaaaatattgacagaaggtatttttactgtcaaaaaaataagttaggtacttatttgtaactcagagttaaacttaggtatttatgccgcaaattactctattatatatatctttgactcggtcacaattgagtatttacaaaaaaaaattatttaatacaataattattttttattttttaatttaattgagatatgtgcttatttaaaactgattacttagtcgtatatgttcatgggacacgttcaaccaactacactccatgattctgaaaacgttcttcttcccgttatgattttcattcgtctatataatgtgattgaactaataagaagaatacattcttttttattacaagaaaaaaaatacagttttcaataaaaattaaatttcatctccgatatcaaaaatctttaagtatattcgacggtgctctacagtgcagtgggatttcgatacagtacgattgggctgttttatctcagagacgaccggcaaattctgactgcttgcatactcctaggcagtgtcgtgaacgtcttaaagagaacgatctagtctgcgacttaacttag

SEQ ID NO: 212585 - DNA, 661 bp, Cannabis indica
caaatgctccctaaaaagcaccctactttacttaagagctagtatcatattattaaatagaagaaacagcagaatctaagagataatacataattctatagttttataggcatttagcattacagagaactgcttataaataatatatactgcaaatagccaaagttcaacataaaaaggaaaagaaaaatgttacattagaaactcattccaattaatcaccagcccataatataagaacattttagtattttacaataaaattaagaatatttagtaattttgctcccttaattttttacactactaagttgtacccctaagatatacggctcgctgataataccccttcaaatataacttttacattaacgtaatcctttcatcacactctattcaattatttcgtgaaatgagtgacacaatggataataattgacaaataaatgcaaattatataagtttcacctattttaatttttaccttaatgattaaaaactaaaataaaaatattaattattgttaaaaaaaaagccagccttactatactattactcattaacataaaacaagcaaaaagtatacaatttagcatccatttatcaactaccatcttctgtgtcactcattttgcaaaaaaaattgagtagagtagtgatg

SEQ ID NO: 212586 - DNA, 925 bp, Cannabis indica
gtcaagtcaaatacaaattcaatatgtaacgacaacaatttataataataataaaaaagaatgcacactattatatttatggggaacaataaaagattaatcagtgagagtaaaatatatgtcattatataatatatatacttgagacatttaaattcagttaaaagtataagattaaagaaaacaaacatcagaatcttaaatatcagttcaaatattaatgagattggttttattattattttattatatataaataatattttattattttattaaataaaaataaaaagtcacccataaatttctcataaaccaagaattttagttatataggcacactttatatagaatagatatatatatgcagtcatagtgatacttaattagatgataggattttactttgagtttgtgtttagaggattaaatgtaagtgaaatggcaattggaaaaatttagtccctaaaaactcattatttttttcttttcaaaacacggctgaaattctcgaaggttaagctaaggtaccaaaggattaaaggaaaactttcaactacatcacaactttcagaaaatgcaaacttgaaaagttttaggaatgctgaaaccaacttcagttttggtgggctgggacttcggctaataccagcccaattgccaaatcatatcttatcttactatacactaagtccatctacaatgcatgatatataaaatttttatagcaaatttaactcaaaaaaatgacttaatattagaataaatagtacttttgtccaacactacctgatcttgtttcataattatgcttaggttctattttttttactatcaaaaattagtatttttactttatgaattttgaccaatacaaaattttacatgcttttattaaaaagaaattaaaaattataatattcta

SEQ ID NO: 212587 - DNA, 546 bp, Cannabis indica
attacatatggtctaatttatcttctattgcatactgtctaattatcactccattgcatatttgtattttcacttatcgctctcaatcaaatttgtttctttattattattattattattattattgagaagaagcaatcaagattcaaatttgtttcaaatatgcaaaaagtactgactttattaataattcaacttaattgtttcaatttcaaccaaaaaaaaccctttaccaaaaaaacaaccaaaaataaataaatgaatgattgcatgaaattctgttcgttgtacattcacagagaggacaaatatattttggtaatataggttgtaaacagacaatggaacgtgtacagcctgttccaaaattatatgccacgttagtactttttatataaactaggtgatgctagcacatgtctagctttctttctttgttttatttatttatatttttctttgtttaatttttataaaataaaaatttatacaatttaatttttaaattataaggcaaattaaaaaaatacatattttattattata

SEQ ID NO: 212588 - DNA, 732 bp, Cannabis indica
cacggtgttatttagtacttgagccatgtagacttttaccatagataactggctctgcctgtgtcttaagtcttcttgacattacatcctgaacaacaatcaatctccatgatactcattttgatgcttgtaatgaatccctagtctgatgagtgaactgtgaggtctctccccaacttcatttgttggggtcctcgacaacatgcccacacgcgaccgcctaacttttcattcacaccatgccatctacaagtgcatcctgtaggatgtcactctcaagtcaactatctcatatagcacccctgtcaatttccatatccatgcactgttcgctcaaccatccaactgattcacacttgcatcacgcccttatggctcccacgatgtactaagttccaatgatgcagccttcttgccatcatgcaaactctagcaccctcctggccttcccaggtaaacatcattgctaatctcactggcacgaccctctagcctccacacaaactctagcaccatctcaatgcatgcgctcggtcttgttagccatgctgacttctttaatgcattcattccacaacttcgcatctctaacgattcctttgtctgactaacgccctctgacggttttactagccaacacatggcactcaactgtctcggtgcttcaatctgaatcaaataaaagtcacatgcgaacaccttcaagtataaccatcctctgatgattgcggc

SEQ ID NO: 212589 - DNA, 637 bp, Cannabis indica
atgtgtttagcacggtcaggattagtggtaaagggaagagcatgagattttccaaattgacatgcttcacagaagcttttcttttcattcatagcagcttttacattgataaaactcaacacatgactcaagacacgatttgatggatggcccaaacgtttgtgccatctatcttttaaggaaactacattggaactaacattatatttatttttggaaacagacacaacaccagtaaaaggtgtaacaaacttagacttgacaacatgactcgaagtatcagacacatttccttgctggtttggaagttggtatagtccatctttaagagtcccttggaggagcaccatctttgttgcctgatccttcacaaaacagttttgagcaaagaattcaacaaacacatcattatcatgggtaagtttagatatactgagcaagtttttggtaatttttggcacatgtaagacatggtttaagactaaagagctgttattaatagagggtatgaaacttttaccaacatgggcaatttcaagtctattgccattaccaacagtcaatgtctcctcaccattgtattcagtcttgtgagtcattgtgttggtatctgctgttatgtgattgctggctccgg

SEQ ID NO: 212590 - DNA, 585 bp, Cannabis indica
gcagtcttcaaggatccatattccaagtttgtactctaattatattcttcttcttaatgtttcactaaatcaaaagtcaattatatgaaattttctatttaaagggtttactaatttgtggttaatacttaatatttaattaaagaacgtgtgaccaataaaaattaattaaatataataatttcttgtctctgtcaaatgaaaataggatacatcaaatgatctaaatttattctctattttaaatcttctttaaaattcactattcatgctctatgtttataaaatattattctttactataaactaattttattaattgtttggagttttaatttttctttttatatagggatatgtataaatattaataaaatttgttaaaatttaaaaaaaatagagttttggtaatgtattttttaatgaaactaatgtatgatataatgtaaagtttgaagtaaaatagaaaaagtagaaatttgtaatatattttaaacgataaaataaagaagttgatgagagtgctctaattaattagttgatcacacaaatacataaataagagagttatgtttacatcctaca

SEQ ID NO: 212591 - DNA, 731 bp, Cannabis indica
aagaatttattcttttatttttttaatatatatatatatatgtaatacatgtttaatttttttttctttttaatgccaaaacaaaccaaagtcaataaagtgcggagcaaaagttggaggagaccagattgattatgtatgtgatacattctttttattttaattattatttaactttttttacgatatatttatagagtgaattgtaattagtggaaattaaaaaaattatcgcttaagaatattatattaacgtttaaaaaaccactatagataaaacgcaataaataccactgtaagaatgttgcggaccttactaataaatgttttgctctcttgttcagtaaatagatattgtactatatatatacatatataaatatttatactgatgatgattttctttttcattttactgttcataatagaaaaaaaataaaatatatatataaatatatatataaatattgttgagatgtagctagcttgccatgataatgacgggtacagtagtacttgtatataaaattaaaacatgtgaataaattccttgcattgtaggtaattatatatatacatttacatacaacagctagctatatagttcagaattatattaatatttatttcaattgactttaagcttttctgtattttacctatctgaattataaatttttaatccaataaatggatcctgttttgcataattggagatctactcaggtcat

SEQ ID NO: 212592 - DNA, 550 bp, Cannabis indica
cactgtattagggcatttccctttcggcaccaaggttaagactgtagaatttatctctttcagaatctgaccagtttccaagaaggatagcacagcctcactgactacattccccacaatttcccagttatcctgaaagaagtaactagaaaatccatctgctccaggagccttaaccccagggatatcaaacactacttgtttcacttcctcgtaagtaaatttacgattcaaaaactctgcttgatgttgtgtcacagtaggccccaacatcataatcttgctttgtacttttcttttattttccaatgtagaccccaacagatccatgtagtatgccaagaatgcatcagtaattttaccaggctcctctattctagtaccatcttgttgctctatagacagaattctattcttccttcttctccctttgatgctagcatgaaagatggctgaattatcatctccatgcttaatccaagtgattttggaatttttgctgaagcatggattgataatcctcctgcctttgcataaactcctttctgac

SEQ ID NO: 212593 - DNA, 714 bp, Cannabis indica
atataagtttcagtaaaattgtataaatatacaaaatataatacaatcttataaaattgaatacaatttaaattaaaattaatttagaaattatatactttatttctaatttgttcaaatatttttttaaaaaaatattggcacatactttgtatttcaattttaattttgtttagtggctgaagcattttttttaaagtaaaaaaaaaaaaaagttgccgtacattttagacttttttaatatttttataaaaattcaaatcatcacaatatataataaaagaaaacataaattatcaaacattaactaataatttatatttatagatttattgaaaaataatattatataacatttaaccaataacttagtttaaataatgaaaatgttatgaattatatgacttaatttcaatccaaaaacatgggattatatcaaattaaaattagaagttaattaattaatttattttacaataaaattttaatttatttagtaattacattttaactaatactatttatttgcaattactttgaaataattttatttattagtaaaattagaaagacaaaaattaagtatttacattgacatcattttttttcttttcttttcttataattgtttgttttgttgccagctattatcttgtgttgtgtctttttgccgccctctttttattattattattttcttttgtcttttggtac

SEQ ID NO: 212594 - DNA, 701 bp, Cannabis indica
gctaaaattagacatgagcaaggaatataaccgaattgaatgggattttttaaaatcaatgttattcaaacttggattcagagaaggctggattcaattggttatgagatgtgtttcttctactaattagatggtgacccatggcggtagagaaatgggaccgatggtgccttctcaaggtatcaaagaaggtgagcaactatcactttatatattcattttatgtgtagaaggactatcgtctttaatcaaaagctatgaggagaaggttttaacccatgggtgcaaagtggcaaatggtgctctaatagtgtcccacatgatttttacagatgatagttaatagtattgaaaagccactattcaagaggcacggaaaattcgtgagcttcttcatattggtcaaaaagttaattggttaaatattcaatttttatagcttgaatactgatgtcaattgtagaacaagtattaatcacttgctacaaatgttccaagctgataatagaagtgtgtacttaggtctacctagcactatggggggaaataaattagtcgttctaatttacttaagggatcatgctcgtaagaagcttcaaggttgggaatcaaagattttatcaagagttgataagaaattctgattaagtttgtggctcaatctcttcctgttaatgctatgagtatcttcttactccctt

SEQ ID NO: 212595 - DNA, 752 bp, Cannabis indica
tttccctttaggagactaaatccccttttctcgggtctgctctcctatttccggatttggccggttcttcaaacggctcattggaacttcaactgctcaccgtcttccatggcacaatctcaccggttctctgctcctaactccaatcttccgtttgctgctgcttccattgtcagcaatgtcctcgccagttccaccactactcatatggtgtcctccgtcaaagcttcgatcgttcaagaaacaattcctccgtctatcgaagctccgatcgagccacctactgcgggtctcgatcttcaacacgtcatcccgtctccttttccagatgctcgtccctcctccgtcgttcctcttccggtcgaaaccgcttccatggatgctccggccataccttcaagatccaatcctattgtgactattggtaacatttctctccctcaccttggttcacacagtgctcacgatcccatttctttgcatcctccttctcatgactgtccagccaatgaagacaatccatacttcgttagctccgatgaccatcccgggttgattcttgtgacaccacctctgtccgaccataattttcaacaatggcatcgagatttttcatttagctctcggagctaagaacaaaactggtttcattgatggtacccttcctcaacccgatcctactagtcatctcttccattcttggactcactgcaaccaaatggtaatgttttggattattcattgtgtttctt

SEQ ID NO: 212596 - DNA, 1416 bp, Cannabis indica
ttggaatgggttaatgctagcgtaatgtgaaatattaccgtgtttgttttgaggatttaaccttacaatatttttccttataatataatttctcttgaagaggataatgttgataacttaaaaaatactgagattgaattattcctttctattatattaatttgaatactattcttgacttaataaataaatttaaatactatcaatattttaattattataaaaaaaacatattataatatatatttagtctctaagattaattttttaattttaacttaacgacctaataattatacggttacttgcaaatatattattatttttttttatgaaatatcaacttcattgaattaaacgcattctgaatacaaaagggcctgtaaatcaggccaaatattattttccaaaatgctacaatcagggataaagcgagattgcctagcaacaacatgagcaactcggtttgctgatcgtttgataaaacgtaactgcacaccatgtaaggaagacagcaaactttgacaatcctggatgattaagccaaaagtagaagacatatgttgatcactttgaatggcttggacagttaacaagatgtctgtctcaagctctacattgttccatcccatgctcttgatcccactaagggcttccttaatcccaagggcctcaataacctcagatgggtatattaccccttgtaggttgtctttgcctcaataagacagcctaggctattcttgcaacaatccaaagccataagcagtctcgtgatgaaatagtgcagcatctacattaattttgacgtgatttaaaattgatttagaccaaagctctgctccatcgccattattttcaaatgacagcgatattaaggcgtttttatcctgagcttttcttcaatggtcaaaagtaatagaggccgaaaataaaacatcatttaccgtagacaactttttattccaaatgacattgttgtgagctttccacactgcccaacatagcatagcagcacggcaagtaaatgttgcatcagacttcctttgcaaatcatcaaaccatctgccaaaatatgtagcagcaactaaattggcagaccgaagacaacccaacaacttttgacaaactcacacgaaatcagggcatggtgtatggtttcgaggtgagacttgcacacaggacattgagctgaaatttgaacatgcttggagacgagattgacacaagtaggaagagttccagagattgcacgccacaagaaatttataacttgggtgaatcttaaatgccaagaatcgccaaaaccagtgttattgatgctggtgttgctggttttttctgctgcagcaaggataagcaattcgaacagtaaaaggtcctgtgctcagctgtccaagaccagaaatctgtctc

SEQ ID NO: 212597 - DNA, 411 bp, Cannabis indica
gtgaatcactgcgtgcattgcatgctgttaagtgtcaagactcttcctagactgacagcatatattcaagttattctcgttggtagttagataacatttaagtttgacctatgattgctgaaaataataataaaagaagtcaatttggctaactactacactttatataagtggcgctttactggttagtgatttattttttaaagtttttttttttttcttaaattatacgatgatacttaattatatcaattacagtatctactagcatttctcaactataaatatatatcttcacttagtaatcaagactttttttaataaagaataaacaactatggtggctctgtatatattaataattgggttccgtcattttgaattttcttagtctcaaaatggctctagact

SEQ ID NO: 212598 - DNA, 688 bp, Cannabis indica
gagaggatcaccctgcctgatacctcaagtaggagtcacgagccccagagcttggccattgagattgaatttgaaagtagccgtggtgatacatttcatgatcaatgtggtgaaccgggggtgggggggaacccaaacttgaccataattttatttaggaatctccattctacacgatcaaaagctttagccatatttaatttgacaaccatccaactcaccctgccttgttttcagttttttatggagtgcaagatttcctgagccatgaggatgttgtcagagatgagtcggcctttgaggaaggcactctgattaggaaaaatcataggattgaggactagtttaagtctattagcaaggaccttcgagataatcttgtaaattgtggtgcaaaggctaataggtcgatagtccttcagagtagatggcttctttaccttaggaatcaaagtgacaagggtggtgttaaattgggagagatgagagaggttgttaagaaaacttaaaacagcctcagtgacattgttgcccacaacactccaatttatttgatagaattggttattaaagccatccattcccggggctttatcgggacccatttagaaaagagctttcttaaccttagagggagagaaagcttcataaagaatttgatagttcactggatcaatcctagggaaag

SEQ ID NO: 212599 - DNA, 1502 bp, Cannabis indica
gtaaattctatctctattttctcgaaagaaccattataatttaataatatttaaattatatttttattaatatgtatatattaaaatataaagaattttatacttctcacttttattttaatttaattgtcaaaaataactcaatcaaatataaataacatttttatttatttatgtttcaattcatttataccatttttttcttctctttctctcccatttttttcctttttttttctttctttttaaagctactctctttcttttttctctctgtcttacttttctctcttcactcaaatttcaaaaaataatttctggtcacttcattactcgaacgagcctaataaaaatatcattataatttacacttcaatgtggacattttaagatgtggaaagtataaatttttttcgttatttttgtttaaaaaaaattatttagagactaatatagtgattagttagtgttttataatttttttaaattttagttaacattcttttaaaaaaaaatttaattgaattatattatattatattatatgataactttaaaataacaaaatatataaataattaatatataaaaatagtaggttaatatattattacatgacacatcattagtttcgaaataatttttaacgttacttaaatatattttaaattattatctaccataatataacttaaaaataactaattaattaccactacaaaaaatcttacatttagtcacaataaaatatgttgtgactaattataaatttttattcctatattgtgactaaaaggtccgtgactaaaggtattattcacaaaaattacaattttttttgtgactaaatgtgtatttttagtcacaatgtttgttgtgtcttaaactaaattagtgacaacttgtaactaaatattatgttttagtcaaaagtaacatttgttgtgactaaaagtcacatttagtcacaaaaaaaattatgttgtgactaaaaagttgtcattaaaagtatcagttttttgaagtgtactatgatgtatacaaataagttttagaggtgatcaaaatctatctcaaattatatgatttaaaaaagaattttttttatataaaagtaactaattagtttcttatcaaatactattagtatataaccaaaaagttattttaaaatacaaaaaaataataaaaataaaaccgaaaaatgtcaaatgcttctgattaagtagtaataaaaatattattattgtaaattaaatatgaaaaatgtatactattgctatttaaattatgcggcgagagacccatctcaagtcaactgagaatcttgggcaaaacaaaatctaattgggaatttttaaaaaaataaattgttgggagtgcatgcttgtataatgatcatttatttctataaagttatactttttttctttaattaaaattggctatacttaatttttgaaaggagcaagtgcctgttgttgggtctgtagcagtttatg

SEQ ID NO: 212600 - DNA, 571 bp, Cannabis indica
tatctatatgtatatgtagtcttttataaattttttatcaattaatttatttttcagtttatatttaaattgtgattagttttattcatctttatcaattatgttcataaatctttattatggtttaatattttatcattatatactgtttgacaatatctcttccatctctttcacaaattaaatgataagtttttttaaaagaatttgtcaattttgtttcggttagaatttttaaatttttaatcttttttatctctattttagttttaatttagtcttttattactctatatcgtttgattatagatttgtctatttttttttatccttttttatctttatttgtgaaattatatcattggccaattattatattattctttattcattttatatatactaaaatagacttttaatagtatattaaaaaaatgaagagtataaaagttaaacatgagtctaaaattaattctttttagaacgattattaattggtatatatggttttatttttaattagttatcattaccaactcttacctttatatttaaaatatttgtttaaata

SEQ ID NO: 212601 - DNA, 716 bp, Cannabis indica
tagtttggtccaaagagaactctggcaccttctctgttaaaagtgcctatgctcccttgcaaaagttgaaaggtaattggtttgatgatgttggagatgttttttggcgtaagatgtggcagctgaagcttccttcgaagatgcaaaatctggtctggcgagcttgtaataactgcttgccaacggtggttcaactgcgtactaagcgtgtcgaggttagtcctttatgcccgatatgtcacagcgaacaagacattatactccatgctttggtaacttgtcgtgaggttagaaaatgttgggaccgtgttggcatcgacacatctgtcaatcctggtgcaagcttcttcgattggtgcaatgatgcttttagcaacaattctgctgctgtaaattgcagaatagtggccgtgtgttaggctgtttggggagccaggaacaacctggtgtggaacaagaaaccatttatctttgaagacgttgttgcgtatgcgtttcgctatcttgatcaatggaaagctgctcaaatatcttcggattcatcgtggccgatcctaacggctgctgatgttggtgagcagtggacacctcctgatggtattagtgtcaagataaacgtcgacgcgacaatctttgatgatggaaggagattcggtttgggtatggtggctagaagttctgatggtttgttgattgaaggaaggatgaagtacact

SEQ ID NO: 212602 - DNA, 579 bp, Cannabis indica
ttgcaacaggttcattcaaccttataggttgagcactcaattattatgcaagatacgtaactgcactactaacaacctcttcagtcccagagaacttcccaaccataaaaaataaagaaccaataataaaataaaaccatatcacacagacaggactaaaacactcataacaatatcacatagacaatactcaacactcaaaacatgtcacagagacaaaactaatcgtagtaataaaaatcaaattgtaatagcaaaatacaaccccgaccaagctgtgcacctatgcccaggaaaggctggcgggcctggctagagaaaaaaagataacctcatgtaattataaatttaagaacgataatactatttttttttaatttttttaatttagttaatgatgctgttactaaaagtaattaagatcgataaaaaagagagccataactcatactatcatatggacgagtatctgctttctactatggctaacttcaacgaatcatcaagctcactcagtactcctcttttcgctcctcttgcacttacacactctcctacctgtcaaaaatcaacttccaa

SEQ ID NO: 212603 - DNA, 538 bp, Cannabis indica
atccaaaataatttttggtccaattttttctcatagtcatgtacgtcatagttatttaagacatcctgcaaaattttaagaaattcggaaacgtttcacacgccgaaaactacgttcaaatagcgtgttgcacccgtgactattttattttatacgagtgtaaaatagactgtttgaacattgttttctatattgtaaattattctgaatttttcaaaattacgtaggatatcttaaatagatataacgtacatgaatatgaaaaaaattagattaaaaattcttctagataccgaaacaaattaggggtgtatcagcacatccattttaagagggtacattgtagaatcaccctaaagtataaaccacatcaatataagcggaatcaaaattgcaaataaaatcaaattaatgccatttggcgtaaatttctcaataaaaattctatacagaagattatatttagttttaataccacaaaaaaatagaggaattacaactttgtttgtttgaatctcatagaaaaaagaaaaaaaaa

SEQ ID NO: 212604 - DNA, 587 bp, Cannabis indica
aaaaagaacatgattattagatagtcacaaatagatttccttaggatgaaactaaactatctataggacaatatgaagtccaaccacatatcgcccaagaactaatcaaatttccaaataaaaatctcacgaaagttcaagttcaaccgttcttgggtatcatcaattatttacgagactttgttcctaactttctgtactgacaagaccactcaacaatttgcttaaaaagaataatctagaatggtcacatcaccaaactgtagcagtcaaaaagctgaaggaaatcatgaagaatctaccacctttacagatttcttctgacggaaaacatgttcttcaaacagatgctagtgaccaacattggggtgttgtccttctcgagcaagatgaacaagagaagatataagagtggaccttcaaaaattcccagctccattattaattaacactcaaaaagttgattgcaatcaagatggaatcaaaaaatttgagttccacctcataggccatcatttcttagtggaaatatattttgctgcatcaaaaagagagataaatttaagaaagaacaagacaactgatgc

SEQ ID NO: 212605 - DNA, 1208 bp, Cannabis indica
cattgatcaaaagatcaccaaaaaatacctatacaatattgtagctgttataccgaaaattcgactagtacatcagaggaagacacgtgtcaagctgagaagaataaagaactcaaacacgtaatcataattacacttgacatggaataactcgttaaaagcataattaacagagtatgtttacaactcgactgactgaacagtcttatgcgagataaaaatgtacaaattgttgtcttgtgcctcgatgagaaaccatgtaactttaggtgtacaagacgaggctctaacctcgttacgtggaggagatataatgacaatgaagatacttagctacaatgtacagtatacgaactaagtataacagatgggtgaaccaaagcaagagatagcgaggcatccacctcgccgtaggaaggtatgcacgcgaaaaagatcatctcgtcactagaaactgcagttgtcagagttaaagtaaaagcattatcaaccttgggaagacatatgatgagctccaactcgccatcaaggttaactcggctccattcccagcgagacattccaatacgataaggcttaccatatatctttaatacacattcattttgacctagtaaaagtgggatattcacagttgtgtgaaatttaaataaaaaccatatttgcttaacgtgatatgtaatcagatcccatgatttgaggggataatcgttgtaaagattacagtcaactttgaaattaactgcctactatgtaataataaatagtggcaagtaagatcaaaaggggggggggggggggtgaaaaaatcatacaagaaaggtcctgagaaaaaactatcagaaatataataagattgacttgtggactatgcagaattttaactgcaaaaccacgtaaaaaatcccttgtgttcatacctcttattttactgctttcatttttctgtgtgagattatcactgtgaggctcaaatttttgttaacgaaaatctgcgttaacagtagcattagcaaaatataagttaataccttatttttgatcttggtgcattgatcaaaagatcaccaaaaggcatctatacaacatatatctaaaagtaaactaaaacaaatttttcttccaaaaggctaataatgctaaaaaaattaatgttagacttcttcatgataattaaccctgaggctgtgaacttgaaccttcccccc

SEQ ID NO: 212606 - DNA, 515 bp, Cannabis indica
gtctaacaattctttgaaacaccgatactccacttttgaggcctcaaaaaataatagattagtcatctacaaaaataagagatgggatacccgcagcttgctatagcccaaacatcagcctctgtagcatgtttttcatctcagcattatagataaactagagaaagcttcaaacaacaaaaaaaaaaataaagaaatgagaacaatgggtcaccttgtcttaacccccgttgtggaatcaccttcctaagaacttctccattcagcaagaaagaaaagttgataaaagtcacacaagtacataactttatccacccaaatactgaaattcatttcatttacctcctccattctcttttctttttcatatgtactcttaaagatccaagactaccaattttatttttttagctttggcataatcacctcttataccaccagctcaagccacaattatcactctcgaatatcccataagccatatttcaaccataaatcaatattatttctacaag

SEQ ID NO: 212607 - DNA, 613 bp, Cannabis indica
ttttgtaagcatatgagttgttcctatataaaaagagaaatcttagtgtaaaaattaatatttttgtaatatataatgcagtgcgatttgaactgcaataattaaattcgaaatcgcaaattgcaccgcaatgtgcggtttggagaaaatgcaaacacaactgtaaaaaaatttaaatcgcattttttgtatagtgtggtgtggtgaaaacgatttgtacaatgtgaacggtttgctgaacactcctagtaagccgaccatgttgctaacactctctatatttattttgttttgaataaatccttcttttcagcaaataataataagggattttttctataataaactgaaaatggaaaaaatttacatttatgacctacatagagaaaataaaaaaaatagaaactaaaagttgtaattacaaaatacctgaaaaaaaaaaacagaaagaagaatagggcagatatgtacacaattatagttatagtattcagtcaggtaaatctcctactccaccaattttctctattgctctgtgaaattaattaaggggaagcacgtgacgcccctatattagcgtttttaatattgagttgagaatgacgctaacact

SEQ ID NO: 212608 - DNA, 958 bp, Cannabis indica
cgtaggcatctagccacccgcgcgaagaacgaagaacgatctttgtgggtttctgtccaccaattatctttgtgggtcgccgtccaccaacgattggaaaatctttcgtccacgtcgatcttttgccatccacgcaaggtattgttaaaaaaattgttgctagttttttggtggttaatttagagcgattatatattatttgtgttgaaatacacttcattttaatgaatttttcttaatttgtggtcggttttatatggtggttatggtattttctgatctagtgtggtggtggttgagaaaaataaaaattgtgtatgctctcgattatttatcgaaagattctcgatagattatcgacaaggtgttgttaaaaaaaagtttgttgttagtttttttgtggttgatttagagcgattttatattatttttgttgaaatacactttattttgatgaatttctcttaatttatggtcggttttatattgtagttatggtgttttctgatctagtgtggtggtggttgaggaaaataaaaatgatgtatgttctcgcttttttatcgaatgattcgcgataggttatcaacaatgtgtggttaaaaaaaagtttattgttagtttttttttgtggtaagatcgattatatattatttgtgttgaaatacactttattttgataaatttttcttaatttatggtcagtttaatatggtggttatggtgtttttcaatctagtgtggcggtatttgaggaaaataaaaataatgtatgttctcaattatttatcgaaagattcttgataggttatcggcaatgtgttgtttaaaaaaagtttattgatagtttttctgtggttaatttagatcgattatatattatttgtattgaaatacaattcattttgatgataatttcttttaatttatttatacttgattatcgacatattctcaa

SEQ ID NO: 212609 - DNA, 1053 bp, Cannabis indica
ctttagacttcttggccgagggaacaagctcaagctccccctactctctttttcagaacctcaatcatcttctgagacgtttctgcacagaaaaaacaatacagtcagaagcagatacttaaaatatatgcaggcataagaatcaagaaaaataagtgcaagttgaagtactctgcatgctggcacgagcgtttgcccaaacaagcacagatggagcgtcatcattcaaagaaacttcctactcctctaggatggcttttccttttccatctacaggggtaggtagctgagcaggcaagccaggctccctaattcggatagaatgttctataggcctctgctcggtcggaagggctttcttcttcttgagcggcctctcctgttctgaatattcttgagcttccttctccttctcagaatattcttcagcatactacttggctccagcatcacccttcaacttagcctcacgcttaagttgaattagctccttctcttgctcagctcccttagcttggccagacctagacttcttcttcttccccttcacacacttgggtacaaagtctaccgaataaagcttgtacttcacaaagttggcctctgagatcaactgagtgatatatcaagcagcatccggcagctcgagaattttttgggccctttccctaagtcccaatgtgaagggtggacggccgtacatagggatctattgaaatcgagtataggaagtctccatgccctccacaaggtagtactcatgaacaaaacccccaatcctgctaacctccgtgtccacggtgcccatcagccacttgtcgtccggctgagagaagtgtagaagtaccccgacctgctctgcttaaaggtaaacttcaaataaaaaagccagttgatgtcgtgtgtggacgatacaccccatccttgagtggcgtagatggcagacatggcagataagtacttgatgcccttgggagtgaacttggtcagacaaaggtggaaatagtccgcaactctcttgaaatacgggtgcaaaggctgttgggttttatg

SEQ ID NO: 212610 - DNA, 735 bp, Cannabis indica
tttaattgagaataaaaatttataaacaaaaaagtaacattcaaatttttttaacaaattttatatatatatatatcaatattttagactcccaccccaatttagaccttgaaacccgaaccctgacctgacgtaaataaaattaacaaatataaataaaaataaaaaattttatttacaaagcacacttctgttatttatttttaaaattaaaaaataaaagtggttatagaacacatttatattttttgaaaacaacattttaaaaaataaaaaattttacttttatattttttgattaaaaaatttaaataaaaaaatattaccaaatgtcacctaataaaagactaattattttcttaaaagtatttctgataaacttcaactaacacaatttaaattttatttaattaataattaaagaaaaaactatttaattaaatatttataaccatttattatctatcttaacaaccttagttctttcatatattttttcaaaagactattcaaatagttttgtatattttcaaattttaatatatttattgtgctttgctatttaattttaattaaaaaaagtaatttatttatttattttccaacgtttatttgtttattttttaattgtatatgattatgcttagaaatttctttgagattcggaatctattgagtaattcatctgtcaaagtatttgagaatacagatatgatgaatttataataaaataat

SEQ ID NO: 212611 - DNA, 982 bp, Cannabis indica
aaaaggctcaaaacaaaattgtataatgtccaaatgccattgttatgttatatttgtggaagagaacaagaaactcatgaacacatattttttcagtacacatttagtaagaattgtcttgatcagctgatgcaatggattggtattggatcaaatcaataccaaattaaaagaatacttaattggatatggagatgcatacaaagcaaggtgaggaaaggcatttatatgttggtatttaatgtttgtgtatatatgatttggaggtctaggaacaatattttttgagatgaagaggtccctacttgtaaagagatttatgcaaaatgataaacatgttgtttgtactattagaattaaattgttttagacataaagaaaatagaagacactcacaaagtgtggtttcaacatttagttgaaacttgatttgttcaatgttgtatacagggagtctatgtttaagtcaaaatctttgtacatattgttgaggatgaaatatatatgcacttattcatccaaaaaaaaaaaacttaaagtattaaactttattttgtataaacacatattttataatatcaaaccaaaattattaaaaatttaataaactaaaattttgtgaatataaaatcaatcttatttatatttataaatttatatcttaaaaaataagaaaaataattagaaatttaataaaatataaatttattttttttaaaaaaatattatgtttatttactaaaaaaattgaatttttctcatttttattttgatagttgtcaaagtttagaagttaaagttgctaatttataaagacatgtcaacatttaaacaaaataataaaataacacctaacagaaggattaaacttctgtaaatataaaagttcaagagaaattttaacaaacatgtatattttaagggactattaaaagaatcaagtaattttgaaagttttggaaacaaaattattaattattct

SEQ ID NO: 212612 - DNA, 635 bp, Cannabis indica
aaataaataatttaaagataaataacaagacaacacttatgacatgtttacttaaaaggaatgagaatgaattgtatggtattcattcccatacaattgtttactaaattttagaaattgagaaagtagtgaggtaagttcacacaaattaggaagaaaaatgttctcccctatttttatagggaatacatttctctttcctaacttaatttattttaattttaattttattaactaaaagtgaaaaaaaaaaaacaaatatgcccttaaaaatctataaacaaaaaataattacatgttttaataatgacaattttgtcaaattaaagcattccaattacctttcctagttatgtaaataaaataatatgattctagttttcttttcggatagtttagtaaatagcataataaaatattgtttccgattattttctattttaaaccaattcatttctcctgttgattattttgattccaattgcagtttaataaacgcgccattagagtttttacatggttgggctattaaagagccttagtccacgagtcgatattattgagtaatttggaaagaaaagcttttagaaatacaatgagtatatgttctctatttttctctgagcaattgttgc

SEQ ID NO: 212613 - DNA, 513 bp, Cannabis indica
gatagttggaaaccagagaagcatctctgtggtagagaagttcaaggtaaaatctaatttacatgagatattaattgtttttgttttctatttctttaatctaatctgattaaaacaatatactgtgtttggatgtagaatcttcatgattcttaaatataatctaattttcaataatatatgtatattgcatttttttttttacatttgaatatgaaattaaatatttgttacgattatgattaagggaagattttgttaatcaaaattaatcttcttttctcaaaattttgaattttgtgggttttgaaattttagctaatctgagttgaaatagaagttggattttgttttttgttgcaagaatgaagatagacaagaggatgtggcattgaaagagatggttgttcgaatatcaagagaagcacaagaacaagaatatcaaataggcgagagcagttgaactaagtcgttcaaggtacaaattttgtaatttcatattgctttttataa

SEQ ID NO: 212614 - DNA, 517 bp, Cannabis indica
ttacaaaattaagcttcctgaaccatcatccacattaggcgtccattagtagagttggatggaagttattaaatccaaataatctcaatacttcaaaataatttttaatggccaaaaaatttatatgcataatttaatatatgtcaaaattcaaaagcaacaatttcaataatttatagagatttttaaataagtcatatctcttacataatttaaaagtaaattttgtcaaatgacaaagctaaaatagtggtagtactaacaatggtgcataagtgtttcacaccatatacatatcatcttcgaactcgttacttttttttttaaagacaacatgattaataaattgattttaagataataaaaagttgactcagaaatttagattaaacttctaagtcacacttgcttgttagattggcgagaatgaaacagatgttaagtaattataagagagacaacaaatttatagtagttcactccctgaatcacggcagtaattgagctacatctactt

SEQ ID NO: 212615 - DNA, 989 bp, Cannabis indica
gttgatgtggtttctcggtttagccaaggttattatcatggggttgagattgtggatccaactaaagctacagaattatttgttttacttaaacaattcctaaataatgacaattgacaactactttgccaaaattaaaataaacatattgtttcagtactgcttccaagaaaaaaaaaaagagaaattattatatgtatacaataaataaatcatataatatgtttctcaaataataaagatgaaaaatcatgtaatgtatactttatttatttttatttatttcgctttctgccttttttattatttttgttttttttttttgttttgtatttttttagttttcgcctaataaataagcttgttgtatcgtgtcttggtaagcagtatatttcaaaagatttttttttaattatttattattatcacgataataacttgaaaataaattaaaatccaatacttattatttcttttccttttttgtttatgtgtgaaaaaagggaagaaagaaggataatggttacagtgacgggtcagaattagataataagggttaatattaagtggcttatactacaattttaaatttaggtgattaaaatttatttttagggtgtgtatcaattgagaaaaatattgatagtttttaatttttataaatattttacaaaatatgaatcaacgtaattaagctaaaaataaaatgtaaatagtgttaggaactcaatttaatattatcaaaatcaatatttacttataatttcttagagaaaaaaaaaaatagtataattaaactaaggtatttaatataaataactataataaaattacaatacaattataatattactattattattattattattatattataattgtaagacctacagttaatatatatagtatacttatatgtgttgaatacaaataccaattttttatcgtccaatttaaggagggactatatttttatttacttttat

SEQ ID NO: 212616 - DNA, 632 bp, Cannabis indica
ctttagctcagttagagagcttggaattttacttccatggacactctgagaattttagggtttcttccagaagaagtgatgttgttttcaaaattagttccattataaattgctcaaattggacataacaaagattacaataacacgttagaaagaattaaagaaatcaaaagattatatttttgtaaattgcattgctattggatatcagtgctgtctagcatgacgtcttataattggttagcgatattttttaagagttattttcttaagttatataagactcgatacttaattacacggtatgacgacgtgttaggcaacagtattattttttagcaattttctttttgtaaagaatttgtcaaaataaaaaataattgatgaaaaatgtaaactcgataatttgaagaaaatataattgcttaatttgtatattgaccaggttaaaaatacgatttttttttttattttatattttaaaacagttttttttatataattatggagtgtatttatgtataaacactataaaaaaatattttggataatagtataatgttaggtgtaatttagtttgaaaataaaaaaaaaccatgcatgaaatggatgagaatatttttagcttaaga

SEQ ID NO: 212617 - DNA, 556 bp, Cannabis indica
ttatgcttatcatgtggtcttaccaactattcaagcaaagtagagaaatctttcatcatgttttctgctcagaaaccttgatagataccaagtacgaatccaattgaatatcatttccatttctccatgatcaacctttgttgtcatattcctccatttatttgttgtacaatgtaaaatcatttactttagaaaacatttcaaaataatataaaataaaaataaagtcctacaacaaatgcaaaaacctgaaaaaggtgatgaacccggggcagatgtaaagtactatattaattaaattacaattatgttattttattcattgtgattagaacacaatgaacactatttcgtaaaaaaaaatatttattgaacaacttcattgataagcaggtttaactgttactctaagagcactctcaatgactactctactatatttttaaaaataccttatcaaaatactattttttttattttacctcacacatttatgttactatatacatcaaatataaatactctatattttcctctacatcattttaatattata

SEQ ID NO: 212618 - DNA, 989 bp, Cannabis indica
ttctataaagcatacttcataaaaaatgattgagaaaattcaggttggactttaaaattttttaggaacttcaatattgtagaagttccatatcatattaggctttttgagagatctgaaggaataacggtctgatcaggttttatgatttttataacttaaaacttgtgggttctatgtaagtacttgattggtagagtattattgaaaattgtatccaaatcagaatgaaaaatggtaaagtcatgttttttgagttttctgattttctattaaaaaaatcgtgaaaactctattgcaatgtcgtgctccccgccctcatttaagtagcagctctaactcttcagtctgtaccacaccattgccgagtcactgtgccgttgccgattcatctgaggtgaaccctttatctttctctcttagtcaacatctgaaatttgtttccttgaatgttttgttttaaagcttatcttttttttttttctctcaccttgagttttaatgttttcatattgaaagaaaaataaatctggaaaagataaatgttaaagaccaataaacctgagatttggatgctcttgatttgagcttaaatggtttttttttttctttgcttttgatctgtgcttgaatggtttttttctactcttgatctgactatgactgtgtttgtttggttcttgagctgactttgaatgttcttttcattaaatttttcttggtggacaaaataaataataaatctgagagagaaaaaaaatagtcatatgtatgaaggattggttatgcagagttatcacattcgctttgttctattactatattggtcactttgtgtaagatcaaattccttcccttttgtagcattttacttactctgctatttaacaccatgtattgtttgttttttctacttttattttgtcttcttgttacaacaaaatacaaaaggaataagtagtttgtatgacaagtaagttgtagcacat

SEQ ID NO: 212619 - DNA, 807 bp, Cannabis indica
ctttgtctctgataaatgtagttactataattttatatttgttttttattaataaattatgatttacattattaatattgtagagtgtaatagtagctcatgatgattaataattttaaattatgatttattacttttaatatgcactttaattctaggattagatcaacctaaattaattaacaaaaattctcacttatataaaggtggtttctatgaacttcccctaagataaaaagtgccatttttatatctatatatatacactgataaattagtgtccgtgtgtatgtttattaaaaagtgtaaaattatagaaatttttaacaaaaaaaaaattattgtggatagggtacaactattataaggacataaatataaatacatatttattattgaaaattaattagtactagtgtgtgttgtatatatatataaataattaattatatatataaagagtattgtgcatgtattttggtaagagacaatttatgccatactgccttctgccccactaagataccaaacaaattaattgagccaacccacaataattaatttattaattatattttgctcttttcacattttcttttcttattgtataattattttcctcttatttttgtctgtacgttcatggtctgtacctcatatttttattgcaaataaacactttattgttctcttttggtctccttttcttattagttgtttctccaaaaatgttatttaatatttttcatttttatttttaaagctactttaattataaatgaagactaaaattgcatgctttttttt

SEQ ID NO: 212620 - DNA, 749 bp, Cannabis indica
acaattgcttattaggtctaaatctaaagcagcatataaaaaataaataaaatacatcttttattatagtattctttttgtgctttttttataaaaataaaaaagtaaaatttatgggggtgggtctcaattcaatgaatatttttagttcaaacataaaatgttttgaagttaatttatatatatatatatatttatatatatatatatatatttatatctttatgtgaaaagtgacttatataatgaattaaataagaaaaccatataattattctctcctcattgttaggaaaatattacatattaaaagtgaccttagaacaattaaaatagattgagaaaaatgatataaaatttaatataattaaaaatctataatttaattaaaatagtcttttcttcattatttttttaaataattaaaacaaaagtataaacatagttcaaatagaataattaatatttttaattatttttcgtaaaaatgaataaaaagaatggaataaaatgaaatattttttctatttttaatataaattgttaaattaaaacattaataaaaacttgctattagatgtgttcatatagtttggtgttgcatgcatctaaatttatttgaattaatcacttgcaaatattggaagagtgatcaaaatgtgtttaggttttggtggaataaaataagtagtaatttataaaccaacaaaatcctaaaaatgggcctcaatcttagagagatgatggta

SEQ ID NO: 212621 - DNA, 655 bp, Cannabis indica
agagagagagagcacaaacaattaatttctgataaattaaggatgatgaaaaaccagtccaagccagtcctttgcatgaagaagataaactgccaaaattagagatccaagattaccgattcagaaataagaattttaggaaaatcatgtttttaatgtggttatattttcgttacaattagaagctatagctatgtgtagctatatatagatagtacgtaatattatttatgtttgatgactttcgtacttgtaccaaacagacttttatatacgtacaactgtttaatgcgtgaacaaaggtcagcctgcaaagagatttttgtgtgatggggtcagaaccacgagcttgctttcggcaaggaaaagataaaaatgtcagataaccaattgacacgagttttgttttatactgataaaattattattcttaaaaatattcatcaaaaaactgtgatataaaatggaaagaaaagcggggtggagatgagcttacaaactattttaactgaagggttatcaataattcaaaaaatttattaatttagtagtgtgccttaatcggcaggttgtcttcctttctctctgcctattcttctctgatggtactgtagggtcgagcagcatggtggtggcctggcgggtgggtttcact

SEQ ID NO: 212622 - DNA, 600 bp, Cannabis indica
ctttcacctgtcgaaatagcttcccaattacacgtttggatttgtacattttcttgtctggtttttccatgaagtccggatatgatttgaccctcagatggcctggaagtttagctggcacaccagttttttgaaagtccacagcggttgagaatagctttgctaactcaatgcattttttgctcttggcctttcttgattctttatcagcaaaaacagtatgtgcatttgaaatgattcccaagttgtaattgataatgtaatctacaaaatgctcttgaacttcctgcaacacagttataaattatgcactatcagttatgtcattagacataacagaaattctcaagatattaatgacattaaatggatgagatcatactaagttcagtatactatttatgtatattctgtgataaaatgagtaaatataccttgttacaccttaatgttagtctcattagtataattagttagaattgtagaagctgagttgttgaattcttagtggctttgaattaactgtcctatattcctaaggtgttaatacaagtcaagagagacttaagtaacgtttggttggatggaatgaaaacatag

SEQ ID NO: 212623 - DNA, 511 bp, Cannabis indica
aaaaaaaaatatatatattttcatgcttattaatttgttataattttgattttttttataatatccgttaatctcaaacaccacataagcatccaataatatgaagatattagaatattataaagatgaatagttaaataatcttttttaaatatgaataaaagttaataattgaataaatacctaagagtattctgttatcattaacatgttaatgtaaattaattaactttggagttacaaattgaaactcattgatcggaatgttaactatttcttttttcagtctcttcactgaagttgtaaaataaaattttatagtcatttaaaagtggtttgtactcacttgaggttgccacacttttcaaattttgaagacaaacattcattcaataggttcttaaatttaagagctaatttttttttcttattgttgcatgcattagatttttctgtagaataaataatagacacaaagagtatttaataattgataatttgataaaaaaaa

SEQ ID NO: 212624 - DNA, 598 bp, Cannabis indica
attttataaattattttcaaaaactataacctgaaaaaatttgaccaaaaaattatttaaatactaaaataaataaaggtgtatctgtagattttttcaaagatgtattgtggaattttacaaaaaaatatatatggaataaagattcaatttttatatatattaattaatatttatttggtacaaaaaaattatatttctatatttccttctacgtaaaaataaaaaataaaaaaacgcacgacgattagcgagtaatacggaagagagagaatacgcgtgttggagagagtcacgttctagggtatcgtcctacgctttagcccagccacctagacgatctgacgatgacggcgcctccccattcgcagacgacgacagtgtaagctcttccccgtttgtagacgacagcggtgcacgaactcccaatcgccagacgacggtggcgagtttcttccctctcgcaaacttcaatgacagcggtgtgaaggctcctgcgatttcaaccattgttctatgtcgttgattaaagagagtaaaagattggttcaagttgttttcgtcctgcggttcggtttcgtgtcgttaatcaaaaacg

SEQ ID NO: 212625 - DNA, 700 bp, Cannabis indica
aaatggagacttgatgattgtggtgctatcttgaagaaaatgaagcttaagctccactcttgggctaataagcacttatcctatgctagtcgaatccaattaatccaatctactttgattggattatggaattattggataagagtgtttcttttacctcaaagtgtgataaaagagattgagaaattatgctggggattcctttagggtttaaagataatcgaactagagttgatttggcaagttaagagagggtgtgccttccaaaagcttatagtggtcttggctttaaggatggaacaaagcttctttagctagattttgggacttgatgaataaaaaagacttgctttgggttaagtggattaacttggttatctcaaatggagagatttctggtcttataagttgagtatggatatgagccggtattggaggaagctttgtaggttgcgtacaactaacaacaaggttgatatcatagcagcaggtggagaggaattcaaagttgtcaatctgtatcgcatcatgttgcactaggttgcagaatcggctgctggtgcaatttggtgcggcttgaacatgcaaaaacatgcttttcagctttggcaagcagctcaatccaagttactcacgagggatatgctgtgtcgtttgaacataccaattgcgaacaaaaactgtgtggtgtgtgacaatg

SEQ ID NO: 212626 - DNA, 825 bp, Cannabis indica
acctgtaaatgtaaatgaaagcctctggtaccattccagcgatggatccccataaataaggccaaaatcgcatacttgttacaacaattgcataattgaagattgtgtatggaaacggtgagaccctaaagatagctactactcggaattgatggaaccagctcccttctccagcaagtctaagcatttcagccttctgtggccatctattcaaccattgctacataatgaaacaacagatgaaaataggagatgaattaacaaattgcaactctgggacaactaaaacttcataaacagtcaaaagataaaaagtctcacatggattcgttcacgaaatagaagaccaattaaatatggcaggaccattccaatagttgttcctaccataattataacaaaccctagaccatatccaaaaatcattccagccaaccacatagatgggccagaagggattaagaacacaggaaaaagagccagagaagcaacaagaactatggcaagaacagggcgtccaaaagcagtggcttcccattgcataattgggatgagaacctacaatgaaataaaagaaaaaagaaattaaataagtgccacatatcaaccaattctcaaggaagaaagtaaattaaatagtgccacatggctaataatgcaagctagcaatgaacaacttgacagaatcagccttaaagtgcagagcatagtttaacaaacagacagcttctgctttactatttttcactcagatagatcatttttatgcatacattcttctcattctgtggacgcaaggggcctatcaactttttctctgcttat

SEQ ID NO: 212627 - DNA, 1402 bp, Cannabis indica
atctattatactaaatcgtagaatactagaaattatttagactttatttttttaacatctgaattattcaattatttttaatttaataatattaactaaattaattacattagttaataaatgaagttgttaaagtgtatttatttttttgaaaaaatacttaaatatgaaatataattcatatatattgttaaaaaaaactgtactataaacataatattatataataataatactacatatatattagagttagtcccacattgctaatatgcggaaataaattttcatataaaagatgaatgggctactcctctcatagtcaattggttttgagatggaaccccatgcatcttatcttaaattctaacattgtatcaaagccgtttatgattcgttgtgagcccaaaatgtcgttggtccaaaaagacgagccaaactaaaaactttcgttgtttcccctttaatctccatttgggactttttggccaatgtgtgccagtttctagtgttggagtttttgacctgtttcaaaatctacaaatttcccgacgtgtacacctataaatttcctgatattttgctttttgtgattctttcaaatgtcacatttagccttgtagtctcttaaaggccgtttgttatacctacacattccaggcccgcgctaggagggtgtattaaagttagtcccacattgctaatgtgtagaaacaaattattatgtatgagatgaatgagttactcctcttgtagctaattggttttgagatggaacctcatgcattctatcccaaattctaacaacataacatcgaaaagatgctatataaatatatataggaaaaatatgttctacaacctctaaaagggtgttttggtagacttagaagagcttttaagtccaattttttccaaatcgagtgcactaattatttaggatcatctgtaaattttcaaaaaattcgaaatagtttacaatatcaaaaataaagttcaaacagttgtttactacacgtataagaaaaaatagtcacgtgtacaacaaaatatttgaaacttattttgactatttaagctattcaaaaaaatggaaaatttaatactaaccctaaataactacaatgtacacaattataaaaaaaaaataaaactaaaaagttttcttaaatgttgaattagataaagagtctactgaaatacctctttaggagtatgctatatactttctcacatatatatacacctaaaaaaattataattcaacgtaaaaaaaaaaaaaagaatatatatatatgtatatatataataggaaaattctacaatgcaccccttaaaatggacatattgatgcacccctatctgttttagcatccgaaataatttttagttcaaatttttc

SEQ ID NO: 212628 - DNA, 547 bp, Cannabis indica
agagtggtccgctgcgaatgctgtagagtgttgtagtgcatattattttctacacattaacaactatttctaataatatcacttatttaatttaatgatttaataacctaaggattacaactattatgaaaaattggttggataattctctagtgtatttaaaaagataagagtgagtcctcgaagagtatttctctaatctcaacgaatttaactaacaaaacacaaggggaagctcgttggcggtgcaagtcacatacatcaattcgggttaaacgggttaaaaagtcaatattagggatggtcaacaatcatatccttaacgccgtctcatcttgccacgtaacaaatactaaaaagccaagcaagacgtggcataatcagagagggagacgtgaatagtgttttatgacttttagtccttgtcttacataccttcccctgtcctattccctgatcgaaccatttcgattttctcacgcaaaaacaaaagaaaaaaaaaaaaaaaaaaacgtgaaacaactaccgccaaacgccgtcgtaatag

SEQ ID NO: 212629 - DNA, 406 bp, Cannabis indica
atttttatattatatggattgagattgtcatattggcttaaaaaattattaaataattgatattaaaaaaagtttagtttgacttaaatgtaggtttatataaatatatttttgatatagtataaaaatagatattttttaatttttttaattaagtagctaaattaaatatagaaattcaaatttctcttttataatttagtattggatcaaaatctaatgatttaatatttatagttaaacttatttagtaatcattaatgaataatacctatcgaactatttcatatatatttggttaaaaaaaattcttgataacaaagaacttgttggtagagccagccacacttatcagtgtaggcaaaaattaataaaataaaaaattatagatacaaataaaaatata

SEQ ID NO: 212630 - DNA, 753 bp, Cannabis indica
atttctttttctattcttttctcagattttgaaacaaatttaagatcaatagtgatacatcatcacacctgaatcaaactcaaattttgaacaaacaaaacaaaaacaaataaagaaacccaaatatgcaattgacaatgtccataaacattaaaaagattgtttaacacatcccttaaacctaaaacccagaacttgccaagaacaaaaactttatacagatcctaaatcaaaatatattacaaacaaaatacaaaggcaacaaccaaatctaaagtaaaaccccgaaactatagccttgaatgaaaaaggtaaagaaaaaatatcaattaagaccatgaccgagccaaacccacaaacccagaattaaaaactcaaacccagaaatagaacacaaaccataaatccaaatgcccaaaaattcaagctcacctgcaaacagagattttttttaacaaaggttacatatttctcaatgtaaatgtaaaaacaaatcacatttagataaccttgtcgatctgcattccagtatagtgctcctcttcgcttgtcgatcctcattcccagtacgaaactcactaaccctttcaaccccgcatgcttctgacttcgatcctgtggttactcgctggtagatctcttgagtgatgatagatttgggatttttttaattgtctaggatttggatactgagagaaaaaggaagaagaagagaggaaaataggaaaaggggaaaagagggaggttggattg

SEQ ID NO: 212631 - DNA, 1127 bp, Cannabis indica
tgatagctttaattttttctgtgcgaaatcaatattgtgaggttcaaatttggttaacgataatctgcgttaatagtttggtgcttttcattgagagcctctgtgaaaaagctcagaaaaagcctcctgacataaaagtgatggatgacaccaaagataataatcctcaagaaagaatcaatcatcgtcccggaaaagaaccattgagccctcagggatctatcgagtcatcgcatgaaaagactgcaagccctaggaagacccagtactgtggcccctggcttgacggaccttggatagacaataatcagtcacttcttaatcaggttgatgaggatggcgcctacgaaccaaccaggtacataccaattgtggaattagaaaattgccatcttaggcgtctattggaggaagtaaactggagtaatgccgagttagaacgtgaaatagctgcagtaaaggcagcgcaggaggacggtacccaaaatcaaaatgaccctgggagaagagactcatgaggcaaacctcgcggcttgcaaaccaaggggcaggggacaatctagagatatactcaaaactctcaggagatgcaacctgaggaaactgaggaaaaatttggagacacagcctgagatacgtggaacattggacgaaagtcgccaaccctctctttaggctcataagaaagaaactcgcacaaacccttatagggagaaaaaggtgaatcaaaccttgaaaggaagggcaaggttcgaccacagttacgacaagagtgacctatgagaagatctgaacttgaagaagcctgaccttcgtcaacaactcggttcaaagaaaaaggattcattccatgtgcgaatgaacgagttggagagtaagttcagaaggcatcaagtcatgaagcccagaagacaaccggggcatgatactgttggagaacttgatttggaagcctcatgatcaaagagaaaaaacggttctaaaaggctgcccaaggataagaaacccaacagttatatccctttttatgatgaatataccgagctcaatgaaactcaagaaaatatctaccttgcacatgtacaaaagtcatttttagtcgaaccaaagcctatgaaacatgcgag

SEQ ID NO: 212632 - DNA, 643 bp, Cannabis indica
caacaactacacggagcaatcaaatttgacattaaggcctctaaaaatgaggctaaatatgaagccctaatcacttgcctcatgctagcgcgtaaagtataagctgaccacctagacatatacagtgattctcaacaagtcgtaaattaagctctaggtgaatacacaactcgaggtgaaaaaatggtagcccatttgagtacgatccaagacttgctaagtcaactaaaaggctacacaataatgcagatccccatagaagggaatgcaacaataaatgaaagtccaacccaatttttacccatatgacgtggcatgtccacatgggcaagattgatgccacatggagtacagcttgtcagcaaggaggccaagtcatcatgtaaaatgtatcagtttacaaggagtccaaatacttaagcgtgacaaagagaccatgaattggccaacttaaggggtctggccgaccctattaacagcataggtcgaccaacatcaagcaaaggaaaggacaaccaacgtccttcctaacaggcacattttatgcttctgcagctttcaacgtggacaacacttctagttagaaattggacctgaaagacccacaaaaataggacataaacttcagttatttacctattct

SEQ ID NO: 212633 - DNA, 802 bp, Cannabis indica
atttttcagtaaaatttttagtgttgtagttggagtgaaaatatttttgacgccaattttagtaataatgtaacaccaaatttaatgtatcattggagatgctcttatcgcattagcaaataaaccattaatcgtcaagggaaaaaaaaaaaaataataaaataaatatatctgtatacaacatcaaacaacatatatactgtggcatgatacatggggttgcctagttcaatcttcaaactcaatgactagtccgcaaaatttgtctaataaattaaactataagaaaaggaagtataaacattatgtttataaattcactcttactctttacatggaagccaaaagggttctcatttcttctaccgatggaaagttctccgttggataaatcttggcaaccagttgcgcaaaactttcatatttgtctagaaactccttctgtaaaaattgaagaaataaagataaagaactgaatgtattaataacattagcaaaagagtacaaatttattacaagttttcttctctttactcctaaattatatgttcataacttcacaagcaagaggaaccctgtattgacaatgctatctctttcatttgtgtcattccaatactgtttttgttccataatatagagtgactcactattacagatatttatatcaaagttggataattttaaggacacagaatcagcattttatgttttttatatttatgtatataagccaagatggagacatcagtgaaagctatcattcactctctctctctctctctctcaatagaaggtttca

SEQ ID NO: 212634 - DNA, 513 bp, Cannabis indica
tgtaatatttctttgtattattattgtattccatgtatttgcttttacgattattgaattgtattctgttacctgatttgtgtaattcagagctgaaagtacttttgaaatctcttctatcttaggcatagcaattgttagattattaaaggagaattgttattggtgcaattaagtatcagattttatataatttaataaaataagcaatatcgctaactaatcatagagttttatttatgaagggtttatttagaacgtcgtattaagttgtattgtattgtattgaattagattatatattatatttttatataatactgtgctaaactttaatttatactaaaatattatatgtttatgtgtgtataaaaaataatactacgtataattttacataaaaatattgcataaaatacaatttaatatgacatttcaaacgagcccgaaaagtgctgagcaccactggtgtccgataacaatgctcttgttaaaacatacatacaatgcaat

SEQ ID NO: 212635 - DNA, 673 bp, Cannabis indica
taggaggactgtcgtcatcagagcaagagcgtggggaagagatgtatgtccttgtcgtcgtccgtcggtcggggtagcgagtcggagaggagggtttgagagagggtcgtgggttaagggtttcgacaaaggggccgggtgtaataaactgaagagtcctttgtcaagtcaatcctttatcttcggtaatttggtggagccctttgttttcaaaaattttgtaattaccgaagacaaagctccttacaataataattaaaaaatttatatcctttttagaacttcggttaaattaaaatttcaactaaaaaatgatgatacggatattaaaatagttttatcttcggatttttaatttattaaagaaaaaaccgaaaataaaagatatatttgtagtagtgcccgttgataaacggatagtattcggtggtggcccttggatccttaaacaccaattgttggcgttggaggtgcccacgagagtggacgattattctaaacttctttttgatcgtgtgaaattttgggtgcaactacaccttattcctatctcttgtatgacagaggatatgggaaaataacttggtggttttcttagttccttgaccgaagtggacttgaattctttgggtgattgtcttggaaagtttctccgggtccatgttggtattga

SEQ ID NO: 212636 - DNA, 758 bp, Cannabis indica
gcagtgcaatgtagttattcgatttgaccttgcaaaaaatgtattcgcatatattcactcagggatcgtgctagaaagcctgggtccgattatatattgatgtctgagatgtaccttattttatgggattgaatatggttcctagaaaattcgattgatattcaaaatgtttttctggcgttcaaacataatatttttaaaaaagaaaacgaatgcttaattagatttgtaatatccttgttagaaattttagagaataaagtttggtgaaaggttaatgagaatggtaagcactattcttgaacaaacaactcagtggctaactcaagtgattaggtatgttgtgtgggaggggaaagaatttcagattctcatagtatgtatataaaaaaaactattctttaacaaaccattgtttctttatctgtgtgcttgctcacccttgtttgtacattttacaggctataggagcactgcttctttggtgaagaagtatggggctaacataactattgtgggtatgtgtaccgacctttattcataatattctctatttggtaataatagaatctgtcttgttgaggcatcacccccaccctttcatgaagcttttaagaaaatttcaaggaacataaaagttaatgttctttggagttattgatgagaggccaaaagactcattgccagagtacgagaaccagctctctagcatccgatggcatctttttaaaagttgtgcattctcttgtgactacaaa

SEQ ID NO: 212637 - DNA, 526 bp, Cannabis indica
atgtcatgagtaagttcccattttgtcggttttcaacttttcttagttcaaatgacaaggaatctatcactattgaacccataaattctgggattttgaacggaaggaattggttttcgattccattaccgcacagaacgattcaaaatccattttacttcttgggatcccctgttgttaggcagggttatttgtgtccctatttttctatttttgtctatgatatatattattgaaattgtgttacaagaactattattgcagcttatattgcttgttaatctaactacaatgagttcagattatgattgcgagtaggcatttgagagtaatattgacatggaatggaaattaatcaattttttggattttatgtttcaaaaaattagtttcaaggggctggccttttgatttactgttaatttctaaatttcttcatggtatagatacaattgttccagacaatgacttgaaagtaggtgatgtttgtgcctttgttatgacaaagaacattggaataatctta

SEQ ID NO: 212638 - DNA, 890 bp, Cannabis indica
agagaaaagaagaggatctagacgctagtgtccaagatgagaaaaactagttaaaaccaattgaagaactggaagaagttgttttagatccagacaatcccaataaatgggtgtttattgggaaaaatctagatgaaaaactaaaatagcagttaacaaattgtctgaaggcaaaccaagatcaatttgccgggagccattcagatatgatagggattgaccccaaagtgattttccatcatttgaatatcgatccaaattaccctaaaaaagacaaaaaaagatgacccttagattttgagagacaaggggcagttaaggaagaagtggatgagttattaaccaatgatttcatacgcgaggccttcaactcatggatttcaaatcctattcttgtctcgaagccaaacagcacttagtgcggattgaatgcactatgagcatgcagattagattggatgaacaccgctacatacgtatgatacaaaaggtggttgtgttgataaagaattcatccttgaattctttcttattgggtaacctcacaatgatcctttgatcttagtatgggtcccgagataataaaaactacctactcctcgcttccttgtaggacaggccttcatagaataaaagtataaaatttcaagtggggtcgggccctcccacttcagaaggtgatataaagactttaaattggccaaaattccgtatgaatttgatgcctagataattatagaattccttgaagtaatctttaagaggtagtacagctccaacccttatatgctcaaagctctaagcgcctatcctagatggcttactggtactacagtcttcttctcaaatcactcgttcaggaggaaaacagctgaattcccccacaacga

SEQ ID NO: 212639 - DNA, 829 bp, Cannabis indica
attggcttccggtgtaaattgggtaaaattgtaggggttaggaagaatttcattcaaacccgttacaaactagtgctgtaaatacgggtcgggcactaaaaaatatagatttagacaggggacggcacgatcctacaaattggcacgatacgatacgaaaatatatccttaagcacgatacgacacgaaagacacgatacgtaaatacgaatagactagcccaaaaagcacgacacacgacaagcccgaaaaagcacgacacactacaagcataaaaaaacacaacacaacatattaaaaaaccttataatttaataataataataagatataaatttatcaattataaataaattaaattatattaaaacttaaatataatactaaatatcataattctataattaaaacatgaaaaaataacattatatattaatttatttataaggtgtgatataaaaatttgaatacttaaatatttaaattttaatgatgttgataatttttataattatttgtaaatattattcaaaagttatatgaatataactaaagttttaaaatatacatataatcgatagttgtaagaaaaaaatataaaaaaaagtaaagtacgaagttaagttcggatatgaaaacgggttggcttgtttaagaaatacgggacgacatgagaaaagcacgatacgaatctgagcacgacacaaaaacactgggcctacaggccgtgccgggcctaccctttaaaaacattggcacgacacggtacgacctatatttttctgtgtcacagcacgacacaatctattttttgaaaagtacaaataaa

SEQ ID NO: 212640 - DNA, 658 bp, Cannabis indica
gaaataaagagagttaggtatacttacaaaatgagtttgatcacttagtgatggcatagatggcataaataatcccaggaagatatccaaacaaagtcagcaccaaacagatccagaattcaacctgaaaatttatacataccacataatcatattagcagtatacaatttttgatcatacccattttcttgttaattataattaacaagtaattaactaataattaaagattaagggtgaatatataataaaattacttggcatccaaacttaaggaagacaccaagaggtggcaaaatgatggccaaaaggatatctatacaggtaagtgtgccctcactcggcattttccctcactttcttgggatgtatttttctcgagaaaattattaggcaaattaaggcaaaagatatcagagcgtaaaactataactgctttggtttggtttggtggtttatggacttgagcgtggtcaatatatagagaagaggtaacaatgttacacgtggctgtggttaattggttgtattagaagaatcaggtacccggttccttagcctgtaaagtttattaaattttttttttacttttagtaaatcttacttttggagggttagttatttggaattcatacagctaattctcaatgtgccacg

SEQ ID NO: 212641 - DNA, 659 bp, Cannabis indica
aattttgttcattataatcataaatatatatatataaaaaaaggtaaatgacgacataagtacttaaaattttatgtttgtaagcagcataaattcaatgtttatttttagcggtataagtactcaatgtttgtaaaactgtaattttcttccagtttcgtcagtacaaaccctgttttgaatttattaaaagaacatttagaagtaactgatactacatatttctatctagactcaatgatcaagaatttaggccttatatatgccatgtttaagacaataacagatctgtactaacaaaattagagaaaaattacagttttacaaacattgggcacttatactgttaaaaataaacattgagtttatgcggcttacaaacataaaactttaggtacttacgctgctatttaccctataaaaaattatgttaaataaaattttattttctatatatttttaattattttttctcatactacaaatttatatacatttgatataaataatttataatatttttgaaatttatattttttatcacttttttttttcctaagtaacaaattatagtttataagataactactagatttatgtggtttgttaataataaaaacataaatacaaatataaaagattttttaaaacaaaataaa

SEQ ID NO: 212642 - DNA, 602 bp, Cannabis indica
aaatagtatatagagtaatttcttaaataaaattgttgatagttaagctaatttatatatgaacccaacaaaaatctttagttctgcccactaaattttttataagatccttcatccatcatctaaattaatggcccaaagacaaaataaaagaaggagtttttataaaaatattagattttggacaaaattttataattttactgtcacacagaattttttataaaattatcgtctttttataaccgtaaaataacaaaacagttaaattaaaacaacaatgaaacaactaaaaaacaatcgtagaacaaccttaaaaacttaacacaatacacaatataaaacttattaaaatatattttaaaaaaatttcactctacagtaaaagaataagaaaattaaaaatttcaatgtacgcaaaaacgacatgtcgttaatataccgtttgtaattgtttgggagatagaaacgacatgtcgttagtccgcatgaaattgtttgtgggacaaaaacgacatgtcgttaatataccgtttgtaattctttgccgactcaaatgggaaatgacaaggggagaagaaacaacaacgtggcagaatctt

SEQ ID NO: 212643 - DNA, 848 bp, Cannabis indica
aactcatgtcagcaggattttcgaggtgaatgtcatcataagacgacctcgatcccgcatacatcattaactgctaccttccctatctcaaaactgttagatctcttttatgttttccaaattttatatgggttgtcagattaaaagtacatggatcaccactttggatatatagagtgaggattgactagttaccactttcgtcattttaaatttctaaagttcaaaatttccaaagggaaaaaaatttcccaagagagaaggaaatcctcaaatatttactaatgaatgtccaataatcataaaagaaattcttcacattctgcttcacattcgatcaagactatagctagacacaccacccctatccctcaccatagacccttcaaagccatcgaagtcgctgggttttcaagcaaatgtcgacgaactactaggacgtgctcaagattttcaagcaaggctcttacgtctcgatcaaatccccctgactatagttttcataagtaagtgtttcttacttcaaacttatatttaaatttatgtcgaagtcgctgcgtctaaagaggagattgtagatgtatagccatgatgtttagggtttgagtgggtttttattgcaaactttgttgtgtagggcagttcttaggatatgtgttttgcttgtgaagcttttaagttaattaaggcaaatttgctcagtagtttgctctgtattggtggtatatatgctttataaacactgcattttcttttgtctaggtctcttttggtgttagacagaccattttgtgatcttttgctttgtattcttgtgttcctgatcttattatcctggagtaatgttc

SEQ ID NO: 212644 - DNA, 682 bp, Cannabis indica
agcataggtggtgttgtcgtcagcagtaataataagatcatgtcttatcttcgaatttaatccacccagatacttttctttattgctgaaatccgttggcacaattctcaaagccaatgttgccaatcgatcaaaatgagttgtgtattcagtaacacgcatattctgcttctagataagctgagtaaattcattttgcacttttgaccgcttcattatagtactttgcgttgaacaattcctagaacttttcccaggtcatagtggttacatcacaagccagggacaccatgtcccacaagactagagcattttcttgaaactgaaatgtggcacaagccactctatcatttccagtgacgcccatgaaattttgaattcttgtaataagcgtcagcaactgctcagcttttattacatcaggacctcccagaaagattggaggtgcctgcttgtgaaacctttcatatagtggttcaactcggttcactgtaggaactggtcctgccaacacagtaggggcaggagctacttgcatttctggagcaggaattgcaggagcaccatgctgcctcaagcgtctgatctcttcctcttcttcgttgattctagcttgcattgctacaaacgtattttcccattcctgggcaacctatagcgggttaacatcaccttgatcgtg

SEQ ID NO: 212645 - DNA, 656 bp, Cannabis indica
gaccctaactcggacctaaacccgaacccagacctagatcaggatccaaacctggacccagacccggacccaaactcggaccaggacttagacaccgacctagacctagacccaaacccgaacccagacacaaaatccgattgtgggtctgtatccgagtctgggtcctagtccgattacaattttgggtctaggtccttgtcctattcttaggtctcgattcgcttcttgtttcggttctggtttcaagtaacgaggtatgggtggagtccaagcattgagtcccagatgccaagtcccgaggtgggtcctacgtcgaggtttgggtctagggtcgcgtcccgaattgtaatccaagttttgatatctagatcttggtacggatttgggttcgggtcctaaattcaaatactgactatgggtcaagagaaagccttaggtctagattcatatctagatcttggtttgggtttgggttcagaggtgtgtcctggtattcagttcctaggtttcaggtccaaggtcgagtcctgtgttttgagtttggggtgaagttttgggtctaggtcccggtcgggcctagttttgggtccaagtcccccatctaggtctggatccttgatctaggtcttggtccaggtccaggtttggggccc

SEQ ID NO: 212646 - DNA, 790 bp, Cannabis indica
attttcatttcaagtgcaacttctaggccaacagctaatgcttcgtattctgctacattattggtgcatatagctagaatatggaaagagtaaggtatcatgcctcctaacggtgtcacaaagacaattccagcacctggcccactacttcttgctaccccatcaaaatataattgccatgatgaagtatcaactgcgaagacttcttcgtcaggaagatcttctcgctactctatatcatctggaattgggtgtgctgctagaaaatcaaccaaagcttgtccttttattgctttttgcgggacaaagttgattttaaattctgacaacatcatggaccatttggcaagtcgtctagacaacacgggcttgggtaggatatatcttagagggtcagcttttgacactaaagtcacaggatgtgagagcaaatagtgtcgtagttttgtgacggcaaaaattaaagcaagacacactttctcgattggagagtagttttgttctgcccctactaaagttctgcttagatagtaaagagcaacttcttttccctcctcattattttgtgccagcgtggctcccaaggagtggtcgagtgaagtgatatataatatcaatagctttcctaagattggagctctcaacacttgggggtgtaacaggtactttttaatactttcaaaagcattctggcatgcctcatcccaaatgaatgggacgttctgcatcaatctcgaaaaaggttgacatttattggacaggtttgggatgaaccttcggatatatgcaa

SEQ ID NO: 212647 - DNA, 689 bp, Cannabis indica
acatggggctgggaggaacgatttgggggtgaagctgttgtgtttggcagctggtttgataatgtttgtaagggtcagcctgtggatcgtattttcaaaaacatcctaccaaaaacccgtaattgtcctgagtattccacctaccattgttaacttgtaaggcatgattaaaatatcaataatatttatattttaaatttatattaaaatttctttgtataaaatatttatataattttatttttaaatatatatcataataataatataaaattaataaagaatattatgttaagtaataggatatcccgttaaagttaacgtagaaatcaaaaaatatcattaaactaaaaattccgttagatagctacattttatatagagtatatatatctttatatataaaatggggctacctaatttaaatttaataatgttagtatggttggttttataaatatatataaatattaatattatttattttaagttaattgaacttatactaattttaaattaatttaagtatataaatattaatatattatatgtaacaatattaattatttattgttatttttaatattagaattatgttcaattttaatattttaaaattttatatttattttcttcttcaaatttttaaaaatttaaatattgctcttttagaaaaaaaaaattaataa

SEQ ID NO: 212648 - DNA, 841 bp, Cannabis indica
gagcccaaatcacaaggagcattgctattaggggtgctcgcgatgtgggtggtgcggtttaaataattttttcaaactaactcacacatgcagttttttttaatttctcgaactgcaccggcactgtgaaactaaaaaacgcaccgcaaaaaatggtgcagtacaatttttgcgatttggactatcaccaaataattaaactatcacaaatacaacaaagtttgagcaacacttatcaaaaataacataaggcttgaaaataaaaatgaaaaaaaaaaattaagtttcaacactacaataattagtgggttttgggttagacatacataaattggacctaaataaatataaaaaattagtatttttataatgtacggtgcagtgcggtttaaactgcatattaacaattcaaaaccacaaactgcacagcactgtgcggtttaaaaaaaattcaaaccgcgactgtaccgcaaagaatttcaaaccacatttttttttacggtgcaagcaatttgagcagtttaagcggtttgatgaacactcctaattactattaagaatattaacatatataaaggtgatagacactactagtgccctttaatatttctcaatcagagtcagagtattgctattaggcactattagtacctagtaccttcttgccatgtcgcgttacgattagatagtaatatttcttaaaaactattatattaaactatctgagaaccgatatttaattgaattaaaaaaaatattaacacaaaacaaaaaatactaaactcgtgtgccctttagcatttctcaatcacaagttctactcttttgttgcccattccaa

SEQ ID NO: 212649 - DNA, 710 bp, Cannabis indica
atttaacttagtatagtctcactaaaagacaaatgaataaaaggccaaaaagaccattttgccctcacatacagtaaaggcaaacataccacctaggagtattttggtcatttctaaatcctcaaattattctcgacattcccaatgtctaactaaattgccctgctattactaacatactaaaatgtgattctactggaccaacaccgcgttccaatcttaccgggcgcaaacatggaaaacgtaaaaatttatatgtggcataaataatacacccagaattcaaataaatctccatacattcataaatcacaataaataatctagtttcataattaaaccttaattatctgctaatttccatagtaaaactaagcggtctttacatagcaggtcagcatgtgcaccttcgacaatttccacggcgcccaagtgaaaatcttggttcagatccatctctacccacacaaacacgaagccaagctacttgaggcaaaaaactaagaacccaaaacaaaaatcccccagagttgcattccaattgataaaccccaaagatccatatacttgcatacacctatgaaacacaaatagccagagaaaactatccagacagttctaacctccctttcatggcgaagcatttctcagataggtccatcccaaagctaattttttttttcatagcctacttctattcaacgtgtaaa

SEQ ID NO: 212650 - DNA, 495 bp, Cannabis indica
gaaaggtctattatgacatgtgtctccaatacaatgtgtcatgtaataaaattatcataattcaaatatattttttattaatatttaatataatgagacccatttatataattactcacatttattctcttttttctttttttttctctttctctctcctctctcctatgtattatcactttttatttatcttctttatttttttttcttcttccttgattctttttcttctcatctcatttagcttagcaaaattttgatgagtaataaatcattttttgtttaggttagtataagaatagattttaagatgatacttagaaaaaaaaattttaaaaaaataatgtttaaacttgtaggtttatgttggtaaataaaataaataaataactttgagatgaaaacataaaatgagttatttttaaacagtaaaaatttcttttagtatcaaaatcataagctaagtaattttaaatgcataaatctccttatttc

SEQ ID NO: 212651 - DNA, 525 bp, Cannabis indica
gtcgagcttgatcatacaacttgatttattggctttcctactataatgtctcaccaggtcctgacaaatcataatattatgccctatgaatcttcctttaataaatcctccttgggaaggagaaattatttcaggaagaatgtctcggattctagcactcaaaagctttgttgcaatcttgtaaataacattacaacacgcaattggcctaaaatctttgacagtgttaggacattttatttttggaaccaaggtaataatagttgaattgatttctttgagaatattacctgaatccaaaaatgagattactgcttcacttatgtcatcaccaatagcctcccaattgtcttggaagaaactactagagaatccgtcaggacccggggctttgccacttggaatactaaaagctgctgccttcacttcctctgtagtgaatccccgaagcagtaattttgattgctctactgatacccctgctcctttagagattacactattctgaactttctttctattcac

SEQ ID NO: 212652 - DNA, 1826 bp, Cannabis indica
tttttatggaattccacacataaactcctatgacaactaatagaacaacttaaattgcaattaaaattcacataacaactcacatagaaactactggaccaactcaaataataaattttaaaaaaaaattaaaaaatagtgtataaagtaattttttttgagtaatttgcggtaaaatcctctcaactatcaatttacttgcaaaaaactatccaacctcatattttggtggcaaaaccctccaaagtactgttctgtttacatttttaaggtgtcgtctatccagcctcgttaagtcctaattttgcccacgtggcaatgacaggtcactaaaaaattatcctacgtgacaatattttacaaaataaaaataaaaaatttaagagtaatttgcggcaaaactccctcaactataaatttgagtaattattttttttttattttttatttttcttttctttggtttgagaccaacaaaaaagtttcacacaaattaacctctgagtcaccaactcaaggtcctaaacatctctgagattgacataactctgagggactcattacccttagcctggtcctacacgatattgaggaagcttaaaaaatggcggtggaatggccgaaagagtttttacaacaaattaaaattgcaatttcttttttactaaaccccacattttgaacaccctaaaccccatattttgacttcctttcttttcccattcgaggctcgaccactctatacaatcttctctctcgttccttttggaactctcagcagtctcaatcggctccgccacacgaattgtaaatgtatatttcattcttaatctctcttttctgctcattgttaagtgtttagtactgagttatttttggttttttggtcagagtctagccaaagctttgcccagcccagcagactcggccttcggtagtaccttcctttcacatttccatctttggtaagcactcgtactctctctttttcgattattcaccatagggtttctgaaacttctccctgaaatggcttaatccaaacccaaccagtgaccctctccctcccccaatctcaaatgcttcgccgttttcccattttcaatcgccagagtctcacaagtattagcttttctttctccaaaagctaccaaagaacccatggcttcgctctcattcgtctcctctcgtacgctcaggtgcaccgtcgtgcacctgatcctgatgacccttccaccctgatgaaggaggatggcgtatccctctgttctcgaatgtggattgagaattttcgggaacctgatcgtattgtcaataatttgacatcttatctccgccgatttgagctatgggtcctagcttaccagaaggtttgtgccgacgacatgggttcttacatgccgcggagcgccattcagaggccggccctcgaggacttattggcacttcgaaacgctgttctcgatgataggtttaggtggggagcgaggcttgagtttttcataaagtcacccaaggataagactgactaccagtctctgtccaagaggaaaatcaaggcccttttgacaacaacacaagccgctgcatttcaggataagattgttcaagaagtattgcttatgattttggagccgatttatgaagcaagattttcgcagaagtcgtttgcttttaggcctggtagaaatgcccataccgtgttaagggtgattaggaagagttttgcaggatatttgtggtatatgaagggtgatttgagcacaatcttagatgggatgaaggtggggttggtgataaatgctttaatgagggatgtaagggat

SEQ ID NO: 212653 - DNA, 614 bp, Cannabis indica
taaataaatcaattaattgagaatacaagacaatattatctcagctagtatggggaccatgggcctctataaccaagcttctaataagaagatcttgtaatttatcgagtaaatttcttaacttattaattccttctgactccactatagatttagaattgcactcttgattacatagaactctttctaccccaagtgtagatacgctatgagttattcattatttcaagcacaacaaccattgatcctctatagacagtttacattgagtagggacaaaattactattttaccctccaatgtatattatctttaaaacacttagctacttgtaaatggtattttgggaaactaatataattattgaaataagcgctctttcattaatcgcattaagccaagctctaagaaaactatcgtttcacttctaaatagttataaaagctatagatgtccatatatatgattaacactcccattcaattgcaacaccgagttcccaaggtctaggtattatgcctacgtgtaagctataacgaacaagtcaaagaactcgtgcaatacatttaagctagagcttaaccatttcaggattgagataaaatgatctatga

SEQ ID NO: 212654 - DNA, 625 bp, Cannabis indica
aatatgcggaaccttaaagaatgagagtatgcatagtgatctgctataaataaatacatatacggaatattattagcatttttttaaatgtatatgtgtctgactatgctcttctgatatgtaggacgcccagcgtaagctgaggttgtcagaccttaattgacatttatggagttacccgttgtctagtttcctattttgttacttacgtatttactaatttctaacagtgttagtagtttcccgtttatatcgagcatatatatatagttttattatttttgtttggacttttcttgctttccttaatccgttttctacttgtcttagtcttttttttttgcctctttccttatttgctattttcttccatagtgtgctaatctaattaggactattatttgtttcttcttttgttaatgtcctgtttcaagcttacattatgctatttaaaaaattctagtttcccagtggtcaacagtttagttttcagatcaattgaaatatttcggtgaatttttagttttcgttgaagtttttccctctctttcgtttttgaaacacccgcctgcactgcactattttcactttcagtataaatatttggtaattatcagtaaccact

SEQ ID NO: 212655 - DNA, 610 bp, Cannabis indica
taaataataatgtaaggaacaatatactacaaaaattttatggttgtaattattatggtgggaagccttatatttttcattgttaatatacattgacgttgtattacatgaattataacagtgaacaataaaataacacatgcattaataaataacattcaaataaaaaattatagctctttttcaatggtaccgaaatactagatgatgtgatgtatggagatgttgcaaaaaccatattattatgtatattgttgttcaattaaagtcatatttgaataaagtatattatcacatttaaatatatatatataaatatatataatattttcgtagttaagaacttaatgaatcttatcctaacaattataaaattaatattaaaaattaattttgcagaaacattgcctgttttttacaaaaaattacgaagaaattttcaaaccaaaaaatagagaatgggccgtcttaaatattttggaggccctgttctattttaaaaattgggtccctataaaaaaagtaatttataaataatattttcaaatattatcatacggttatataatttacataacaccaaaaaactaattaatttataaaaattgtt

SEQ ID NO: 212656 - DNA, 559 bp, Cannabis indica
gtcccgaactcaaaccacggccccagactcagacccggacctaaacccgacttaaaaacaatcaaaacataaaaataaaaatggaagttatatgacacattttattttttaattgttttttattttcaaaattaaaaaatttatagaacacttttttattttttaaaagcaaaattttaaaatatcacaaattttatttttatttttataattaataaattaaaatatacaaatattaccaaacaccacaatttctttatttattagaaaaagaaaaaagttggagatatatatgtaggaaagaatacaaaataggtggggaaagtaaatagtaattgggctaaggttaagaaaggttatatggtagctggtactactgcaagccattctgacaattagaatctgaaacgtcaaattcatgtctgttaagcattcaatttcatttcaatgtcatttcatctctgactttatgaactatacttactctcaccccccttcccttccgcactcactcactctctttctttggagtttggatgtttttggcctctctctctct

SEQ ID NO: 212657 - DNA, 676 bp, Cannabis indica
aaaaaaaaaaaaaaaaaaagaaaaaatttcataatggaaaagtcttttgttgaccttcggttgtgttgttgtttagcattaatctaaataatacattatagtcgtcatcaactgattaatcatttaagtttaaccaacaagaaaagaaatttggtactttttaagtccaataacaaagaatttgctaatttatgcctatatgtagaaaacaaaaaatagaatcattaaacttggttttgtaataaaaacttccttttttcagaaaattgtaataaagactttcaatatacaatagtctactttaaaaaaaaaataaacaaataaatagatgagagtctacgagtaatttttatactttaaactagtttttttttacagaaaattcgcatagtaatttacatagcaactaataaagtaacttaaattgtaataaaattcacatagcaacccacataataattaaagcaatcatcgaagcaacctaaactgtaaatttttttttaaaaaaataaaatatgaaataattctaaaaaaaatatttatatataacttggttttgtaataaaaactttcttttaaaaaaaaaaattgtaataaaaaactttcaatataccagagtctacttttcaaaaaaacaataataaataaatgggaaaaaaacaaaaaaatacaaaaa

SEQ ID NO: 212658 - DNA, 751 bp, Cannabis indica
tgatattaattttgccagaaggcctaaagtttcattatgctttgatatttcaattcgacgcgtaaaataattaggctgaatatgaagccttgatcactggtttgaggatagctgaagcattgaaagtcaaaaatctcatatgtcatagtgactcacaactgatagtaaattaggttcttggggaataccaggctaagggctttaaaatggccaagtatctagagaaagtttggaagaacttagaaaagttcgtttatttcaaaatcgagcaaatcccaagagaacaaaactctaacaccgatgcaaattgtatagaagaggctattcaatgcctctccttcagtgtgttcttcctgcagaagcaaacgagatcatcaaggaagttcatgaaggcttttgcggggatcatgcaggtttgcagagtttattgaaaaagattattagacaagggtattattggctaaccataaacaaggacacccatgaatttttaaaaaagtgtgataagtgtcagagattctcgcatatacctcgcgtaccactaacataactgagaatgatgacctcgccttacccatttgttatatgggcgattgacttgattggagcacttcgcatagggtgaggaggagccaagtacgcagtggtggctgtcgatttctttaccaaatggacagaggttgaacctctagtttctataacctgcaagaaagtcgtcaactttgatatcaaaaacattgtctacaggttt

SEQ ID NO: 212659 - DNA, 607 bp, Cannabis indica
actaatatgggtcatgacacaatatttaagacaaccaaaaaaaattatgacatgtttaataattatgcgatgttcatgtttgagtttttttacacgctaaataactatatgtaaggagcaagattccattgagtgaagagttttggttttgtaacctttgttcagacataataaagttcatctccttagacaatttaaggttgctttctcccgtgaattaagctcatgattttgattgtgtagcccaaccatgtaagttattggtgtttattttatgctttcattagttgttattgctgctggttttatgttcggttattgttcttgatcattgtgttatgtttttggtgttgtgttggttcttgtttggagtttgagactccacaaatttgtatcagagccgaggtttctctcagcaattcaagaatcgaaactattcttcaagaaactcagcaagaagatcaagaatgtccagctctaagttcgagattgacaagtttaatggtgctaatgattttggcctgtggagaattaaaatgaaggttttgttagttcatcaaggagtttcagatgcattggatacatagcagccattgatgacaagaaa

SEQ ID NO: 212660 - DNA, 662 bp, Cannabis indica
ttttttatgtgtttttgttttggtagagaagagtagttgttaatttttgagatgtaattcgtataaatatatatatgggagatatttatatgatgataattgtacgattttgatgtgggactagatctgagagtacgtgtgtggattagagaatttattggctataaatatattataatataaatattacgtcattgactacgttcttttttcaaaaagtaagtattagtactctttagtacattttaaatgtaatttatattaatattgatctaattaaatattaaattttatgtatataatttaatataataatttttaaataaaatattttttaatcaatttaataaagattaattaaaaattttgtttttttgaattttaatataaactaaatatgctttttgaatttttaacactgttaaaatttttgttaaactattaaaattattagattcaaaaacttttatttaattttaataagaaaagttaatatgaataaaatttaaattctgtagcatattaattaatacatatataataaaaattgaataaaattagacaaatctctttaaatctaataactaatctttaataaaccaattaaatgtattaatatgttatatagtaatttattacgtcattaaatatgtaagcattgc

SEQ ID NO: 212661 - DNA, 1269 bp, Cannabis indica
aaaattaaatttgacattaaaaaataattataaaattatttataaattaatgaagtaatttaattaatgatataagtgtaataaaatgatagggaaatgcttaggtagagtcacgaaaaatgtctctacatacaaacattttttttaatactaataattaattaatctcttttatattatttttatttcatttattttaatattttagtgacccctaataaagaaagttagctaatattcaacattatgtatccttaaaccacatttaccaaaaatatctttaaataacgtgttttacatgcaatttttttttttattgaaacacttctgcaatatttttgttttgatatatactgaaatttagatattaaatactatgattaacacattggacatataaaactaaggttttaaatatatttgattgtacaattaattaatcaaataatactaattttttttttaccacagttcgtgttactctattagtatggctttcaataaatattaacaactttttttttattaggggtcactaaattattcaaaaaaggaaataaaaatagtataaaataatagtttgacacataataaaaaaaaaatgtccgtatgtacatgaaaatattactaaaaattggtgaacattaatgttactaaaaatctcaattttattaaataatacatacagatattttttttcattaaaaatgtcttaagtgttagacttttatttgggcttacattaaattttattggttttattaaaacttgggttgattggatagttctttgctgtgttagcccatgttgttggtgatcaattgttaatgggcttagcatctgtgtgtaaagtctaggtgaagcagaagtgtgggcttttctagttgactgaagcctttgatgagcaggcccagcccaactagggttttgtagctaagtcccctccctaactctataaatacatattgtctcatcacaattgtataccttttgataatcagataaaataaactgcttctgatttagagatctagggaggaagacttagttgatagtattgcactatcgaattggagtaactgctgtggatcaatcagagataattgctatggatcaatcaggtacacatacctaattattatatcttattattgtgttctatgttatatacaaatagatcttgggttaattgttaatttatctaacatgtggtatcagattgcctattgtatatgatttagaacctataattagtatattaattaatat

SEQ ID NO: 212662 - DNA, 939 bp, Cannabis indica
tatatcttattgtctcaatgagataatttgaaattactttaaatgagttaagcttgattcatatgttattatttgcttactttagagaatcaggagaagttattagccatcttatgaggtacgaatttacttattaaagttttcatatatgatatgaaattaatgtatatgcaagctttttaatatgtatgctctgttttatattggagttccttttgtgctgagttgttttgtcttaaagatccttttgagttgagttgtaaatggtttgttgctccacctgctctgacttaaatctggtttcatcagccttgtttttttaataatggcttaggttgtaatttttttttttggttaatattattcaagctaatgaatttaaaaaaaaaaaaaaaaaaaaaaaaacttttactttgtttgtgtgtgatgcttatagtctcattgtggtttgagtagagagtaatccaatgcattaatgtcccgcggtgatttgagcgaagagcagccaacaaagttataatgaggtaagtaatatttttttttattcttgatgccccttttgatgagcttgctctccattttgtacttattttttagttctatgtatattcagcttagtaatgtgaatatcaatgtgcaccttataatatattctcctttttttttttgctatgtaggtgatggagatagctagcgacaccatcgagagatatgagtctgtgcaattaataaattgataaaaaaatgttacaaataaaatgccctgacatgaacaaagcacgggaagtttcagtgcacataatcgtattacttaggtaagatttcagtgtctctgaaaaaattagagattgttgtaaatttgagatgttagatttgtttatgtgaaactgaaaaaattcgtgtaacatcaatctagttataattactaatttttttttt

SEQ ID NO: 212663 - DNA, 548 bp, Cannabis indica
  modified_base (544)..(544): a, c, t, g, unknown or other
gcttgaccaatatcaagccacaaggggtaaaagccttaagaattacatacaaaggatgatggaagtagcgaccaaaacaaaggttaaagatattggtatcgtggtactaaatcaggtacacagcggaataaaaatttctgattatcatcgtatcacatcctcagaatcaccacatgtatatatattatatctgaaagtaaacagacgaaagactgatttacctcttgaagcctattaggatatcctcaagtctttttcgtatgttgtattcttaattgatctcgatatactcacaccgtatcttacaagaactagtatgggctaataggataaaatgtatacaaaattcttgttgagttctcacacatgagcaagaactattctttagtgattatggagagaagattgatcagattaatccattttaggcttaccaaaaataatacttatctattttttgtttatactagtatatttaaattaaaatcaataaatatttaatttgattaattatttaaattatttaatcatttatgaaatcatnttta

SEQ ID NO: 212664 - DNA, 869 bp, Cannabis indica
ttctttaaataacacttaaaaaccgacaagaattataatttaaatagtagtgttgggaatactaagtatttcccatagctataaaatgtgagatatacttcgtattccccagttataaactattggaattaattgtctttttattttaagaaaaaaagtccatttagtattaatgtccttggttcttcaccattggtaatagctaccctgaagatttttctttccaacggtgctaaattgatggaaaaaaacaaccacttacctttgccaacgattttcattgttgaccctgttgaacgataaaaaaaaggaagaaataaatttattattatttcattattggttttaaaataataataataaaaaaaatatcagtcaaatagacagaaaataggatctcaactccccactcccctatttttactcatcctttacgttacaggataaaaaaaaataataataattttattggaaaaaatagggtctacaaataggagaagttgagaacagaaaagggtatcgatactttgaaaaaaagagtccgaaaaaaaaaaaaaaaagaaactaaaaaaaaaaaaaataaacgatacttttttttggcaacaatcaagagaacttcaagagtaagtattcaaggaatgaactcattcctaattctcttttttcttttgatgtgtattttgttcctctcctattcctatttctctctattcatttataggatgcactcattctataaatgaaattggatgccctcatccatggaatgtcctcattccacaaaaaattggatgctctcatctattgaatgccctcattccaaaacaaaaaaattggatgctctcctccatggaatgccctcattccac

SEQ ID NO: 212665 - DNA, 1037 bp, Cannabis indica
agtagtacgtttaagagtagtctactttagtttttttttttttttaaatttttttttttcataatctaaaaacgaacaaacaaatttgtctgcctattggtatgttaggaaagtctctcgattgagtgctctgggtggttattgaaattgtcttgctgttctggctgagtgatacatggatttacaaggtttggaagatcaatgggcatcattggaattggaggaagaggatgaagttggcttagttgcttcacgtgtcgaacaagaagaactggtcattgatactcgatggtgtctcgttgggaaactccttgcgggcagagttagtgattttgatgcgtttcaaaatatgatggcgttcctatggcaaccgggcaaaggaatgtacgttaaggaactaaactctaatctatttttatttcaattttaccatgagatagacattgatagggtgatcacaggaagtccttggactttcaacaagaaacaaatcattctccatagattgaaggaaggggagaacccccgaagtgttaatcttcattttcttgatttgtgggttcatatatatgatcttgaacatggttttcagtctttgaaagtggtcacggatataggaaatctaatgggtaagtttgtggaatcggatatcaacaatttctcaggcgtatggagggaatatatgcgagttcgagtaacaattgatgtcgataaaccgctgcgaagaagaatgaaaatattccgggaggatcggagttggttttgggcaaactttaagtatgagaatctctctactttttgcttcatttgtggtatattgggtcattcggaacgtttttgtccgaagttatttcatacacctgctcatttgatccaaaagccttacgggatgttcttgaaggccaatagtaggcgtacggctgagaagatcggagccaaatggctccggtcaggagttgtaggaggaagtgccgagagaggggaggggagttcgagacccgtagctccggcgatggcagggggaggtccgacggagg

SEQ ID NO: 212666 - DNA, 817 bp, Cannabis indica
gattgttcagtatcagtttttgacattcaagattacaaatgtcaaattatgattttcatttttctctgcattttttctctcgctaatttcaggttgccagtttagctgatacagagattaatcttgcaggttaagcttgttatgaaactattacatgaatctggtcccttcaaggagggtatacatcaaaatcatcaatatatgtgagggttgactacagatgagtcagctttatttgtaacagattgtagacaacttcttttcttcatattgatagttaaaaaagcaaaatcactttaggctgtaaataattaaaacattatgtaaagttcatagtttacagtgatgtaaaaaaacccatgaattggtctcaattatggatgagaatattgatattaaagggatattccaatgttttggaaaattcgaattatatatggtgcatttcataacattttttcacgtctttttttttttttatttatttatttttaataagaagtgaaaatattttttttgtaatttttaatttttaatatgagaattaaaatcttgaaaatttttgaataaagaaaatgtcactttcaaaaaactttaagtagttttttccctttaattagagtttatttgtatttttttcatctatattttagactccgatactggactcgaagcttggcccctgaacttggaccctagtccctggaccttggacttgcactgtagacttcaaaaaattacatcttcacacataatataagaaataattactcattatcgtacaaatttactgcaccttgataataactcacataaa

SEQ ID NO: 212667 - DNA, 669 bp, Cannabis indica
ctatcacaaaactatcttttaagtataaatctacacacttagagaaaacacatcaaatctatataaaaataaatactaatttatttaataattaattaagaatgagtgtaagaatatgtactcagtaatatttttatttcttctccttagtcttgtaattgatgattgtaagagacttcttcaaagtctcaatggtatttttatttcttttgttttataatttgggggccaagtgacagactggttagcttgttttcgggtacttatattggttgtattgacaattgtttcggctggattacaaactactttgatagctaattctatttaatgaattaggaatatttcaaacataaataaataaattagtgacaaaaaataataaataaaaaataaagtattttttcttttactttgggaataaggatttgaatttgacacctcatatttgagagtaggagtacttgtaacggtctaagcatatgatagctttaaagtatataatataataaattttgttttggatgatttcacaatgcatactgatgcacctctactggtttttttttttctatattcatgtacgttatagctatttaagatatcctataaaattttgaaaaatttagaataatttacaatataaaaaataatgttcaaacagtctat

SEQ ID NO: 212668 - DNA, 553 bp, Cannabis indica
ttaaatggagattcaatgtagtaagtaaagtcaaaagaatttaataattaagacattaaatataaatcttattagtagagagatttaaaaaattaatattcttttgttaggatttaaattaataacataatttaatcattatatcaaaactaatattatattcataaatattacttttatttacaaatacatattatttttagggaatgactgtgctatctcgtctctacatgagtaagctctcattaaaataataagagtaatttgtcgcataaagacataagtttaactcctaattgtaaataaatatttaagtataatttttgacagtaataatacctaagctatattttttgaactttataggtaattaaccgttaaaatattatgttattattcccgtgtcattttcttattggtatattttaattattttttttaaaaaataaaaatttaatgacttggactaattagaaattaccacgtggtaatttacttaacacttaacagtgaggtattattactgccaaaaattaaacttaggtatttattt

SEQ ID NO: 212669 - DNA, 599 bp, Cannabis indica
ggcaggggtacacaaaacagtacaagatggttactctatcagtattctcaatgaaccttggcttaatgtagggaaatccatttgtgatgtctgaacaccctgtggaaaaactgtaggaaatctcatgtgcattgcaggtaaggcttgggattttggacataatatctaatttatttgataggcaaccaagagttaattctatccattcaacttaattcctttcttaatgatgattgttggttttggagttttgaccaacagagttggtactcagtgaaaagtgccaatcaatatttacaagatttgagagtggggtggtcaaaatataacgctactgggttttggcgcatgttgtggaacttaaagattccaccgaaggtgagtaactttatgtggagatttgtcactggtactcttcctacagtggctcagctgtacaaaagacatgtaccagtgaatccagtttgtcaattatgtaatttgtgaaaagaaactatttttcacgcgttggttggccgctcttttgcgcgtgcttgctggaacagatctagcgtatgtgttggcagctagtttgaagttagtttcttcaattggtttca

SEQ ID NO: 212670 - DNA, 529 bp, Cannabis indica
gatgtttgagaccacttatgtacgacatgagcaagccttttaacgttgtataagggtcggaggtaactgttttgagtttcaccattgttgaagctttgaaggtacaacttaaaaaggacacaaattcgaacgtgtttaagcttgttcttgggtcaagggaggttagatatgagtatatgggaccctaaggattgtttttgatgtaacaaaatgaagcttgaacgtccaaaaagaaggaccaagattttgactccattaaagacaatacaccgccaacgaaggagacaactccgatctgccaatttgggcctcttttctttggttgatcttgattattttgaggtcctaagcactgtggagagcttccccaatcgaaaggatgcgtcaagagcaaccgggaaaaagttacatcttgccggcgacaaaactgacatgaacgccgacgaccacgttctgagtagttctgaggatcttgttctttataaggaaacacattgagttactcaaggtagtaagtgtggtcttagca

SEQ ID NO: 212671 - DNA, 599 bp, Cannabis indica
caagcgtaaaataaccctaaaattagaaataaaagtcgaaaactactcgaaaatacgactcgaaacttagactaaaattagcctaacacctaaactcctacatctattctcaaatcctaaaataaattaatttttgtagaatatatatgtttttgggtgagaaaattagaagatttaaaagaaaaatggtagtttatggaaaaaatggagatttctgagccagcagtgcttttttgttgagaaatagttgaagaagaaagaagaaatgagaatttcaaattcgagaatatgattttacagacctagcttttcgataaccaaagatgtaggtcctcaatttttattcatttttctctttacttgtatcttcgggtttaattttttcctcctgcaaaaaactgaaaaaatacactatttttctagtagtaaataagaaaaaagggttaaatagacataagtaaaatatataaaagtgtttcgctactaataactctatacattttaaagaatcgtattgttactaaatttgcgacaattgaaaaagtaatttgaagcagtacctaaccggcctcttccaattttatttttatttttctttt

SEQ ID NO: 212672 - DNA, 1315 bp, Cannabis indica
cgctcacacgtctattaatgtttatatatcatagatccatgtgttatgctcacacgtctattaatgtctatatagacataaacccacgtgttatgctcgacgcgtctattttatatttaaggccttactagagtttgttttagttatagctaccgagtctaatctaattatgtattttttgatttagtatttagatttttcttgtttatcctttttgtgcattaatatataaattttgaatttaaaaaaaaaaagaaaacacataaatttgtttatatataataattaagaagaggaattagaaaaacaagttacacatgtagaaataatctgaaccacacacttaaaaaatgatatagtcctcatttaaaaatataaatatctaattaatatttaataatatatacagctaatgtatattattactaatgataaagaaattaatggattgagaagacatacatacataattacccggaatagaggaaaataaaagggtattttataaaaatatttgattttaggaaaaagtttataattttactgtgggaaaaaatttttttacaaaaatactgtctttttataaaacaaccgcaaaataacaaaatataacattaaaacaacagtagaacaacggtaaaaacttaacacagtaaacttacacaatattttgaataaaaccacagtatttttgaaaaaaattccgccctacagtaaaaaagttagaaatttcaatatatagtgtaaaaacgccaaaataaaatacatgatataaatacttgaattcaatttttggttgcataaatacttaagtttaattttaaggtattatatttttagaacttctgtaatacttaactgttaagtgtcaagttaattgtgataatttctgatttgttcaggtcattaaattttttatttaaaaattaattttaatataataataagaaaataacatgtggataatgatttcacacttaaaggttaagtacggaagtttcaaaaatataatttaagtattattatcattaaaaattaaacttagatatttatctataatcgaaagttaaattaaatatttacactgtaaattattctttatatataaatattcattcaaaattaatacttaattcggttgattaaatacttattagagctaaactaattgtttataccgtaaattattttttatattcgaaatttatgcttaattcggttgattaaacactcattattatatatatttgtaataataatccaattcatgaatgtatatgtctaacaatttttaattatgtagtataacaattaa

SEQ ID NO: 212673 - DNA, 567 bp, Cannabis indica
aaaaattttcttcctaataacattaagaggatctcggtaattatgcttatatactatctcttcattaccataaaaataatgctagctttacctatatttgacattttttattgtactccatcaaactttggaattttattggatactattggattgggcttagggaagtgtactccaactccaatattatagagtagcctccatgaaaatcaaaagatgataggcataataatgggtaagaatattaggtgtttaggttatgttgttttaaatttttcttttaatgctacgttagaagcttttttttaattaattaatatttataatttttaaagtaacgaatgagttgttttaagattagatatttcattttttttattggaaaataaaataaaaggaaaaaaattagagaaaataaataaataggtattaagcaatttataaaattagtaaaaattaaaaaaaatgaaaaaattaaggagaaaaagaaagatagtttttaagctattttagagcgtcatgttaccgtcttatacttcttctttatatatatatatatatatagta

SEQ ID NO: 212674 - DNA, 754 bp, Cannabis indica
ataatgaatactatcttagaattgggcttattcagaaagaattgggccactgaatggatccactcctcgaagcgcagatagaccaccttaatgggctgggccctcaataaggtaacgtttttacccgaaaataacaaaaagttttaatgtttctagacttgctgttttttccaatatttgtaccggtttttgtatgttgtactctttgttaactttttgttttattttttgttatttcttatcttattttctgttgttattttaatttcatataaatattacttttatgtattttcttttagttattttcgtattattttatagaaaatctaaaaatataaaaaaataaatacttaaaacgtaaaagtgtaaatttttcttaaaaaaaatagtgccttaatgtaactataccttaattatggtatcatgaacacaatgttattttctctaaagaaaaaataacagctcataaaaatatattaaaaaaaacgtaaaaacagtataattttaagcatgttgtgataattttcctaaataataacttaattttgtgccactcttaaagctggtgtcttttctaactttatcacacaatacaatctataagaattttcaaaaatattatcttttatgttttatttacaattttacagtttaaaatttttatttagaaagatatgcttataaagttttaaaattacaaaattaaactttacttagcaaaaagcaagaaaataacgagaaattaacctta

SEQ ID NO: 212675 - DNA, 582 bp, Cannabis indica
atatagtccgcgacttgccaaaatcttcatttgataattcgttctagttttattttttatttggagtaatgatactcccacagtaatataatcaaagtaattatttattgattggaagtgcaagcacatacagtaattattatgatatctacccgacactgcagtaataatctgaatcaaagagacatcttataataactagtcatgttggttttcttaatcataaaagaaaaaaggattagattactacctaattaaggaccggggtagactccaactgctatagccaacctaaagaaggatgttcaacgggctttgatattttctgacaagattataaaaggtgatataacattgctgctaatttctcaaaatataatttaaactctatttttcttaaaatattatctttattatatgtatttgagcttgaacccttgaattcaaagggaaaacaggaaaaaccccatataaatttacagaatggtattgatttcttcttatagtccaaagcaatgccataaaatgtgagcattctaagtatagggagcatatgtcattttctttctacaaaactaacca

SEQ ID NO: 212676 - DNA, 598 bp, Cannabis indica
gaaatatatacacactgatcaacaacgcaaccattgtcgctctgatttttgcattcacgtaaagaatccaccgatcatgcataatatttatctcgtcatttgtgtacgaaatggagaacttaccctgtaaaataaatgtaaatattaattaataaaaacttattatcatatgctattcaataaaaaataatattcattataatacttattaattatttcaccggttatgtcaattctagtattggatcttctactgtcatataattttcaatgaattttatgacgtagtatctacattattgtcatctcgctgttcaagacatataagagttatccattggataggtctatcaagttaccttgtcatttgattgtaaatggtgaatgatctacacaaaaagtaaagttagcatatataaatttataaatataaaacacgcttataaattgggatgtttgatatagaactcacatggatatgatgaattttaaataatctggtatgttgccattccttcgatccaagtacgccaccatgcgtacttggttagatgagtaccagcatcaagtgaaacataatattaagattacctcttct

SEQ ID NO: 212677 - DNA, 997 bp, Cannabis indica
accaagacaagcagcatgtcctatagacagacaaacaaaacatgtcgatagcgtattcatagtattatctacgaacacgttcctttttttcctcataatgtgcttgttcttggaaactcctaactttccactaatatttttaatgaagaattcttcagtaatgggaactccaccattgaaccctattgcgggttttttaccactcgttagtataattgatatatttatatataatatatatatatatatatagagagagagagagaggggtacctcttgaagcattaggcgaaaagcatcataatgttgaggatccgagtcacacaaagtcccatcaatatcaaatagaatggcttcaagaggagcaaggaaagctacagaacctttggtactgccattaaacaaacattttccaataataatcatgtgaacttaattgtattcaaacaaaatgataagagaaagagaaagagatttcaaattaatacccatcaatggatttcgattctgatgaaatggaggccctaggaggagtgaaagaagctgattttttgaggtttctaatatttgaggttcctcttgcgttttccggggaccttcatctcgcttctattagatttgccgacattgaaatctacggccgtgatgcctccacctcctccttcttgttccttaaaagccagatgcgtcgaagccaaaccgatcacgcataatccgtttgcgtgacgataaacgtactgatcgtgccttggcttcaagaaatctggggcgaaataggagatgaagttggattgaacagccgatggaggagtaagaggaaggtccccgacgttagggaggagaatattataaatatcttcttcttctgtggtttgatggtgcttcaccattgtagactctggtaaagctgactgggtttcaaactccattgtgtgaagctaggaaggaaggaagaggagagaaatgggatgctataatcaacaatcaatgtacactt

SEQ ID NO: 212678 - DNA, 1062 bp, Cannabis indica
aattagttagaattgatgcagggattgtttgggattctcagatttttggtttgtgaggggttttaaagttcaggttgcaaaataatgcacatattgaaaatgtgtttttttttaactttatcatacctttttgaaaacctctttgatcatacctattttggaaacatgtcaaaaaccagtttctagagattgatttgtgttatgtgtgcattcggtgatttttggtgtgtgggtggttttaaggttaaggttgaggtgtgttactattagtttgtgtgaaactggttttcatgttaattatcatgattgtttttgttgtttgtgtctaatgtttattttgtagtttgttttttatcagatggagagtgaatcagattctaaagtcccatccattgttgaaaagattgagcctgctacaaaggctaaagggcgaccaaaaaaaaattcacgtaaagctaaagtatgttttatgttttgtattgaaaccggtttttaataattgtatatgttttcttttttggttattacgaaactggttttaattttcttttattaggatccttctctcgaagaagaaaaatctgttgaagttggaatcaggaaatctccgcgtaaatccaaagtatgctctatatttttttgctgtttattcatttatttgtttatttttggattgaaactgattttgtgttgttttgtttaagggtgataatgttgtggaatctttgaaagctccaacaagaagatctccacggaaacttagagtatgtattaaatttcactaaatccggtttcaattttattttatgtttcattgtggtttggtatttttattgtgtttaaattttccaagtatttgttcctcgaaagttggtttttatcctttatatgtttgtttttggattttactatgttatataaaactggtttgtttgtgtgttttttatttgttctgttttgtttgtgtttatttttttaggatgataatcaagaggataaaggcgacgttgccgatcatgtttctcacaaacaccgcactaaaaagtcagtaagaaggctact

SEQ ID NO: 212679 - DNA, 566 bp, Cannabis indica
tagttgtaagaaccaaaaagtcaatcaggtatatttcttcaaattaaacttctatttgaattgtaatttcttgaattgtaactataacatgtccctttaaattacttgtctcaggatcctcctactgagaagaaaaggaagggtcgtccccccaagaagaatccagaccctgaaactgtgaagaggaacaagcggagaatgaagcaaaaggcaagagaagctagttcatcccaacaactacctaatgcccagtagtggtctttttaatacgtgttttatggtagttatgattgcttaagttttattttggtgaagtagtgttaagttgggtatggttttgttggctaaagggcctttgccttggaccttttcttttttgaagtataaaaaatgacagatgatatatcatgtgattctatttgttgtacatgatgttatggtggatgtttagacatgataaagaatatatgaattttgtttgttaaaaagtttgtttattattgatctcagaattaagcattgaaatgttgttctttgaacaagttaaataattgggaaattgtccc

SEQ ID NO: 212680 - DNA, 698 bp, Cannabis indica
aatgatttctctatctttatttaggctattaaaataatatttttgatgagagaaaaaagttagaaaggtctctcacatgtagtttgtaatgcattaaaatgatcatttttttaacaaaacaaaactaagaagaagaagaatttttgggtcgatgactcaccaaccccaattcaaaaagcttggcgcggagttagggtggagtatggaaggccacattcggagtgggacagtagagggacgaagcagaacatggtaggaaaaaatagtttttttcaatattttttttttattattttctatcagtattttagttttttcaattatttttttctttttttcatcttccctaattaatattaaatctgtaatatatattttttttaagagaacctgtaaaacatacttttttttttatcaagaaagagataatctttattaataactataaaatggttttttttctttggtaccgataaccgttcctactatcatttgatatttaactactgtcaaaaaacagaaaaaaaagagtattattggattcaaattgcaattttagtataaatttcttacctaaaaaaatacatttctaattctaagtattacaatattatattatatatatgcattatataaaagaagtgtgttttttttttattattttgtagtatttttagatgaatttttatatactaact

SEQ ID NO: 212681 - DNA, 909 bp, Cannabis indica
agtttctcttttttaaagggaaatttacatgttatactaagttttgctatatttttacaaaaatattgccgggcagtattttttacttttttactgtattttttttataagtttcatactgcagtatactgtgttaagtttcactggtgttctactgttgttttgagttgttctgctttgtattttactggtgttttataaaagcatagtatttttgaaaagattttcgtgtgacagtattttggtaaaagttaacccaaattccagtatttttgtaagttttcctttttcaacccattttataaaaaaggaagttaaagagtgtgaaaatacccgtattgacatttagaggcgattttttggtaaaaaccttaggtataaaatttatatttttttatgccgtcggttggcggttggggtaaaataagtggctttagattaaccttctaacgtcggttatttggtattaaccgatgtcataggtgcagtcgttgttcaacacgtggcacctatggcatcggcagggccggcctggggcaaaatttaaaaaataggcctttttttatataaaaatcaaagataaatattactctttatattaattattattcatcaacacttatatataatattctcgtaatatatgtgcaaaaaatataatggaagtacatgggaaacaatagtttatatcatgtttaggaatttataaccaatattgtaatacatataatatatatattatcaaatgattaaaaacctccggcggtaagtcctccatcaacactgataacttgtccattgatgtatgaagcagctggaaggcaaaggaatgccacactgacgaaatttcattggctctgcaaagacgaaggattgggggtctcttaaacactgctgagaagtctcgtc

SEQ ID NO: 212682 - DNA, 1270 bp, Cannabis indica
tcaaagttttaagtttgtaagtggtataatcccaatatttatttttagcggcataagtacccaatgtttttaaaattataatttttctctaattttgtcagtacaagctcttcttaaacaggccacatataaggtccaaattcttgatcattgggtctagatagaaacatgtagtatcagttacttccaaatgttcttttaataaagaggaaattacacttaatgtagtatttttaattgctttatgaaaaatatggcagaatcatgtttgcccactttttatggacttaagtatttttcttattattttgtggtatttattatgccatatttttgttaatactaattttaaaaattactagcctatttgtagtagtgaagataaaattactagcctatttgctctctttatataggtaaagcgatgaggggagagatctcaccgcttgagaaaatgttatatattttttgtattctgtgggtataaaaaaaaaattacagcaaactactagacactgtcttcttccttcttcatcactttctgttgactcatggcggacaacagtttgagccacttattcgagaatgctgttcaggtttctaccactgctctaaatgcagattggaccctagcgaagtagataatcaggaaccccaaggaaagttttactggggaagcttatttgtaaagaaagctcagccgcaatgttattgcaagcactctaaagagagcttgggcatcctttaagggatggagttggcgtgaggataacgagggaatcattcacttctcttttgcgactaaggaggtgttaggttttatgccctaaataaaactccatttcaatgtaatctattttattcaacatcaataaagaaacagaagtatttttcattcatttgtgtatgttttggttcactttatcaattgcttgtctatttgatttataaattcatcttaaacccttttcacatacttgatcatgtttattgtgctgtcatcacattggaaagtaaacatgactatgtgaataaagtttcctagatttatcagacacagggttttactgatatgataatctacaacaagagtttacttgtatttggagaaatactatgttctttccagaacattggttaaagtaaagctcaggttggatgcatggagtatgcatcggaagggaccgatattgaactttgacttagatttaattaaacttaccgtagaatctattcaagtcaatatcgccaagttgatcctagatcaaat

SEQ ID NO: 212683 - DNA, 710 bp, Cannabis indica
tttacatgttaagttattaacaaataaaaagtatactattgtaaaccccaaattctctttcaaattatttgtcttaatatatacaaaccacaaaaatctacttcctaaaaacaaaaaaaaaacaaaaaaaaaaaaaaagaataggcacccgatagctgaggctcctctcttaggtgccacaaccccaaagccaaagaaaaaaaaaaacgacacacacgaagctctccaagagtcgaggaaccaacacaactatgatacatgccacgacaccaatgcaaacatagaaaacgaaaaaaaaaaaaagagttgaaagacttaggtggtatgacaccaaataatacaattgcaatcccaatcaatgaataaaggttacttttaaggcctgttttttgcatttaaaaggttagtgctttaccttttaatgaaacactttataagaaatatttttgtttacttaaggcacatagttcactatacaacgattgaacaagaattgggcaatgaaaaatttaaagtgtgtcgtttattttaataaagtgtgccatttaaagcacgttgtttgtataataagatatgttgtttacttaatttatgtcatgttgtttatctaataaaatatgttgtttacctaatataagatatattggtaattatttttgtttactttatttaaggtacgaaatttatctaatttaaggcatgttgtttac

SEQ ID NO: 212684 - DNA, 558 bp, Cannabis indica
caagttcaagaactatcaaatttctaaagtgcaaacttagaaaatcacatatttaagcataaaagaggaaagagatgaagaacttactcactatttgaagctttcgagttgttcggatgacactgatcaacacttcctagagattcttcgaagaatttgagaggaaaagctttcttgctctgaaattttcaagaataaaaaatgctaaatgtgttttattatggatttctaccctatttataagctaattagtggggaagtgtaatcatttcaaaaattaaatacctcagtttccccccaaaagtaaatgttaggcattcaattacctgaagggcaaccgtcaaagcgtgctattttttgggagtaatttgaggtacaggtcagtcagcattaatggccaaatattgaagagaccctttgtcaaaatcacgttggatcaccaacagatgctcagaacacgtgccacccgttcaaataaggatccatatcaagtgaagtccacgtgtgacttcagaagtcctgctcagacttgggaggaaaatggtatcccattttttg

SEQ ID NO: 212685 - DNA, 515 bp, Cannabis indica
tgaccgggtaggacttgttcatctgcagggagtgatcgattgttgttgtggggaaccctattgaaaaggtgactctagctctcttttggttccttgggcgttcttcaggcctgtagaccaccctctcccattggtttctcagggtatggacttcctgtggataggtttgatggtcttaagacatttattggttatgggcgtcaatacccaacccttgagtgttttggttgaaatagcttcgtattaagtcaacatcttcttgagtgtggcgatcttggtcatcttggcacctcctcatatctcgagcatgatcttccaacatagattggaactctctcctttggttagcgagactttcagttagggtcgctcgagtttgagtttgctcctggtgtatagtttggaactgaccttgcatttggcctatcgtgcatctcgcaactgatccatctctgggtcaattccttcgatgtccacatgggcttcattctatggtctaaagataccagggcctt

SEQ ID NO: 212686 - DNA, 692 bp, Cannabis indica
tggtaggccctccttatcagtacagtggcttgccttgtgtgatcatcaatgcctgcttgttgagcccttaaagtttccatttccctatccctccattttataaattaacgtctccgctcgtcaaatgcaaggtttatagcgccacggagatcctcctgatcatggtgcaaagcgctattatgaccttgtatgagtccaagggctgcttggaggttttagatttcagtatcatctccaactggcctttgaacatttgtggtaaatgggacctcagtgttgggggtggactgatcggcttctgaactggtattttcagtctcttgcatgcctggtgtgatcccagccagaggggaagtcactccatggcccacagtaggtggttgcatattgacttgctcggggtttgtccctagtggtcctctcatatttccaggagtatgtacgttgggatctgtcaccatcggatcaccctgatcagcaaggcctctacgagtttgtacaaccatcctgtatgtctgttaaaacttaagacaaaaagaaaacttgggtttttgctctcaatgaaaacaccaaaatattgacctcgcttttagctaacgacagtgagtcaattaataagcgattaataatataattaaaagagagcaaaaataataaagtaaaaagaataccaggttttaaagaggttcgac

SEQ ID NO: 212687 - DNA, 1027 bp, Cannabis indica
ttttggggttattacttgtttttttattgcttggagtttgttctttatggtgtaactagcaggtctagaggttgttttgaagttttggtcgaattgagtggtctaggaggtttttgatgtttcctacactaaattggtcagctagttcagggtgacctataggaaccagttgaccggttgttccccaggaaaccccacggaaccggaattctggttggggaaccggtcctttggttggggcattttggggaaccctagtttttcccgtttttgaaatatttaaggtattgtcatgtgatccatcgatagggaaacttttagtttcaagtttaagtccctgaatagtgatttagcgtatcacgcaccagttttacgattaatgtgatttaggggcctataaatcgtcgagcagttgttccactcaggttggctggcacacctaaattcaaaaacgaggtaagattagtataatgatatgcatatgtgttcacatatttagcgtgcatgtttattaagcctgttagattacatcgatagcggtatcagtatacgtaaagttaaattggatagtgatagatgtatgtttggctcaaatactaatcaacgctatcacatcagtacgactagagtatgactagcataccgagtataggctgatattatggtcaatagtattattgtatgaacgttctacactcagtaccgtgtcggacacggggatagggttatggttgggtgtatgggcgcttgattataatccgggttattgctatgttgttattatgcttttcttactgagtctattgactcacagatattatttgcatgtgtaggtaagggcaaggctaaggttgagcagccgtgagagcgagcaggtaatgattgtacatgtcaggggtggttagggcctgggagcgtacaggtctttggggacagttggggtgtattttatatagtcgtatgggcgactaaattttggattatactctaagaaacttttataaatattttttgaaacgtcgatccc

SEQ ID NO: 212688 - DNA, 545 bp, Cannabis indica
tgactattttgccctttcttagctcttaagaaaagggaaatttgaatttctaatgcttgcgtttagtgaaaaaattttcctcaaaactcataatacccaatgtttaaaatatatgaccacttttctattatgcccaaaataccctctttatttacttcaccccctctctgctcgaagctacaccacatgggaagctcaaatttttgctttctctattctcattttttttcagctcactacactcactagcaggctagcggctactacactacaaggctcaccacataatttctctcattttttgacgagcatcatacactaactcattgggaattttttttttgtttgtgtaatcttgtttgttgttgttatatttagtttagaatgttgttttgatgcttgatctgtggattgttgctgtcattttgctattttttgtgttaaaatgtttgctgcctgtgaaaactggatttttcctgttttctacaattttttttcgtctgcctagatggggtccgatattggcccgatgggggcccgatgta

SEQ ID NO: 212689 - DNA, 794 bp, Cannabis indica
gttgattttcttagttatgaattggataagttcttttagactggaaatgagtagaatgatatataggctctggaaatgggttatttgatttgtttagattggagctggaaatgagatagtgatagtatatgtggataaaattagtttcggttccctcatttgattattaatgattaataattggactgctcatcactcaaaaaacaattagtatattttgattgttgcctttgtgggataatgtatttcttttatcctatattctagtgcacttttaagttggtttctatattatttacttgtagtggtcttcatattttatcccaaaatttgtgggactgatcctagggcttctgcactagaggcaaacgtagaggtggaggaggcagcgccattagaatcaacttcagcaggttctcaagtaagtccggttgttacacttgtgttttgggatttcttaattagccttttttttttgttctcatttctgattgggtcccattttattagagcataaacttcaaaatgatatctaaaataaaaaagaaaacaccaaaagactcttcaaacttctgcacctaaaatttgaatcgtggcaaatatatgttattatccttacaaagtaattaatcaagtagtaggctgtttagcaacattttaattaaaaaattagaaaacaaaatctgttctttttgtcatattggtgaacaaagtttatttcagcagtggagacttagtataaaaaagcacatctcaattttagtgtttattctttttatcatataataatttcc

SEQ ID NO: 212690 - DNA, 626 bp, Cannabis indica
tatagtacatcaaactctatgttttgatctaaacacatcttaatcaatttgctctactgtaatcttcagatgggctgcttgaagccactctaagcccagctcgattacctaggccactcaaactggctactctcgtgatgggcttggttgtaccaatattattatctgctggtaattttattcggttggtcgacacattgattgcaacttgggttcgatttgataggtaattatagctgtacttttgttgaaacacaataaacaataaacactcaaaatcaattttttgatagctaaactttgttgtacatctctgtgtttgcaggaatcctggtagcactcctgagtggctgggaaatgtgatagttgccactttaattgcagttgtcatgtgccttactctggtgtacctcttatcatacgttcatctttcaggttttcttccttagataaattttattcaatcattgctgatattgtcttgcttatgcctgtgtgttaagtttcatataataagtttgtgaagtaggtgttgtcaatggatccaccttcaagacattcaagtatggtttataatattgaagttgttgggttcatgtcaagtaactcctacccaaaataaaaca

SEQ ID NO: 212691 - DNA, 511 bp, Cannabis indica
gggtctctaggtcccaatctccaatccgggtcttcggtccaaatttccaactttttactttttctctgtggtaacggaattttttaaaaatactggtttttttttttctaaaaatactatttataaaagttatcaacttttacctaaaatttaatatttttgtaaaaactcctttttcgaatggcggaacaaatctaattcgagatctaaaatattcgaatgtttcgaatcagaaatgatccatcacattagagtaccaatccaatccaactaaatgaatattttcgacatgcctacttatctaaaatttctattggtgctttttatgttggggagttggtcccactctggcagcacttcgtttttctttcgataaaattttcacttggaggaaaaaaaaaaagacctaatttcaaagctaaaccaaaagcatagtaaaatggaagtctcaaaaacagtttcaatttttttttataacataaaaatgaaaaccttgcttaaagtttatttt

SEQ ID NO: 212692 - DNA, 662 bp, Cannabis indica
agatagttagattgttactatataaatatttagattttagattatagcattaattttaacaaatgatataaatatgaaatttgtatcttagagtgtaataatataaagagaaattgtaaatcaaccaaatttataggattgtaatagtaaaaaaaaaaaaattactacaatttttgtatataaatatgtaaaagaaaaaaaaatattgtataattattttgtatttgcccccccaaattaaaataaatatacaatgaattgttattacaaaattaatataagcatgtatgcccgatttaattttttttggggaccaaatatatgtgatattctcaaaactctaaaattttaactaaatgaatataagatgtcacttaaatttatttttaatttagaaaatataactgccgtttacttatttgtgtcgaattagaaaattatatgcataggaaatatatattatttaattaataataaatcttttaaaaaaaaaacaaagagaaatttatatcaattttttcaatatatgaactacatataaaagaaagttaaattataaaatatatctatatttttaaatatatattaatgaatttcatgtatatatattaattaaaagaataagaatataacagaattttatataacaataaataataaga

SEQ ID NO: 212693 - DNA, 672 bp, Cannabis indica
acagcttgggtaatggaattggttgctagcaacaagaggggttggaagaagaaatactgttttgtcaaaggtgacctatttggagcgagtgattatgtgattcctacttcatggagaaccttaagtgagtgaggagtgttgatctctttgtcatcttttatttgatacttgatttgtctgtgaatactaactatttctctttcattataggtgaggggcttactcggtgtcctcacagggggtgttggtctgaagctcgagttaacgacttgctctctattcattccaatcatagagcccataacaagcttcttgtcttagataaatcttgtgcgaaaagttgtggagaggtgcacaacgtcaagaatgtagtattttttcactcaacgttgtcaagtgcacccccatccttttgttgacccgagctttagagaaggttagtggtcccttctctttgtatttgttcatctaatagtagaagaacattttcttccaaaccgttactataagaggatgattttcaaggtttgtggagctgatgatgctgctgttaaggtaagagtaatttacttggaaagaggtctaagaagactacatgtcaagttgcaaaatctcgagttcctactaaggaacatgaagctagtggctctcagttgccaactaatggtatgg

SEQ ID NO: 212694 - DNA, 1221 bp, Cannabis indica
taattgactcgatttgattaataaaaattatctatatgaaaaattaataaagtgaattaatttaaaagataattatagtagaactatatatataaacaaattggtgatatatactttgaccatcaatatttatataaaaataatttaaattaattttgttcaaataataataatttaaaataaaaattaataatttttttattattagtattattttatttttgaaaataaaaatataataaaatattattataatatatatgaagttttaattgtatacaaacagttctatcgtaagagtatacactttacattataatgatcacatgatctaaaattaatgattaaaaaagttttcctaccggagagaacttttattaagtataccataatcttgctctataattatattttattacgtttaaccaaggctgtaattaatatttaaccctaaagaaaactaacaaaaaaattgtctaacattacatatacttatcccaactaattaatatttataaattacaactaacagtctataaaaaaaagtaacacctaacaggttaaataattgcctaattaagatttttgtcccttcaacattctaagtcgttaaaaactctttccaaactattaaaattgttagatttaaagatttctgtctaattttatttaattttgctaatgtaacgatttttcatatactaaatcatgctttgaaaactttgaactttaacatgtaccaaattgtgccccttaaatttttatccacgtcggaattattttagtaaaattggacaaaagtccttaaatccaacaatcacaataattcaggaaaaaattttaacgacctgaaaagttgaggagggagacatggtttggtacacgtcaaagtttagggtacaaaaatccaaattagcctaaataattttatatttatgaatattattattctttcttatttcaaaatttatataatattattattcttttagaataagagaaccataaatttatgttctccaatttatttaaatagttttttttgtacgaaattcatttaaaaattaatttagaaaataataatctctattattaaagttaaattcaaatttcgaaatatgttataaaataaaatacaactattattctaatttgggaaaaaaaattagatgtatcatcattttaatttggaagtgcgtttgttgttcgggatcacaatgg

SEQ ID NO: 212695 - DNA, 911 bp, Cannabis indica
agtcagtaaaaaactcaaatgtttcacattttaacctaagaaaagataattaaagatgatttaatctcattcccatataaacatctaattatttaataaaaatttaaaaatcgataccttaatagatatgttggcccaaaaaactgaaaaatcgtggcctcaacaaatgacgaagattctaattccccatgttccactgagatagacggatggagtgaataagtaagaggtccgacgacgactactttgagaggacagaggatcaacgatggcttcgaattgggtttcgacaccttccaaattcattatcattatctctttttttttttttaaaaaaaaaataaaagaataataataagtgttcgcagtgcagatggtacagatttagactattttcttaaactaaaccgtatatatagtttttgtaattttttaaaccgcaatcacaccacaagatcttaaaactgcaaaaaatcacaccgcaaaaatggagtgcaatttaggcggtttattcaatcatcattatcaaactttaaaataaaaaattaaaaaattagtctactaaagttttaacaattaaaaaaaatatttatatactaatcaagttatattgtattaatttgtctctaaaaaattatataatatatatatatcaatatgttgacaataagaagtgaagaaaaaaaaaagaaaatagagaataaataatatggatattcatttaatttaattgtagggataaatttaaaaaaaactacaaaaaataattaaaaaaaaattaacaaaaacataataataatgtaatcgtttattttaattatttttttaactttagtttttaaattttttaatttactataaataacgtttcgttaagtctattttttattattatatcttcgttattttta

SEQ ID NO: 212696 - DNA, 687 bp, Cannabis indica
attcaatttaaagaagaccaacaccccaccccaccccgcacaaccccccacaaaagacaagtgataaaatattataaaagtcataataaattacctgtaaatccaaaatattgtatgcattccctgaatcatcatagatccatggcaagtcgatatggagcacacctcaaatagtcattaattataaacatgtattaatattcaccgagtaggagtgtctttacaacaaagaaacaatttccagcactcttaccatacaatcagaattgcttgcgaagaatagtcaaagcaagagtgaccattgacctaataaagatcacgaatttagagttaccaataaacacacaaacatgtttatatatatatatataagactcatactttcacttccatacagtactatgatcaattggactgcttcccaagctaatagctgcatcaatcaccgccaaaccgaagtcagtaaaaaactcaaatgtttcacattttaacctaagaaaagataattaaagatgatttaatctcattcccatataaacatctaattatttaataaaaatttaaaatcgataccttaatagatatgttggcccaaaaaactgaaaaatcgtggcctcaacaatgacgaagattctaattccccatgttccactgagatagacggatggagtgaataagtaagacggt

SEQ ID NO: 212697 - DNA, 508 bp, Cannabis indica
gaagctaaattccctaatgtcagatttgtagatttagaaagtatatgaatgattgtgtatttatatatatatatatatgtgtgtttcgaataggtatgtgtacatgtgagcttttgtattttttctaaattttatgggtgaacaccaactgtttgataaaagtactttgtgagtttattgttccagtatgttttatatagagtttgttttgtgtaataattcttgaatctttgtttttcttctttttatttgtctgttggtttgcttagaaagtggttgacttaagaaattagagtttctttaggagaaactttgtttagtgaaaaataattgtaaattattagtgtacttttctttttgtagtgttaaatttttattattggtttataatgtctttttaataatataataaaactttcatgatgataaagtttattttgtgtgcaggtgatatagaagaaatttcattagatttgaagagaaaatattttttatttgtacactttta

SEQ ID NO: 212698 - DNA, 522 bp, Cannabis indica
ttatttcctttccatttttttttcctcattatacagttggacatttagattcatagtgtaaaattgtagtgaggagcatgatttgctaatcttgtattaagatggattaatataggacatttatttgattttgtaattttattgtgaattggtagagttttaataaatgtgtattgtgctactgtgttcatggtgagttggtttcatgtaacgtccttatttattaataaaaataccataaataaactcccatcatcaaatgtctttattcaaaaataatttttaaaattgggtgtcaatttaaaacaaaatgtcaattataaatgtcaacgttaagtaaaaaaaaaaaaaaaaaaactaaaaagacaagattcataaataggtttaacaactttaaaatagatttcagcgaaaaatggtcaagatcgcacgcagttacatgatcccacgagatacaccccatgctgtccgagctcaacttcccactgaatacctattattgtgataaattcaacacgcaag

SEQ ID NO: 212699 - DNA, 541 bp, Cannabis indica
tttttttttttaaaatgagaactgccatgaataattattttataaaaattttttaatttaaaaaatataaaaactaacatacaataaaataactgtcaatatagggataaaccgaagtttcatacggtttgaaaaagacagtataaaactgtacattaaaattataatttctatcatgtgacagtataaaagtaacaaaatacaaaaatacagtataccatgtaaaaaactcttattattattatgagtaatttgcgatataaatatttaagtttaacttctaattgtaaataaatgcttaagtttaatttttggcggtaataatacataagttatatttctggaactctgtaggtatggccggtaaatattaagtaattatccacatgtcattttttttattgatatatttaaattatttttttttaaaaaaaaataaaaactcatgacttggaccaatcaaggattgacacatgtttccctcaaaaaaaaaaaggaattgacacatgtcaatttatttaacaattaataatcaggtacc

SEQ ID NO: 212700 - DNA, 601 bp, Cannabis indica
aaaatgtacttatttttttaatttttataagcttgtgtttaaaaatttaatataccttaaatgtatacatataaattcaaattttgcattgccaacaacttgtactgttattgtattgtagtaaaaaaatagtacattcagcataatttcattttaattaaattgatatgtgtatacaatataccatgtgttatgatcattttttctttttctttttttgttagaagaagagttcatcatgtcttatgatattgggcactataattagatgtgattccaatcaataaacagccccccaaaaaaaggaattagtcagcttttcttttaatctcttaaaagaagccttattaattattagagtagactcaaattatttatatgtgaaaataaattattatatataagatgaataagttatttttctcattgtcaattggttttaagatggaacctcattcatcttatcccaaattctaatatagtatcagagccaattgtaatatattgtgagctcaaattgcgagcagtccagaaaatcgttagtgatccgttgtgagctagtgctgccgatccaaaaagatatttctgttgtctctccttt

SEQ ID NO: 212701 - DNA, 986 bp, Cannabis indica
atataatataattcacttaactaaattctaaaataaatattaatgaagattaaaatatatatatatatataataataactaatcactatattgaatagcaaaacaaatatgattcccacatcttgaaatgttcacattgaacaataaatcacaatagtatattttagggtgaactgagtaacaatgtcactagaaattattttttaaatttgagagaagagagagaaaagagaaagaagaaaaaaaaaaatgaaaatattggcaaacatctaatacacatgattataaaaaaagccaacgtcaatattgtaaattagatccaattaaaggtgccaaatgtaaatttctcactttactataggatgccacatcagactggtgttgagcacaaaataacaatactcaaacaaaattttttgagtagtgctaccgtcaatctcctattacaatctcttagtcaacttctattttcgttatatatagttacagcatcattcttgtaaattttcgaataatttacagtgttgaaaataattttcaatttttttgaacacgcgtagtaaattaaaatatcataaactctgttttaagtacggtaaactattcagaattttttaaaaatttacagaaatgatattgtaactataacgaatactcccatgaaaaaaaattaaaaaaaaattcaaatatgtgagtttgaacacataagttaactataagagattgtaattagcactcctcaaaatatttggagactttttttcatcaaccgaactatagaattggatgattttttttattcaattctaattacactaacaaaacattacatagcactggtaaaaagaaaaaactcttcaagcaaaaaacttgcaaagtaaagtattgattgggtaggcaaaagtatagtaataactaataacaacaaaattgaattaacgtacggtatgtaatgatcaaatgtttcgctctgaaaaccataaata

SEQ ID NO: 212702 - DNA, 697 bp, Cannabis indica
tatatatacgtactttttaaatttttaaaaactttttaattaggtaacttatttgataatacatatattgtaatttactatattcttaaccaaaactcacataaccaaatttgagtttgtctatgtataggttggattcgtaaatttgatagaaaagtgttttattccaaatttaggacaaatatggtgtaaatcagtttactataactaaaacgaaaaacaaaaatcaattctttattacaaccatttcaatttaaaatatataataaataataatatacttaaaaaaaatttataatattttaaatttcaatttatttatataaaatatttacataatttttttattttaatttaaagttaaataaataaatttaaaaatatctataatattttaagtattttaaatttaaattaaaatttctttatataaaatatctatataatttttatttttaaatatatataataatattataaaattaataaagaatattatgttaaataataggacattctgctaaagttaacgtagaaactaattaaaagtatcattaaactaagaattatgttatatagccatattttatatagaatagatatgaggagcttatgtcttcttttattacatatatatggctccacatttgaaaattgcaaggagggtaatctatctttttgcttattttgtaaaaac

SEQ ID NO: 212703 - DNA, 811 bp, Cannabis indica
ataggagtagatttgtacatcacttttaaaaatgtttattaaaaaatttcccaaaaaataattcttaattttacaaatataataatataaatatatataaatattaattaaattattaaaaaaactaaaaaaaaaaaacatgtcgtgactacagtgcacgacatatatgccgtgcactgtagagaaactatcaatttgctgcaaccgttgctgcctccttggatcaatcctcaccactatactatcaatttgcagtttccttgaagctgcgcttagtattgatataaaatttgtattaggattaaactttttagaaaaaatttcatgagatgtttttactctaaaacttaaaaaaaagtaaatatatatatatctaattgttgcccttttaatactttttattttccttaatttattaatttagtttagttgttgttgtaaattatctatataattttttaatatgtcaagctcatttaaaataattaatataaaaacgtagtgaaaagaagagctcatgtttgacctttaaatagaagtgcgaacatataaatttaattattcaaggtgattaatttctttctaatattattatatttcataatatttagtctaattaattatttttttttatttcaaaacgatttaataataatttaatattgtacatataaatcttctaatttaaaatgatgtaattctaataattttttttccttctaattaatctcatgaatataaatatatgcattattattcatttttctttgttcttctatctaattttattagagcatctccaaggagacac

SEQ ID NO: 212704 - DNA, 617 bp, Cannabis indica
ggtaaaaatttacaattttactgacacgcggaattttctataaaaatactgtctttttataaaacaactgtaaaacaacaaaatagaaaaactaaaacaacagttaaacaactaaaaacaaccgtggaataatagtgaaaacttaacacagtacacagtataaaaaatactcactcagtatttttgaagaaaaaaaaacacagtatttttaaaaaaaattctaccctatagatgaaaaaaaaagttagaaataaattctaaaaatatacccaaggtactatatggaaaaaacaaagtccaatttttcattcaacaaaacatagaatcaatcgataatatttacaaaatacataatctaaaataatatttgacctaaaaattaagggttaatttcacaaatacacaaaaataataaaaaaaaaacaaaaatacggttttacagaattttaaacatttttacgatttttttgattttatttacataaaatacggtctttttatattgaaattttgttaatttgttgttaatttattgttatatgtatgttattttttattatttttttgtttgttatttttgaatgttattttcattgttacttttatgttgttttctt

SEQ ID NO: 212705 - DNA, 514 bp, Cannabis indica
cttaatgattactactgatgacagaaccacctatattgatatggtggataggcactgcgagctgagggcgtagtggagtgcaccctagaatctcgagggactctgattattggcggggctcctactcctcctactgcatctagcggctcaagtccaaacaagaggttccgagggaaccagggtcgaggcaatcatcaaggtagctctgaaacccaatacacttacccagagtgcccatctgtaaaaagcaccatctaggggaatgtaaagggcagtggtgctttcagtgcggtatgccagggaattacaaaagggattgtccccaactgaagactgaagcaccgaggactacactgaaacccactccatcaagggtgttcgcgataactcaggctaatgcagaagccagcccttcagtggtaacaggtcagctctcagtcaacaactcttatttctctgtgttgttgactctggggcgactcattcctatatggcagcaagaatttttagtaaa

SEQ ID NO: 212706 - DNA, 697 bp, Cannabis indica
caatcatcaattggtcctagacacgatgagaaaatttgccaaaggagacattgtaagacctgatgccactagatttgcaactgcatttcttacactacaaagcatttatcaagtgaggcaacctttggaggctatgtttacttctaaagagttgatacagtgtccttgggcaactaaatcagattgaaaagatgcaagaaaaacaattttgaaggacaagaacttttggccaagtgtgatgtatgctattaggaccagaagtcctttagttgaagtgctaaggttagttgatggtgataaggaaccggctatgggatttctctataatgcaatggataaggcgaaggaaaagataacaaataatttgggtggagaagaaaaagattacaacgagatatgggaaatcattgatgagaaatgggaatttcaattacatcgacatttgtatgtcgctgactaccaatgtttagaaaggtgtttttgaggcgcgcctcaagctgagccgtttgaaaagtgcatcaagccatgcaccttgctgagaagaagttaggtgtacgcctcaagcggtgaggcgtaggaggcgggcgcctcaaattttgtgtgtaaaatgggctatttgagccctaaaaaaaggtccaaattggtattttaaatttggttttctgctacctaaaataagtaaaaattactcaaaata

SEQ ID NO: 212707 - DNA, 1003 bp, Cannabis indica
ttggaggcaatgttaaatgtgaggatcagacgggctgttgccacttacgcaacacagttgttatgatccttgcatccacaggcacaagatggacaaggcgtgatggaagggttgtaaaaggatgacatggaaacacagcagggtggattcttagataccagaaatgatgaataagagcatgttatggtccatgtcactgaaaaatggcaaacacaatcatataccagaaaataaaccgaaaaatgtttctcctgtcctgtacttagaaatcttaggcagaaacttcaggattcatatattatgttagtattaattaattagctatgggaattgttttgtaccaacaccggccagcaaaagccttacgaaagaagaactatacatgatttctcttgtatttggtataggagtcttaaaacgaccaatatcataattcagaaatagctaacatttgattgaaaaaaagtcaaacattctttacagtctcgatgttcttatataagatttcatggaaagaaaaaagtcaactttggaggagagttaaacttactcattgcttgagttcttcgatggccatcagatgagaagaaaaccgagggtgaaacaattgtagcaggactacatgtatagccttgtccaggaccaagcaacacaaatttctcaggtagctttattgtcttgtttgaagtacccgaatggccaacactgagctgaaaggatgagactgcagctgaagggtcttgtccccaagacttaaggagaccgcctttgcaacaatctgaaaatctttgtttgtttgggacaccagggagaaggtcaattattgtggggttcttcttgcagcaatgtggaatgtctcctttaaatttggagcagtctccttggtctgtggcttgagctcccaccatagaccatatcacttctttcttagcccatgtccagcctaaggtccatccaggactcattatgttcctgtacatttgggagttttcgattctcacca

SEQ ID NO: 212708 - DNA, 769 bp, Cannabis indica
gtataatatacttattaatttttagtgattaaataagagaacaaattagatcaacataatgaagatttctatttaccagattcttaacatgagatttgataaatttggaaccttaattttcttttttagggagactatgcaaatgagataggatttgaaaaaatatatcgtatatatatttttgatctcattctctctttatatatataaattaattaattaattaaactttttaattgatgagagaatttttttatttattaaataataataatattttaatcatatattaaaacaaaccattatttaactagctatttaataagtaaattattgaaccaaattttttcttttttttttttaaaaaaaaaacttatatgtgtgtacccacagtaatattgaacattgtgttacacgcatacatatatatcgagagagcatatgtgtcttttgattcctcgatttttaattaaaaataaattaattcataattaactatatattcatgtatttcaattaattcttaattaattgaatattcataattatccaataattatgtttagtgcatattaaaatattttacttatcatataagttctttttgcctattacttacatttacttttgtctgattgaactattcttttttttttttttttttaaagggaaatcttcattaataacataatcaaacaggattaggcatgtcaagatatatgtgttgacttgcacatgagggattaaccccaatccatatggcactaac

SEQ ID NO: 212709 - DNA, 583 bp, Cannabis indica
acgaatatggtgcatgatcttcagtcttatgcataaactgctgcaagtcctccgccttctcccagcgatcttgtcatcagcgaggcccttccatttgaccaggtactcttctctcttctttctctttacacaagcagttctttcagcaaggatttattctagttccctgttgcttcgtcgttgaatgctgatgtcttccctggtagactggttgcacgctggatcttcttgatcttcttgatacggattgaggttgctgacgtgaaggaccgggtgtatcttcatcttagaggtagttcgactttgttggatgctaggcaaactttgcagatgactggaacagggccctcatatttgcgtacgagtctgatgtccttgtccccgcagaatctcaattgttctggtcgtagtttgatcaacactaagtcacctgccttgaagtccagcgatcggtgattttgatctgcccacttcttcattcttcgtgaagttttctctaagtatgcttgggaaatctctgtgttcttcttccagtcttttgtaaaattgaaggtccccaaattctgtccgtggtattcatcca

SEQ ID NO: 212710 - DNA, 617 bp, Cannabis indica
gtaaacttttattttttgctgtagagtaagtaatttttttaaaaaatactgtagtttttttaaaaatactgtataagttttaacttgtactgtattgagttttcacggttctttcacgatttattttttagttgttctactgttgctttaattattctttttgttattttacagttgttttataaaaaaaaacagtattttcgtaaaaagaaaaatcatgtgacaataagattgtaaacttttactcaaaaaaaatcaagtatttttataaaaaccccctttaaacaaatgtataagaaccggaaccttctagtttcaaaaagtattctaatcaaatacgtaatatatattttaaaaagttggtatatgcacttttcttgccatcttttgtttaatatgccaattgtatattgttattgttattgtttgtattttctatttttttccttttcaaataatgggattaaacctcataaaatatattcatggagtaatttttaggaaaaattacatgtggacacgtttttttttcatttaaatctaataataacgttacacttttaaattattgaatataccattagttttaccattttttttcattttattccatttct

SEQ ID NO: 212711 - DNA, 818 bp, Cannabis indica
tactaattaataaatatttaataaattaaccctacttatttaaatttgaaaaaacatgcataatgatacttcattttccttccggtttgacattcactggttcgccatcgtccttcactggttccccatcatccttgtcgtccttgacaatctctgcagtattgtcgtttttttctttattcaccatctccacaaccttttcaaaataacatttcgtataatcgtgcattttctatattgcattagagattttggtgagatcgtctagactaactccaacagcatcgtttattttcttttagttgtggatcggtactgatcttcgtcttcatttttttagtacatttgacagcatcaacctcttccggtggtggaagattcaaacatgggattggagtacggttagtgtccttctccaacttcactttttaaagaggagactcggcttcctcttcagaggctacttgagactttgtaacctgttcgtgttcttcaaaagtatcgtctgatatgactattacagacatatttggttgtgtattgtaaaaaggagatttgaagtttgtttaaactctacgtgaaatcggattggtatggatttgtcaatacattttgtgtatttatagtgtgtgtgtacattgtaagactaccaaaggattacaacttttcaaaataaattaattaaataaaagatatatcattttcaaaaaaatatattaaagttcccaataaagctctttaacctcgctcttaagttttcttcctctaaaaaaaaaaaaaacctcttaagtttcacataatatattatttaattatgc

SEQ ID NO: 212712 - DNA, 451 bp, Cannabis indica
cttgagtcttgtgggtacctagcatttcttttagcttggtaaatacaataattctatttcctttatgtgtaatagccttttctaaggaattgtatggttgcttattaaattttttttcaaagtgttgttgttggccatagttatcgaaagtcaatgaaagatgaataaaattgaaggtgaaattagagagaacgaaaaaacttgtatctaagaagagattagcgtgggcgtataaatgtaaaatataacaaaataaaaaaaataaaaaagtttaaatttctcttactccatataaatgtaaatttttcagataatatggtgtatggagtaaaaatccctatattaaaatcatataggcgatgaaagtaccgaaataccttccgccattaacgtttgagcttcaattctagtgatagttttgatatgggaaatcatgctttctcactctctt

SEQ ID NO: 212713 - DNA, 937 bp, Cannabis indica
tgtgttttcttaaattgaaaatgtctttagtgaattttctctcgaatgtgtatattatatattgaagtgaataataactattttaaagtaatgaacatatatatagagaaataattgataacctatatataataggacaattttaaatttaaatctgttctaaatttttaataaactgaataattatggaaatgtgaatttaaaaattattttaattatcatttttttttttggtcaaaaattatctcaataatgtttggaatttaattttaaaaaatgtaaataatgtctaacatagtttacttatcactgaattgtctctcgaatatcccaataaacacattttacaatttataaaataatggaaatatgaatttgaaatatatttgaattttaaaattattttaattatcactttttctttattttattttattttttttcagaaattatctcactttctcgatcttaaatatatatatgaaatgggatgttgaaactctggtggtaaaggtagggtttttagccatgaaaacacctctggacttgggtcagaccccaaagtccaagctgccattaacaaataacaacaaacaaaaaaataaaacccattcaagaaaaataaaaatcaaagcttttcttttttttttctttcagattctatcatgcttcttcttcttcttcttcttcttcctttttggaggttatattatatataaatatatttatatacatttgctctgtattatattattaatttacaatttgataatgacattcttttttctattatttaccattttaccaatacattttatttattttcagtagttggtaaaaaaatacaatttttacccaaataactgaatcctttcctaacttccttctacatattaatttaattttactttttctttggatttttaatttttttttt

SEQ ID NO: 212714 - DNA, 959 bp, Cannabis indica
aataaataattaagactgtaatagtaaaaacataaagtaaatttcactagtatacccctaaaacctcctttggtaaaaaaaaaattattctaattttaaagaaaaattctgaacacttatatatataagaaaaataatactatgtgcaatataaatttcattttcggtaaatcttatatataaaattaaataagtaattaagattgtagatctttaaaaagttgttctggtaaatgataacgtatattggagatatttagaactatttataaatttttagaaaattatgaatagtttacggtgttaaaaattaagtttaaacagttaagaaaaataattgtgtgtattttgttaaaaggtcattctagtaaaaagaaaattaatctttttttttatgtattgtagctatttaggatgatttgtaaatttttagaaaaatttaaatagtttatcgttctaaaaattagatttaaacagttacataacacacgtataagaaaaataatcgcgtatgcgacaaaatatgtaaattttatttttaatattgtaaattattcaaattgttttaaaatttacaagttttcctaaatgattaaattttgactaaaaagctattatgttaaaacagttttgtgtaaatttatcaaaaaagaaaacttttttttgggctatagaagaagaaaataatgtcgttttacattgtttgggacctaataatgatcaaaacgacatgatcattgtgtcgaatatgggatatgaataagaatgcacaatatactattattttattttacgtatgtaagtaaatatttgggatttttttttttatgttgtgcttgttttaatttctggtacgtgatttttttttaaattctttgtgtctattttttatttttttatttttttgtaaaaattataaatatattgtggtgaaaataaattcaagaaattatttatat

SEQ ID NO: 212715 - DNA, 766 bp, Cannabis indica
caatataaaaaaaaaactaatcaaaaaaatcaaaacacatcaagaggatgcctagaggtgtactagccattttttcatataacttatatataggacttactgaggaatattcattaaagttacttaattcaattcaatctgcacgataccaattttataattttatgttaaaataggtatgttatattaatatataaaattaactgaataaaatccaattcagacatatttatacatatatattttaaaaagaattatgtatacaattaataatttaatagtaaaaaaataataattttaaaaattgaacacacaatatcatataaatatatttcaaaatataataaattaaataaataatttcattcttgtttacaagaaaaatataatctaaaataaaatttaacatttatttatacatattttttttttcttactttaaattttagaattttattttatttattttaatttattataaaataataataatttattttattttattgttagttatgtaaaaaaaacatattattaacttaattcgcttttaaatatttgattaaattgaatttaagttaatctacatcctaaattagattcaaaatataaattttacacttagtccatgcactataaataaaatattactaatcgaatgaacacaccattcctacttatatatatgaaatagtaattgtatatagtatatgaaatgaatgaaaatttgtgctatgtatgtatatgtacgtagggatgaagtcat

SEQ ID NO: 212716 - DNA, 993 bp, Cannabis indica
taaactctgagtttgacactctacgttgctctaaattttctaaaatttacaaatagtcctaaataactataataaaactatcgtataaataagttaaaattacaattttatttttatgagcctaatcgaaagaggatgcaccataaacattttttaataatggttaattagtatttatgttcccataatttttatatatatcaaattatatcttcagaaatttttaggtccttaaaaatttccatcgaactattgagattgttgaatttaaagacttctctccgattctatttaattttacaaatgcaatgattgtccatgtactaaattgtgcccagtgaggacatatgaccccacttaagttttactaaattgcatttttgtatagaaatttttgaataattttaattttgccccccaaaaattatctctttttatatttttgcccctataaatttatactttatatttttattgttacatgttgttcatgtttatcctcgtaataaatatatatgtatttttttccctcatatataattatttttatatctataaaatttataaacttttaccaaaaaaaattaaaaatatttgttcatatcctatttcaaagaagaaaaaaatttgttgcccccttaagataagcggctggctccgccactcttctagcctcctaaattttgatatgtattaaattgtttatatccactttaaatttttgttagtaaaattaaaattttaataattcaacaattttaataattcgatcaaaaattttaacaccttaaaaaattaaaaaatataatttaagacatatattaaaatttagaggataaaaaatcataattatctattaagaatggtaccagaaaaagtctctaattgtatttatgtaatgtttgtattaataaaataaataaagatgaaaaatgtgcttttgataatttcatcaatatgttttgatcaaaaaatgacactttctgaaatatg

SEQ ID NO: 212717 - DNA, 735 bp, Cannabis indica
tttttatttattttttatttttaatatcttactctataagtttgttatttttcatttaatatacaatttattatttatatttctaaaaatagttatttataattgagaattactccatataccaattttttaaaatttttttttatatttacggtttaggttgctctggtggtttctccagtaatttctatgtgggttactatacggattttgattgcgatttagattaccccgttagttgctataagagtttttggatggaaattccgttaaaataaaaatcaaaaaactattttgaagtgtaaaaaatagaaaaccccataaatttgttatttttcatctaatatacaatttattattcatatttctaaaaatagttatttataatttaataaatattagtttataagtttttatttttaatgtaatatataataatatataatttattattaactaattttattttaaaatttttatatataatattccataaacttttattaactcaagagaaattctaaatatattattttaaatgaactaaacaatttttttttctcaatatataaagaaaaacataaatcaaatgagattatttttatttataatacgtcttctaagtgatgcatattttttattttttataagagtctcacattatttataaactatgtgaatattatactaactctataaaaatatctaatttaaatatatatatgtatgagtgca

SEQ ID NO: 212718 - DNA, 179 bp, Cannabis indica
ttgcaaagtggggcccaatacctatccatggccgaccacttcacaaggatttgccactttattttttccattattttaatgctaattaaatctaacctaaccctaagtggtttcctataaataggtagtgatggcttaagggaaaagatgatgcatctcattccttcagttaaaatttg

SEQ ID NO: 212719 - DNA, 584 bp, Cannabis indica
gcaattttaagattggacaggtttacaacaagctcataaatggatctcggtatgagttcttgaaagcaacttggtgtaagctttcaaccccgaagtatagattcattatgtggtaagcattacataccaaccttcttacaagagataatcttgtgaaggtgtgagtgagacattgagacttataaacatatattctttaattgtccttactcttggagagtgttacaacatattaagagtgtacttaggagtctttggcctaactcttttgaggattttcggaattggcttggtttaaagagaccaaaaagactcatttttgatagtctctatgttgtgttagcatgtgcattttatgatatttagctaattaaaaattgtgtatttctgaaaaaagtgcataacatcaagttgtgtaggtaataactttaaagagaatctaaaaattaggctaaagattctattggagaaaaaattatctaatcttgatagaattattcttaaaaaatataaaagagatgtaattgttttggtggggtgttctatttgtaattcacttgatttgattaatagaaattttattt

SEQ ID NO: 212720 - DNA, 1458 bp, Cannabis indica
tattttcatcttcatggttcgctctgtacagctgaaggcttagtgcatgtggtatttttgtaaatatttgtatgtggactgtataaatgtttaatgggccggcccaaagtatttttgtaattttttttcctttttgtatttttttgttttttcccttatttttatttaaaaaaaatagaaaatttatgttaaaaaattcaattacactaatataatacatacctaacagacgaatcaaacactacaaaaaatattacttttagcaaactgtgttggtaaaagtaatttttaccagcgcatttcgtaaattgcgctggtaaaaagattaaagttttaccagcacatttacgcttttttccagcgcttttcattttgtgctgacaaaaattctaataccaattttgatttgtcaactcgttttgccaacacataagaagtaaatttctattttatcagcatgataccaaatttttgccagcacaaaaatatactagcaaaaataacatttctttagtgaaactatctcaatacatatgaattttaggaaaggaaagaaagaaagtagtatgactatgaatagtgaatatcataaataaaaaggaatagtaatcgttttgtttgggaattaaaagtaaaataaagaaaaaaactaaataattataattaccgtattattcattctagtatacttgtaattatataggggtagataatatataatttttgtcctttttttttctcaatttttggagggataattgatgaaatttgtatgtttggagagaaatgatctctcatcctatcttcctcatatcacacaaagaattcattaattatttctttatccttctccaatattaatattaataacatacatatgtatatgtatatattaaagagaaaatgaagattttcattaagtgacaaaaagtcaaaataaattacaaagactcaaatttttctaaggcatatttttcttttcaactctagatcccattctctaacaaatattgcctccacaggacaaactgattttttttttttctcaaaagatttctcatatttgtattataagttgtaattaatcatttggttttaacgccaaagtaactttaatttgatagacttaaaatcatatagtttactaagaaaaaaaaacaataatcatgcagtcaagctgcagcttctttcttcaactaaaagtaaaaaatacttttaaatagaaaatatatttatatatgttttgtttaagctcacccaatataaggtaaatatttatttggactctatattttgcaaaaagttataaatttgactctttattttattaaatgacaattcaaattttgaattttttaaaattttaaaatagtataaaatagattctaaactcattttttcgttttttttttcaatataactaactatgaaactagttttcagcacgaacagataaaa

SEQ ID NO: 212721 - DNA, 702 bp, Cannabis indica
aaaagaatatatttttgtgtataaatataaatataattggtgtaaatgaaataatcaaagatctcttcttctgtaatttcttcatcttcattcatccatggctacttgctttgctcctttgtccctctcttccgtctctggtaacaatctctcttattccttttagggttttctttacgttcatatgattgattttatttcattgattaatttgattgatttgcttttaggaagaagatctcatcttcatcccaatctcaaggttttcccaactaaagcagcaaactttagaataattcaaactaaatccaaatcaaccaaccgcaatttctctgttcgttcagaataccggtacccccaatttcgtttcttcaaaatctattttctatacccctaaattatagtcttggatttaaagaaagtttactctttttttgatttttttagggatgatgatggtaatagaggtggtggtggtggtgattttgtggctgggtttcttcttggaggtgctgtgtttggtaccttggcctatgtatttgctccacaggttcattcattcccacatttgcatatgtctattattattattattctctatttacataaattggatatgggttgtttgaatcttcaaacttactttctcttgcatgaaattgaacttttagatgatttgagtttgaattaggaaagttcaaa

SEQ ID NO: 212722 - DNA, 767 bp, Cannabis indica
attaaataaaaaaactaaaatatccacttagagctctatacgtataaccattgtatatataaatatatatatagggacacgattttgtcccgttagtctactttagggggatttattccgtgatgtacggccgccgttggatggggtttttatttgatctaagggctggggttgatctaggggcaattagggttaaaaagaatggtaactaattatgttttcgaatttaaaatttattaaatttgaaaaagttgaaactgacctccatcagtcatatcaaccgtgctccactcttctacttcattcttcactttctttctttttcatttttcattttctctttccattttccattttcatttctactagggcaaaactctcattttcattttccattttctttttattttccattttcttttttattttcagcttaggtaaaactcatattttacattttcttcacttttcatacatttcgttcttgactgtagtgtacattaatcgtcttctgccattgttggggttgttacagtcgtgggtgtcgacggtgggttatacaagtaagtttctccggttatacttttcatccatttcgttcttcactgtgggtattaaaaaaaaatctttttttgaagggaatgtggtgtttgtccattttcgtgtacttaatagtttcattttctctcaggtgtcgacgaggaggtgttgaaggtagtttctatttttgtgttgaggtatttttctctctttctctctctctctct

SEQ ID NO: 212723 - DNA, 546 bp, Cannabis indica
aaagttttataaggaaataaatgattaggtcactttcaggttacaagttatttattatttatttttatttaatttctaaattaatcacaaccatttaatagtaatccaatggcttaaaaaaatgtaaccatgatggttacaataaaaatgtaaccattgaaacctcttccatatatatatatatatttttattcacattagttttttaccactttactcttaaaattactccaatactaagcaattttaaaagttatgataatgaactcacactctattatttaatatattactaaattacttttaatattttaaatattatattaattaaaccttttgatagaaaaattataaaaaaaataaaaaaaataaactcacctaccattgcttgaagttgaccataggaattgtggcagcccagacaatcttctttagtggtcaagcaatgttgattgctgttcttggactgagaaagtctaatgagcaacattaatatatagagcattaatggagctgctgttaagtgatattgaattacgagattgg

SEQ ID NO: 212724 - DNA, 727 bp, Cannabis indica
cacttgcctatctacaccatttttgcatgtgtttagggtagaagtttttttataagtgtatctccagctaataaaaaataagtgtttaactaaccctaaggttaagtatacgcataggttaattaatgtaagagtatttatcaatcaattatattggttggtagattgagctgtaatattctcaattagttaacttctgaactagctagcttaatgatggagactaattatattattaatgtatatcgctaaaagggttattttggtagactcactctctcaattccgatattaagaaaatctttataatttaattattttttttatagttatgtatgtaatataatttaagaccacaaagtttcaaaaacttcaaaataatttatagtgttaaaaataaatttaaatattttattatacatgtgattgtttattcttatacgaatgctaagtaattatttaattgattcttattttgacactataaattatttaaaatttttctaaaaatttataagtgatctatgattatcaaaataattggactacaattaatgttctcctacataaccaaataaataaaaaatgtactaaaaaggtgtgtattgctataaatttttttcaatattaaatataaacataaataagagtactagaaatcaaatgtcaaactacataacatatatatacattaattatatattatatatatagctgatttgggata

SEQ ID NO: 212725 - DNA, 570 bp, Cannabis indica
acaagtgtgtacacgtgaacagttcaccatgatttttgaacggaggtgtgcagagcaaaacggaactagggtttaggtagtttagccgccaaaatttcagtttttgtagtaaagtgttacaaaccgtaaagttcagatgatttagccgccaattatttctttttttttttttttaaatttttaaggtgatttaaactatttggttactcatgataccttaattatctataattttttaaatgtaattttattaacagcaactacataaaataatagcatataatccaatttagacttttcttccgttagaaacacgactaaaattagaattagcgacttttgtcattccttccggaccccacacaagctatggactgatggttatttagtttaggtaaacaggttttttgcacagaaaggtttagtattgtctcaaagtatgcttagcccaaaacaacatcatccttgcaatcattttgttcatggccaaaatgtccacataacattaacatggaaaacacttggaatttaaattggatcccaaattggtgttcctagttcctaccctca

SEQ ID NO: 212726 - DNA, 560 bp, Cannabis indica
ttttttttatacaaaaaaaattatataatgacttattggattgatagcaaggacagcggctgcggttgtcctacaagctaagagcctactcaaagagggtgtgttgaagccccacgtggtggaagcaattggcataaaggaggctctgagttggattaaagacaacagatggacgaatgtggtggtggagtcggattgtttgagagtcatcagggatttacaaaagtttaaacatatggcttctccttatggccatatactttctgattgtatgactttgtgttcgggtgttgatgatgtttcttttaattttgttaagcgatctgctaataaggttgcgcatgctattgcgcgatcttctcttgttgaggctgattgtacttattctggggatgcgttacccatggattatgcatctttagttttgaatgatttgatttaataaaatttcatcattattcaaaaaaaaaacttttataaacaagctaagtataatttatttactaattacaattaatcaatactttctacttatgtccataaaaaaataataataataa

SEQ ID NO: 212727 - DNA, 505 bp, Cannabis indica
cctttttttattttatttatttagggaaacacttctaattgatcctgacttttgattgttaattttagttgatttttgctcaaagatatgatgtctatatagtttgttgttctctatgtctatcccttgaattaaacttaatttatatggtctcaattctctatatgtatgcttagttattttttacaattaaatagagccaaaaagaaaagggtgttcttaataatggggatctttttggccaataacttcttaaactagattgacttggctaatcacctattccttgtcctgcaatatttgaggattatgaaattattacattaaattatatggtgcttgactagatttctagcacaatttggttaacgatatttcataaaagttattatattaaattatatgagattcggtacttaattgtacgaatagtgatatgaaacgttagtgtgttggatagtactaatactttttagtaacgtaaatgtaaatatttttcatatct

SEQ ID NO: 212728 - DNA, 527 bp, Cannabis indica
atattaacagcacatcagtactacatcaatacttagttttcaaaatgaacaaataataaaaagacatatttactatagttgctatagttcaagggaatttttgtcgtacaaaaaagttaatagaatgtgattctacaagttttataattcaagagaaatatttagtattttaaatttaatgaacgcattttaatgcttgtactataaaatttgattacgtacgtggagcgataactagtttataataaaatcttataaaagttttattgaaaagttattggaaaattctacaatgcaccccttcaaaatggatacattgatgcacccttgtctgttttagcactcgaaataattttttagtcaaatttttctcatggtcatgtacttcatagttatttaagacatcttgcaaaattttaagaaatttggaaaagtttaacacgccgaaaactacgttcaaacagtgtgttgcacgagtaactattttattttatatgcgtgtaaaatagactgtttgaacattgttt

SEQ ID NO: 212729 - DNA, 618 bp, Cannabis indica
aatctattttttccctatttttctagtgtaacgactgaaaaaaaaccgtcgctgaaaaaaattaaaacggtaactagtactataaggaacggtttaaaaccgtaacctgtgacaaggtataggcgacggtttaaaacccgtcgcctatagtatagggcacggttcaaaccgtcgactataccctgttataagtgacaattttaaaccgtcaggaagtactcaacattagcgatagttttgaaccgttgcctattctgcccgttttacgatggtcgtataggcaacggttatagaaactgacgggaatactttagatggctgtttaaaaatgtcgggaaaaactatttttgtagtagtgccatagagccctttttctcatacataaagctccatccccaattcagagttgttgtcttagcatgcatactctgagactgaaccttaaaattatgatgaggcagctcagtttacacactggcttcttgccatggacaaagagactcaagctctcaaaagaaaaaacaaaacttggattatcaccaagttacctctaggccacaagacaattggttgcaaatgggtttacaaagtcatcaaatacaataaaagtggggctgt

SEQ ID NO: 212730 - DNA, 765 bp, Cannabis indica
tacttgtttaaaaaaaaaaaatactagctctcataacaatttttcacatgatattggcacttcaattcgataacctgttccatatactgcaccggttcactcagctatggtaatttagtaatgcatctctcttatttttttaaaaaaataagtagcatttagtttttgatattaagaatattaaattttaaaataaaataaataaatgtaatgtatttgggccctccatatttatgaattaacgcaagttgtagtaacggtgtgagagaattgtaacattaggtatttttgcctccaaaaataaatattagatatttaagtgtataaaatctgaaacattaggtatttatgccgcaatttacccattatagaattacttttttttagaaaaaattatagaattacttgtatttagcaatttttttttttgaaaaactaataataaatattaaggaatttaaccgttggagtgtaattgtcaaaaataatttggtcaatttatttttatttattttggtatattttaatacttttatttatacgtttatttctctctctctctcttcttttccatctctcacttactccctttctctcttttctttctctctttctctcaaattttacaaataatatatggtcacgtgtttactcgaatcagcttaaaaaattacaactatgatatacttttcaatgtgtacatgtcaaaattaagaagcatatattttttctctatttccagaaaataaaccatttaattactaa

SEQ ID NO: 212731 - DNA, 465 bp, Cannabis indica
ttaacaaatttattatatttggccttatatttttaattattatgtagtaaatttatcatatttaattattatatttttaaatcaagggtcattttacatcacaaccctatttttcatatataaacttagaattgggcctagagacgtgtgaaacaaagaaagaaacaaaaagcaaaaaatttcaaaaatatatttattgtatatatgtagttaagaaatttggggccctaatttttgatgagcctaaggcatcagcctggcttgtcgtagctcaggaccgggcttgtttggagtgtaaggtaactagaaatttaaaagggaaacttataaaaatattaggttttgaacaaatctttacaattttactgtcacacggtaggttttgaacaaatctttacaattttactgtcacacggtaaaaaatatatttatactgtcctgcctttttttttcttttatgctgtt

SEQ ID NO: 212732 - DNA, 522 bp, Cannabis indica
ggtccataagagtcaagccacatcgcatccatcacttctttaccatcttgttcaaccacctcctcttgcaccaaagtcagattaagagggtcttcactttattcctttggctctaccaacttgtccaccacatcaattgaaaagccattatcactagcttcaggataagtcattgccttaagtatgttaagtactacctcatatccttgaactctaagcttcaactctcctttttgaacatcaattagtgctttccatgttgccaagaagggtcttcccaagatgataggaatattgttgtctttttccatgtcaaggactataaaattagcaggaaatatgaatttatccaccttgacaaggacatcttcgattactcttggatgggctaaggaacgatcaactagatatagtgttacagttgttggttttgccgttctgagttgtagcctcttaaatactaataaaggcataaggttgatgctagccccctgatcatacaatgcatggatattctcaagc

SEQ ID NO: 212733 - DNA, 420 bp, Cannabis indica
atattaaggttatcaatataaatttttacctcccctttccctttagcaaatatataagttaatgaaatatatatatatataaatttttatatatatatatataagttaatgaaagagggagggtttcctcacaattgccatcgatcattcgtgagtagttggcaatgtattactttccttcctcatcaagagtgtaacctttgaaatgtagtgtaactaataatatttgtatatgtatgtttattcatatacatatatacgacatgactataggaggaatgagtaaaatgttcctatggtaaggacacttttgaaccattgatgatccatttaatggttatgaagagctaaggtgtaagataaaagtatagacgttagcatattatataatttgctcttaatattttaataataaaataa

SEQ ID NO: 212734 - DNA, 783 bp, Cannabis indica
tctcgattgatgtgatttctcataagtagaccgtcacacgtcccacttaatacactagcgcaagtagactgaaaaaaggggggttataccatctgtcattgcgttttatggtgatttcaataccgtcttccccccatgcggcactaaatgtgaagtgattattccaatagattcccagtacctcccggaactaccttacgtatgtcccctgacctcccagagcataaggatgcttctcatgtctcctccgggagacaccttcccaaagacactcctcttttgtataagacttagttgatttctgtaagagttggtcctctcagctccacgtgtcatccttatcgaggtctacgtattttgggcaaaatcaaggacaacaattgtaaattatataaattgtgcatttaaatttattatcatattgtttattgagatttttaaaaactaatttaaataagagcttaaaaataatataagtaaatataaaatggatatggagatttttacatggttcaggtgttaattaatcctagtccacgagtcaatgtattatgtcgaatgtcattgatgtattataatgggatcatacaagttcaagatccttaacttcttgctatattatttgtcttctgattttgtcaattaggcttttcaaacttctcaaagaagaaaacctaaaacaagttatgtgaatccccccttgcatgaagctataaaggggtatttataggctaggatctggatccaagtacacccttgacccgctagggttttcgtgcaaaa

SEQ ID NO: 212735 - DNA, 694 bp, Cannabis indica
tagaaacttaggttaagaaaacaattctcctaacccattccttatctaggcttaatgattctctacctagaatgtgagctattacatttctatctctaggaacatgaaaaagagatatattaagataataagattaggaatttacaatctttgagattaaatctgataaagtcgagcgatctttccactcatatttaattttcaaaataagctgaagacaatcaatctcaataataaaaagaggtaattttactgcaaggcaccaaatcaagacctcattcagggcttgaccttcagcatacaattaagacgctccaactcttggtgcaaaaaaattacaatattgttgttacaattcctaacataccgcccctatatactaaactttttcctcttgttgttcacaagagcatcaacattgattttataacatcctagtaatagtatagtgtattgtgaatggtctttgtccccatagcttgatgaatgattaattcattgcatttccagtaccattaagattgttacttgtgcacttatgctgagctttagaataatcctgtaacgaggtttgcaacataggtttctattctacattcaaattaaaaggttttttcattattattaaatatacattccaaattaaccaaataattccaacaaatagactaaaagttctctttcgacaggttat

SEQ ID NO: 212736 - DNA, 620 bp, Cannabis indica
cactggctgccaaatttttgtcatacgctagggcgtgtatatacgacatgtcgtttcaggtaaaatgttatttttaatgtaatttcttttgttttcttccttgtgtctcacttcggatgaaactattttcatgctttagttgggtgtgtttatgctcgagcttgctggaataggacaagtgtggatgttcgcagcgacatagatgttaacttcagcaactggttgttggtgctgcaatgctgtggaagagatggtgagttggaggaggcggctatggtcagctgggtcatttagtgtgccagaaatgactttgtttggcagcaaaaaaattagattgctgcaaatgtggttacatctgcaagaaatctacttgatcagttcaaagacggtcaaaaaagaaattcttcaaaaaagatcaagattaatgttgatgacgctttatttgagcatgaaggcaggtttggggttagttatgtagctcgtgacaaccatggccatgtggtggaagctttcaatcggggtcatttggggagtgttcaacttgaaattgctgagatggttggcataaaagaagctttaagttggattgatcgtcagtcttggggacaagtgattttgga

SEQ ID NO: 212737 - DNA, 853 bp, Cannabis indica
ctactacattttcttatatttatgaaaaaatccatttatatatttattgaaggttcatgtaaaaaccgtactataaattttaccatatatatttgatgattcattctttctttaatacacaaaaaaaaaaatatgtggatgatcattgcaactagtgctgtaaatacgagtttggctttttgacacgacacgaaatcggtatgagtccaaaaagcatgagcacgactagacacaaaaaaatatggacttaggcacgacacaacacgatggtacaaattcgcacgacacgacaccaaaaatatgtctttaagcacaacacaacacgagaagcacgatacgtaagcacgaatagactagctcgaaaagcacgacatataacaagcccgaaaacacagcaagacatattaaaaaaacttaaaatttagggcttttttcataaatgtacaacaaaaacaaaataattacaaaaaatgtgcaaaaaaaaattatttgaaaaacttatacattttgaaaatttattacataaaaccatacattttaatcattaaataatataaatcattaataattaaactaattaccataaatagaaaactgtaattaatgtttctaatattattttgtaatattttatccttatgtttattatattaatgttttaaaaattattaataataaaacatgtttattaaaattcaaaacaaagaattctgtaaaattaattaaataaataataaacagttttataaaaataaacaaattaaatatttttttattaaagaaaaaatgtttattatctattttagtatgaattattataatttaataagttttttttcaataaaatacaata

SEQ ID NO: 212738 - DNA, 854 bp, Cannabis indica
aaaaactaaatattatcttaaaaagctgatatactagagacaacaaaagccatataccatacaacaaaatatatatatatatctacaattaaaaataaaataaaataatataatattattaaaaatattatatatatcgtattaataaaattatatacagccataataattataccatacttacaaaattatacatcaattttatatataatacaataaaaattaaacacgcataatctaaaataaaatgatatacaataaaacttacaatactatacaataaaacttatataccatataacaaaaaatatataacttacaatcgaagtatatataataacaacaaataaaaataaaaatatataggatgctaataaaataataaatcatgtcaacaaaagtacaatttaaaatagaatcaaatattatttaaaaaataatataccatataacaaaaaatacatataccatttaccaaaatatatatactaacaataattgttgacctcaaaaagtgatcaaccgacagcgaggtcgtgaaaatctgatgcttgccacgtgtgtgcacaaataagaatgaaaagaaattgataacaagatttgttatagaggttcgaccccattatgatagcgggtaatgacatatttcccttttagttgtattataccaagagaattactattcagatcgctataggtgggatctactatagtacacttaggattacaatgtctgaatcgatgcctggcagaactcaagtgttggacaacctagggtgttgtacaacctaggctaggctacgcgtgttagagaaagaaggagatagagaaagtctgacacttagagagtttga

SEQ ID NO: 212739 - DNA, 836 bp, Cannabis indica
tttctgcacactcctactttcaactacaaaattagtaaacacccaacaggagaaacatcccatttagcaagagaagattattatttaacactttaagatacttaaagaccacactaattgatgcaaagcataactaataataataaatataacacaatcaacaaaataagttaaaaactaaatctaactaagcaaaccagaagaaagaataaaaacaaaatctagctaggcaatatttctaattaacgataagatgcatcttgtttttagtggcccatcaattaagaatgccaaaatcaagtcatttacaataaaaataaagaaaatcctgacaaaaaccctaattaagaatctaataaagcaccaacaatcaagcatcagaaaagtgtgaagtaggttcctaaactaaatgaacatctgtctgaatcaacctatcaatagttattagccaataatcttccaatagacattaggatataaaaaccccattcgaaacaaccaactatgatgagcatccaaaaagaagatctggatgtggccaatagacaaatcaactatggagcatatggccaatagatagatttggccgagcaatttgatccaatcaatgaaacattaacgcaccaataaagagaaaactcgactccattcgccagaaccgtattaatctttactaatctagtaaagcagtgacaaatcgtcgttattgtaaaaataaaactaatataaaatagcattaatattaaaacaaaccagaatccaatgtcaatcaacccaaaagtttaaggtaccacaagaaccacccactcaaccaagaaaatcaatgagaaattcca

SEQ ID NO: 212740 - DNA, 896 bp, Cannabis indica
gctgtcacctgcttttcgtgccatagttttggctatttctagccattttgaacctaaatttttcagtcaagcaaaaggcattcctgagtgggataatgagttagatgctcttgagaagaatcacacttggattattgttaccttgcctgatgggcatcatgctattggatgtagatgggtgtgtaagatcaaaatcaatgctgatggttctgtgggaagattcaaggaaagattggtgcccaagggttacaatcaacaagaaggtgtttattacactgatacttttgctcctgtcaccaaattggttactgtgaaacttgttcttgcccttgctgctataaagggatggcatttacaccaacttgatgtgaataatgctttcttacatggagatcttgaggaggaagtgtatatgactttaccacctaggtatagtcctaagggggagcttccactaaatgcagtttgcaaacttcaaaaatccatttatggattaaagcaagcgtcaagacaatggtttgctaagttttctagtgttctaattgaaattggatttcatcactgtgccaccgaccattttttattcatgatacacaatggagacaaattcatcattcttttgatctttgtggatgatgtaatctggggtgggaatgatcttgctgagatagaggcactcaaaaagtacataaacatcaaattctgattaaaagatcttggtaatctcaagtattttcttggcttggaagttgctaggtctcctaaagggattgctatatctcaaagacattatgctattcagctgttggaagacctaggacacttaggatgcaaaattatgagcactcctatggaagctaacataaagctaactcaagatgaaaaggataaaccag

SEQ ID NO: 212741 - DNA, 581 bp, Cannabis indica
aataatatttgtttaccgaaatatcagtataatgtttatttatggcgtctcatacacacataatcataattggagaagatgtacaataaatgacgttatgtgattttattggaagtcaatgcatgctttttcgtatgaagtatactttcttataacctacttttataagtaatagttttttttttcatgtttaggtaactcttaaatactcagagtaaatttagaatattaatgtaatacatttacttagagtaatgcaaatgtttatttatttaatttttcaatttaatttttatttatgtttattatatataattttaattaaaaattaaataattaaaaaatataaatgaaaaaaaattagttattacacaaaatactaaaaactgaaaaaaagcaaatacgagctcctatgataacgattattatgcaataactgctgtcatagggtccctatatggcgataattatttcaaaataactgtcgccataagagacctataatagtagttacagtccgctatagggtggagcagcaggggcccacgccctatgccccccacccagacccaaaagatcct

SEQ ID NO: 212742 - DNA, 538 bp, Cannabis indica
catatggatctaatatgacccgtttaacaatatgagtcatgtccgatttatatattagagattttatatataaaatctcaattagtaaaattaatagaaagattataataagagatttattatataaatgttaagtatacaatatatatatatatatactatatatattaaatataagaaaagtagaagacataaatcccaatacacatatacaacatatataatataatctgaagaagaagatatatatatacactctcttataattttgagtgtagattagtagggattaccatgatttgaataagatattatatctttgtctaaaagtttattttctctatttctaagcactagggaactctcatgaaaatagttttaagaattatcaagtcttttagggttttaacaaagtacttaatttattgatagaacttggtttatataaatgagcaccaaagacctctttttatagtgtttaggtgatcacacttagaattcagacacaccacacctcatttctcgcacataaataaat

SEQ ID NO: 212743 - DNA, 585 bp, Cannabis indica
taatgaaaatctcataattcaataatttttaattgttagctttaaaataagtattttttttggtgatgcttgttaagttgctatagttatgattttttgtaaatttttaagtattgagagtttttcaaaaatttacaagaaaaagaaaaaaaaaagtaaatatatttttaaggtgtgaagattgaaaaaataaaataaaaataaaaccaaagtaggggtttactatatcacttttcttatttatttatgtaaaatataaagacaagtaaaaataataatggtaagagtaataaataaaagaggaagatatctgacgctatgtttggtggaaaattgttactatgacgtttgtgtctgctatattgacacgtgtcagttttttggcgatcattgtttatggatttgattttgtcttaagtaagattattaagtagtgattagttcaattattagatgacaatattttaattactagatttgttggtcactttatgtgacacaacttttttgtttcttttggtggaagccagctacttattacgtgctatgtattgattaaatttagcaattcacctaagctgagct

SEQ ID NO: 212744 - DNA, 688 bp, Cannabis indica
attggctttcgtctctcacaaacataaatttctagcttaaacataatgataataataataaatattaataataagaagcttcattttgaggtgattgaataattttataattaaacctttaatttctagaataatccatatataaattatatatgtataagaagctaggtagataagtttatttaatgttaagtgtagtttgaataggaggcataatttcaaagtccaaccccttattacaaggaaatggatgatgacatatataatttaaatatatactttatttgtatttatttttttagtgaaaaacattaaggacaacaatgtgtatgagagcacttctttttcttcttcttcatatacttaatttgtatgttgtgtgttaattatttgtgatttgagagatctatgaggtttttcaatgactttattagtaagaaatctagctagttaattagccatcacaaatcgacaaattataattatctagaagaagtccaaataaattattaggtttataattataaggttagaatgtaattagttaaaaaaaatatttgacactaattagaatagggatagggacactagaaaatttacatcagcctattttttacttattaagaggcaattgcactagttggaaagttcaatttacaaccagtagtgaccttatccaatactgaat

SEQ ID NO: 212745 - DNA, 703 bp, Cannabis indica
catgagtcatgacccatttctatatgccttcaaatttttctttctttgtagggcttatatacacgtaccacaaaagttacaagagtgagtaattaattaagttgatgtaaaaaaaaaaaaattaattatcacctaaaaagaaatgtatacatatatttctagatactaattaattaacggttcactaactttaggagtgtagaaaagtgtttgttaacataatttaagggaaatttaagtggtatactaatttttgtttttttttttcaaaaatactgccagacggtattttttacttttttacttgtattttttttataagtttcatactgcagtatgctttgttaagttttcactagtgttctactggtgttttttagttgttttactgttgttttgagttgttctgttctgtgttctactagtgttttataaaaatacagtatttttgaaaacttttccgtgtgacagtatttttgtaaaaagtaacctaaattccagtatttttgtaaatttccctaatcgaatgggttaggtatccaacaaatagtacatgcactgtttaaaattgtcaccaaaataatggacaatatagtcacacaataatattatttatctactttcttgtaatacctaattaattacaactataatgaataaatctatagagtctaatttaataatatatcttctggcatatatg

SEQ ID NO: 212746 - DNA, 805 bp, Cannabis indica
tatatatttattgttatgaacattttttattatttgattttttaaaaaaaaaaattgagaaatatttcttttaattttaaaataaattttaaaatgatttttataattttaaagaaatatattagatgaaccaatataaatatatgccacgtgtacatgatggtacatgtaaatagttcatctcagcgtttaactacgataaatggatgtcatcttaaatttgctaacaatttagcagtttggaggatttttactaccaaaaattttgagattagagggttaaaatgcaaagtgaaaatgatagttgagaggatttaaccgcaaattactactaaaaaaaaattatgaatacagtttaagttttatgtaataataaataataaagaaaaaagagaaaaaaaaataaaaaggaaagaaaaacgaagcgaactgtgagagattgtggaatttattggggtaaatactacattttggactctgtgttgtaaaagttactaatttgactctctgttttgttaaatgacaaaatggaccctacattttacaaaatggtaaaaataggactctgaactcaatttttaacaattttatattttaatataaccaactttaaaacaatttctaacacgaattgatacagaaaatataaccagttttgtcataatatctctcgatcaattattaaattttatattgacaaagaatcagttcaagatcctatttgtataattttagaaaatacagggtctaattggtaacttttgcaaaatataagatccaaaataatatttaactaattgattat

SEQ ID NO: 212747 - DNA, 682 bp, Cannabis indica
gcaggctcaccaaatcatggtccttgtctctcctgcatagtaccgatgacgagatccaattgttgttcctatgggttgtttcccaagggtcctttcttcagtgggaggcacctgtggagggtcctcccttggaggtaagggcatgttgttcagatccactgggatgtttatgttactttggccagttgtagtggccagatccgtggtgcctaccgagatggcagaggtgaccacatctgcagtattcatgggaattctagtcgtgtctggaacatggacatcaagatctgcaatcagtgggtcttgaagaagacccaaagatgcagatggtacaatcaaagttcttctcgtgttaactatagtgtttgatcagatatgatatcgctctcaatgaaagcaccaaactgttgaccgcaaaaagtggccaactgacacctgggtcgtattaattttttgtttgtcacacgttacacaataagaacaataaagtaaaaggacacaaggatttttatagaggtttggccccctttgttagcgggtaatgacctactcctctttttgtgtattaatacctagagataatactattcagatcactataggtgggatctgatatagctctctttaaggttacaaagtatgaatcaagtagatagatgtataatgagaaagagatatggcc

SEQ ID NO: 212748 - DNA, 553 bp, Cannabis indica
ggttatatttgtgtagtttgttagaaaagttggacatttatttttgtgttggttgggctagaatttcaaagctgttttttttttttgggatttcctgagtttggaacctagtccgcggccctcctccctagaaaatcctgggtttcaacccaggttctgtggccccatgttaggagtgtcgcggcccgcccccttgtttctgggcagattcgcacgcgatatttgaatgtttataactttttgattcggactccgtttcaggagttctatatattgttggaaagttatttccgagatctatgtgattatctaaatttgaatgccaattttatattatgtggaaatggatttagggattaaccctattttgtaaatcccaaaaattgtgactaggattactggcacttggtcaggagcacccagggatttggaatctccacgtttgcgagacattaggtaagacagtagctaacacgtagagttatgcgcagtggcgcttatattgaatgtgatatttatgagtaattagaaacccggattaggattattaccc

SEQ ID NO: 212749 - DNA, 521 bp, Cannabis indica
tgttgaggaatcatccttatcttgtgtaataatgtctatagggcttagagtagatcttgctttctcggctttgcccttttttccctttctctcttttcctctttttttttttcctgcaatgtcactgcctttgggatttttgcacccgattcttgccaaggaaaatctcttggggttttcttatttggcaagtgtccggaggggagctctttccagcggttagggacccccattcccttttttgaacattaggatttggtttagggcctaactgttggatttttttcgattttttcaaaaccaaaatgtctacttccgtgtctagttctaagtcttccaagaagggagaggttcaactggccaccctggaggacgtcatgcagggtcccgtggcccaagagaactttaagtcccgtgctaacggatgggaggcggacgagctccactccacgctgacttgtgttcaccagcttgaaaagatcgtggtggttgcatacatcaaaccatcggcctccgggacc

SEQ ID NO: 212750 - DNA, 624 bp, Cannabis indica
ctctcattattttgcgtagcatgcgaaaaagtttctccgtgcaatacccatttagtgtaacctttcacaaatccattacatatgagatgttcaaatgcagttgtgcgaataacaggtgtaattaggccacacttcacacaaggacatataattttttcttcaagactagcatttttaaatgcaaaatcaagaaaaaatttaactccttcttggtaggaatcacttaatctagaatgatgcatccaactcttatccataactgtgaaagcatttttttcaaattaatatattaaaaaaataatcttctctaataaaacattattgaaataattttgtccaatacacaaattatatatcaaatttagaataaatttaattaataaaagaaattacatttataacaaagtgtatataacaaactccatatacactttcaatagtgcaatcgtgtgtgtggaggaaacactacattaatttgaaagcatctaaaataaataattaaatatatatgatataacctaatataactgaggatgatgatgaaaatatattaatgaagaaaataaattaatgtataaaaatagctagctagtgatgagttaatagtacaacaaacatgtgagg

SEQ ID NO: 212751 - DNA, 716 bp, Cannabis indica
aactttagtcagccatgggaaagaaaatttcagaagaagtgcattattgctgagtaatttttattgagatttttacaaaaaaaatattagattttaggtaaattttataattttattaaattttttacataataatatctttttataaaataattgtaaattaacaaaacagaacaattaaaacaatagtagaacaactaaaaaataaccgtagaacaactgtaaaaatttaacacggtatacaatataaaatatatataatttttttttaaaaaaaaatccttcttacagtaaaacagtgaaaaattaggatatttagctatttttcaaaattgttaagaaattattttaaataatttatataatttttaatttactcacaatttttttttaatgatatctaaatggtattttttattaaaaaacaaatcacataataatagttatctaatagtgaaaaattaaaataaatcaaaccctttttttttatttctagctctaagtaaaatagaaatttagtcaacgtcataggatagcttacctactaaacaaacatatagcttgcaaagtctagcattaaattgaggatatttagagaagaagagaaagatagagatgggaataatggcagcatggttaaaagggtttgcaccatttgcagccatggtgatggttgaatgcctggatattgtgtcaaccacaatgagcaaagcagc

SEQ ID NO: 212752 - DNA, 530 bp, Cannabis indica
cgacgaaaatactatacctagtcataaattgtaacaaactcaaaagaagaaaaaaaatgttatatgtataaataagtgtttaattttattttagattatgttgtttatataattaagaatgaaatacacatttatggtaaaaaataatataattttatacaaactattaatacaaattaatattaaacatattattgtattaaattatatcaatataatacaatataatctaacactagagaccaaatgagcttttgatctactattaaattactattttttacagttatttattgtatatgtattttttaaatatatatatacacaaaagaaattttaatagttacatcaaatatataactatgatggttatatttacttttaaccattagatcattattagacgattgtgattaatttaaaattttactaaaaataattaataaattacttgtaacatgatatttaatctgaatttatttattttttaaaataaagaaattaaagaaattataaatattgatttttga

SEQ ID NO: 212753 - DNA, 675 bp, Cannabis indica
aaacacgggtagtcgctgagttctttgatgtgtttctagaagagttacccggattaccaccacacaaagaaattgagtttgtgatagaattagtgcttgggacagcactagtttcccgcgcaccatatagaatggcaccatctgaattgaaagaactcaaaatacagttggaaaaattacttaagttagggtttatcagacctagctactctccgtggggcgcactagttctatttgttaaaaagaaagacagtactatgagaatgtgcatagactaccgagaactgaacaaggtgactataaagaatcaatacccattacaaagattgacgacctgtctgaccagcttcaagggaaaaatgtgttttccaagattggtcttcgtttaggatatcatcagctaagaatcaaaaatgaagacataccgaagacaaccttcagaatgagatacggacattatgagttcatggtgatgtcatttggacttacaaataccccaacaacttttatggacctcatgatccgagtcttcaaggaatatctggattagtttgtcattgtgttcataaatgatgtattgatttattctaagacagaggaggaacatgaggaacacctacgcttaaccttgcaacgattgagggaacgtcagttgtatgtcaagtacaaaaaatg

SEQ ID NO: 212754 - DNA, 669 bp, Cannabis indica
ttgaagaatactttttttatatatatattcaccaaatttacttctaaataaaatttaattcaaatatacatctttttatgagtgttgtatctaaattattctcacccactcacataactaagacataattttaaaaataatagatttgtgttctttgtagatggatgtgtaagtttgtgagaaaatttgggaagattttagattagagaataataaaaattatcgtaaaataataggagtaaaattagtagaatgattgaaaaaacaagtaaactttataaattttgaaagagagtaaaattgtaaaaattaaagtaactttttaaattttatttttgataccgtaaactatttaaaaatttcaaaaaaaaaaattataaatggtcctaaataactacagcgtacgcgataataaaacaaaatctaaaaagttctcttaattgtcgaagcaaaaagagagtctagtctaccgaaatatctctttgagttaaatgagtatactcaaggccaatccaagcggtttgagaattttaagcaaaaaaaattaaaattagatattttattaataaataaataattgacttagtttttaaagaagaaaaaatagaataaacaatgagttctagaaccaaacatgtattattgggactaattattaatttttccctc

SEQ ID NO: 212755 - DNA, 857 bp, Cannabis indica
cccaatggaggcttgaagcaagagcgttacacacttcatgtttcatctacggttactccagttctttttaggaggctctaaccatgtgaattttccaagattttttgaacctttattgctttccatttgaaaaggctacctcttttagatgaaatgagactagctctctttagtccttttaccaataagtagttctatattggtattctgattaaaaaaggacggctacatctcaaaggaagagtggaagttgttactggttgcaaaagaaagagtctgagtgcttaaagaaagaaaaggctttattctaacagaagaaactatgagggattgagataatgttctcacatgaggtcactagcatacacttatggaaagtcttgattcaaaatattgttgaagattctttattaattgtctttcttatagtgtgtgaatatgaggagagatgagatgtctcatctttatattaagtatagctcaatgtgaagctgaataaattgtttctttgttcaaatgatcattgctcaacttattaattggttaggtcatattttttttcctctttacaagttgaacgtgttaattcttgagatatatcatctggtatgttttggttgaaaataaaaataaatatcattttagcatcatcaataatattgtggtgatttcatagtcttttgcttggtcaatttttttcatttggttatatctaatatccatatattctgggtcatagtgtgtcaaaatgtgtaatattgtggtgatttggtagtctttggtatttttttttttttggcaatgaggagttgttgttgcattttttatttccagtcaagggagttctttgttaattt

SEQ ID NO: 212756 - DNA, 758 bp, Cannabis indica
ataccacacaatagttggatatatatgaaatgtagaacaaatttttattttatgaaagatattttaagtaacaaaaaataaaatattttaagatgagatgagagtacaggtaaaaaaaagaaagaaaaatataaaagtattttctatatctttatataaataaaggtaagaatattaaaataaatttctttcatatatctaaaattatttatccaatatttgtgcatgaaataattgatatcaccagccaattaattggagtaagaatttatgaaaatgataaaacctgatagtgacatggctgagatcgatatatgaaacacaaacaaattttggtatatcctaaaccacaactcacaactttattagttaaaggtataccatacaaataattatatatagtaataataatattgtttatggtgtacttacttattcaaagaacaaaaaaacatgtgcgttatatcaaacatgctacatagttggcccaagggtgggcaaccagggactaggccctatagttttttttttttttgatttttttttaaaaaaggatgtatcacactaaattaaagagaaatttacggccagttatcgaaaatttgaagtaaatatcacaactaccacactagtaatttaattgtgaaatatagcgttaattttcttattttcttaaacacgtatatacgtctgtggctgcctattattttgctttcagatttttagtatattgttttgttcttttcttcctcttttac

SEQ ID NO: 212757 - DNA, 1138 bp, Cannabis indica
tcagacgagtctctttgctcctctagaaaagctttcccctgtcctactacaggagtggatggtcgagcaggtagactgggctagctaatctgaatcgtatgttcgataggcctgggttcgctgaaagtttcttcttccttttgagtggggttacctgctcttcctcagcctcatcttcttgctcaagaggctcatgagcatactgttttgctcctgcacctcccttcaacttagcctcacacttgatttgaatgagttcattctcctgatgagctccctcagctcggctagcactagatttcctctttttctcttcacaggctgaggaatcgaaatccttcggtagagcccatactccacaaagttgtcctctgaggtcaacaaagtgatattccaggcagcacccggtagcagagtgagtctttgagctctatccctgagagaaagcgtgaggggtggacggtgatatacaggaatctactggaaccgagtataggtggtgcccatgccatccaccatatagtactcatcaacaaaattcctaattttgctaacggccttgtccctggtgcccgttaaccacttgaagtctggctgagaaaagtggaagtatcccaacctgccttgcttaggagtacacttcaaataaaagaactagataacctcatggggagaaggcatatcccactttagggtggcgtagagaacgaacaaggcagacagatacttgatgcccttgggagtgaattgggtcggatagagacggaagaagtctgtcaccttcctaaagtacgggtgcaaaggcagcagtgccccttgtttaggatgagcccctgaccaggcgcacatccccctctgagggtttgagcctcgattgtttgatgcgggaacataacagtctagctcacccagatagccgcgctggtcgaaatcccgtaaacgtgcctcagtgaccttggacggagggctcacccacctggcatccaaggcactttgcctcctttgaggaactgcagcagcaagctcctcagtgacgtaatccacgccctcaaccaggacgtcgccatccgcgtctactagctccccagcctcattgtatcccccaaagctttggggtgcagcctcctcttcttcctcc

SEQ ID NO: 212758 - DNA, 655 bp, Cannabis indica
ataaataccttacttgacgggatctacaagtaattccatatgttaagagatcatttaaagtgctcaaccactaactaaagtatatgaccaaagattgttcttagtatttttatttattttggtattatagttatttagaattatatatgtaagtttttataatatatagtaatttaaaatattaaaggtatataaaattaaaatattttgttacatgattattgtttttttatataagtacggagtagactttatttacggacattataaaaaaaaaaaatatctttggagataatgattttttaattataatataattttttttgtgattaaatataatttttagacgtcacaataaaatattacttgtaattaaaatatagtatttagatataagttttcattaattattttaatcgcaataagtatattatgactaatcacacatttagtcacaataaattataatttttgtacttttagatcatggaacttttagtcacaatataagaataataatttataattaatcacaattttttatattttacttacaataaaaaaatttctaaagatttactaataatcttaaataattatgtgtatatattaaaaacttgactacaaaattatatgaaatgtcaaaaatagggat

SEQ ID NO: 212759 - DNA, 527 bp, Cannabis indica
atcatgatattcaccttttcccaacattgtgttgcaataggacaaaaagcaagtgcatgcatgattgtttcattatgcaaaccacataccgggcaaagactattcacatcaactctcttgataattaattgaactttagttgaaaggcatttagtaccccctctccatatcaagttcttaacttttggaggaatttttaaacgccacagttcattccaaaaatctgaagcttcaacattattccaagctcccttagctttttgaagcaagttgaaagcacttttgacagaataaacaccatttaactcatagtgccacaccattttgtctgctgccgtttgctgcagaatcgaaacagcagccaccgctgctatatctctaccgttaaacaggtcttgtagcagctccatgtcccatgaacctctcccaatctccatcaaattccccactacagccgtggttaatgctggatgctcagaggtgacatacaggtcttcttccaatgagagccacgactctcctttgac

SEQ ID NO: 212760 - DNA, 969 bp, Cannabis indica
tcaaaaggctcaaaagttctctctctccctctcgcacggtacacccacacccaccaccatcggcttcacctccgacgacgacggacgaccacccaccgccaccgatagcaccgcacgacaacgcacgacgacggacgaccacccaccgccaccagcaccgttatcggaccactccgatcgagacccgcacggtaccgcacaaaaaccaatttttttttttggggttttaaggtcgggtccgatgggcccatcggacgggcattaggcccgaccttaaaacccaaaaaaaattggtatcgggcccatcggtcccgacttcaaaaccccaaaaaaatgctccatcgggcggcatcggacccgaccccttaaaagcccagaaaaattgaaaaaaaaaatcaatgtagaaagggtttgagtttttgagaggggtatttttggagttttggaaaagtaatcatatattttcaatgtagaaaagtattagtttagggaaaaaatattaagtatatgtaagtatagaaaatcaaatttcctttacaaaacttgatgtacaaccctactaaataggtgtacataaaacttacataaaaactaaaaaaaaaaaagaagaaatgagaagaatcacaatctttttcgatcatagacttgtaccgtgggtggacctaagaattttattaaaaaatgaagacataatgaaaattaatttgaaaaaagaaaacataatgtaggaaaaaaatacaaaaaaaaattcgtatttttcttttttcattttccttttgaggaaccattatttatttatttctactaattaagatttttgcccttaaattttaacaagtactaaattatgtctcctaaattttttttaccgttaaaaatttcccctgaattattgagattgttaaatttaaaaactttgtctaatttcattcaattttactatttcagtgattgtttatatactaaatc

SEQ ID NO: 212761 - DNA, 978 bp, Cannabis indica
gactttggattctgattcactttccatctgataaaaaacaaagtacaaaagaaatattagacacaaataacaaatcaatcatgataataaacatgaaaaccagtttcacaaaaaactgaaacaaatcaacaaaacaaaacaaacaaaaaaaaaacataatgacaatttcctcaacaatagatttgtaaacaatagaactaatagcccagcccaaaggagtcccactcaaagagccaagcattttgaaatctcaaccttaaaaccactcacacacccaatagcccaggctgcacaaacaacacaattctaaaaaatagatcaaactctagaaactgattttttcacatgttttaatttaggtatgatcaagttagtttttaaaggtatgatcaagttgaaaaaactaatttttaatatgtgtattattttgtaacctcaaccttaaaaccactaacacacccaatatcccaggctgcccaaacaacccatgtatcatccctaacccatttttaaagtatgatcaagatctagaaactggtttttaatatgtgttttatttcgcaacctcaacgttaaatccactcacacacccaaaaggccatgatgtccaaacaacccctgtatcatccttgatcacaccaccacaaccataaaaactcgaccataacaaccattaaaaccaatttgaaaaataaccaaaaaaaatgaaaacaacaaatatgtgctaaagagggaaactaaagtaataaaggagtacatatgaaactttaacaagttttcttaaaaaataacacagattgtaaattcccaataataaaccaacaatgaacacacgaaaacctaaaaccgaaaactgttaaaatcaacaaactaaaacaaacacaaaaaaaaacaagttctagaaataatgaaagttataactaaacacacaaatcataccaaaacaacaaagtaaaaaaaaaaacaaacaagcaacac

SEQ ID NO: 212762 - DNA, 665 bp, Cannabis indica
gattcagagaaagaaatccaggttcagatcttgataatactctgctacagaaaggatacaagggttagagatctgaacggaaggagtcatttaattccgctgcacccaatgtaaggtttcctaaactttatatgtgtttatttcatcgttttagaaagttcatatttagggtgttaatcaacatacttgtgagtagatctaagatcctagaaaaaataaattccaacaatggcatgataggttctgtaattatcgattgtctgattaggcaatgataatatgatgacattatggatgtgatatacgggctcacctgattaggtgatacgatatactagcgtcgtaccttattatgtacgggcgacagtgatatgagaatgccaggttatagatagactgaaatcgttgttaggtttctttttggcggtgtaacttattagatacagacgacaaggatatgtgagtaccaggctatggtacgggctcgtctgattaggtgatgcgacatatatatattggtgttaggttgtggcacgggctcacttgattaggtgacgcagtgatattatatatgatgttaaactatgacacggacttgcctgattaggcaatacaatatatgagtaattctatttctatgcgtatggttggctatataatatgct

SEQ ID NO: 212763 - DNA, 732 bp, Cannabis indica
tttgccggggatgacaatggtgcggtgtacaactgtgctcagttatttcaagagagaatttcgcccgaagagtcggtggccctggttagttgtcctagtcctgatgaaatcaaaagtgttctcttcgccatgaataaccataaggctccgggtcctgatgggatgtctgttctgttctacaagcactattgggagtcagttggagctgacttttgcgacgtggtttctgatttctttgtcattggtaagatgcataggggaattaataccacaaatgttgtgctcattcctaaggtccaaaatcccatccgaaccactcaatttagacctatctctctgtgtaatgtggtctacaaagttatttccaaaattttagcgaacagaattaaacctttgcttccctctctcatttgtccgactcaagctgccttcgtcccgggaaggaacatccatgataacaatgtaatcgtccaggaaattattcactcgttcaatcggaagaaaggtaaggagggtttctttgctataaaaattgatctggttaaagcctatgataggttgagctggaaatttattgaccacattttgaatttctgtggagctccccagaaattccgtttgtggatttcgcaatgtatttctacaacttcgctaaatatttgtctcaatgggggcccgtgggaagtcggaagccatcttgcgggcttcagcaaggtgaccccctctcacctt

SEQ ID NO: 212764 - DNA, 728 bp, Cannabis indica
aagtagtcggcgccaggcatgggtactgggttccagttcccccgtctggcttctcacaaacattggggatatggatttgatttagtttttcttgtatattgttatgggacttggcaggtttaggtttctttgattgtgttgttgtgtttgacatagggtggagttggtggtagttgtggttgttttgaatttaaaaaagaggttaaggtgttagctgtggtgggcatttgttgtggatggtgatggtgttgtggtatgcatttggggtggtgatgatattaattagaggaatgaagatgaagggaaaaaaaatgcatccaacagaatcataaagattagagagaaagagaagaaattttttcatcattttttaagtaatagtttattttaataacttgaaaagtaaaaaaagagtttttttttttttttataaatttacaattttttttaatttcaaattaattttgttttaatttttttaaataatttttttacatggaccaattaaatttgtgtcatgtgttcattgtgtatgtagatatacacgtggacagtcttacatgacacttaacacttaaaatggataaaaaattttaaattgctaacggaacacgagtgttaagagtcttactgccaaaaattgagtattgggggttaagtgcaagtaaaataaaaatattgagggttttgccacaattaacccttataattatagtaggtatattgtt

SEQ ID NO: 212765 - DNA, 968 bp, Cannabis indica
ctctctctcttcattccctctctctctcgaaccccttgcaaaagtccagcaattagggttatttctcttgcaattcagagcttttcttgcttccttgttgaagtgtcaagcttggtaaaactttctaactttgttctctaggttttcttaagtttgaattgttgaattttgtatgattgtgatttagggttattgttgttgtgatttgtttttattgaagtatcctggagttatgttgatacttaataagatggtttgaagttatttcagggcttgttgtggttgttagacaaattttgagttttagaactcaaacattggtctttaagggaaatttttttattttgagcatgttaggctgttttgttgcttgaaatatgttctttggggtacattaagcaggtctagaaggtttggtattgtttggatacgaactaaacaaggttttgaaattttttggtacttgatgcaaattggttaattggttttacagaccctgtaaaactagttaaccggatcattaattggcttctcgaatcttttgtgttgtcaagtagtgttagtttaagaactttggttggttgattccttgcttatttagggtccttgttgtttatcgattgaaaaacttttagtttcaagtttaagtccccagaagtgatttagcgtgtcacttatcagttttacgattaattttatttaggggcctataatttgtcgtgcagctattccactcaagttggctgacacacctgaatttggtaatgaggtaagattagtataatgatatgcatatgttattctatgctttgcgtacatgttatttttgcctgttagattatatcgatatccctatcagtgtacatagagttatatttgatactgatagatgcatgtttgactcagatagtgatcgatgatatcgcatcagtatgtctagagtatgagtagcatattgagaatcggct

SEQ ID NO: 212766 - DNA, 868 bp, Cannabis indica
agaaaatacagggtccattttgttatttaacaaaacacatggtccaattggtaactttttacaaaatagagagtccaaaatggtatttacctatattttttttgagtttagaatgagcaataatagctaagctttaagggcatttgatagagataaattttaatcattaactatttttgtagcttttaactattacaaagcacttgataagagtgctcttattaaattaacaattattaattactcaaaatatttctatacattatttccttaattctttttttttatttagggtttagaaattcttctatccattctcttattcttttttaattttttattagggttcaaatatctatacatcaatacatcacattaataaattaaaaaatatatttttattaataatttttccgaaatcatatgtggaaattttaaactaaaaaaaaaattgcactaatatctatttacattataaacttaaatagagcattgctattaggcactagtggtgcctagcaccttctcgacatgtcacgttgcgattggctagcgatactccctaaaatttattatattaaattatatgggacccgataattagttggaccaatagcgatactgacacataggagggtgctaagcaccactggtgccctttagcatttttcactcaaatatacatatagaacaatttttaagggatattacttattgatagttactaaaataatttaattataaatattaaatcattaaattttgatctaataacgaataataaaagaaggattttaatttttatacttagtttagttactttattaaaaaaaatatatataaaaaaatatatattttttacaattta

SEQ ID NO: 212767 - DNA, 847 bp, Cannabis indica
attacctatactcagtaagtacacatatataattttttatgaagaaaatatataaattttatagggataaaaataaaaatatatgattgtaaggtttgagataagaataaggagaaattgaaaagaaagagtgttctatattcgattaatgaagaaggctacaaacagtttatataggtattagagaccttctaactgtacaaccaaagaatactcaactaacagagttagttaattaatagtaacaactaactaactaactacaaactaactaaccagctttcttaatagcccccttcaaactgagtgtggttttgaaaatcacacacattttgtctcgaaattcagaaaacctggtgctggagattgacttagtgagacaatcaacaatctgagcagtagctggaacatgcttaacattgatgtgttgttgtaggactttgtctcaaacaaaatagagatcaatctttatgtgtttggtacgagcatgaaggacaagatttgcagcaaggaggattgtgctctcgtgtcacaccacacagagggaacaacaacttgaggaatctgaagtttgtgaagcaaagattggacccaggtgactttagcaacaacattggcaaggctttgaaattatgctttagaggaggacttgcttaagatttccaccaaaatagatgcagtagccagaagtggaatgtttgtcatctagatcagatgcccaatctacatcacagaagacatcaagagagaagtctataacaggtttgaggagcagaccataatctaaggtgcctgcaatgcacctcagtaattcgtttacacagcagtcaagtgtgtatgcaaggga

SEQ ID NO: 212768 - DNA, 711 bp, Cannabis indica
atagttcagaaaaaaaaatttaacgacaacaaaattcaaatagtataatttgatatatatcaaagtttaagaaataaaaattttatttagcctattatatacatttaggtaaagctccaaaaaattctttcaatttggggtgacttatatccaccttgaaattttaatatttaaatttttatttataatttaatccatatttaatttttacatcgatactttaattttataaatatttttatatttatactctctttcttcacatatttcttctatattatgctgtttttaataaatcaattttcattaggtcttaacttttacatttattctactttctaatattttttggccctggcaaatttattttgagataacccctaattttttttttccgtcttcgctgagcaaattttttgaatctgcccctaataaccacccataaatattctaattataatattcacagtcaactatatacataaatcattcatgacatatacatataatcaagttcgattaaaatacagatcatcatcattcttctactcaaaaaatcttatacaattacaaaaaatctcttcagtttttcttttgctaggccccttatatattctcataataattttatatagttatagaaattccagctatagataaatttgattttttaaactaaaaaaaaaaaaaaaaaattaaaaaatctaattt

SEQ ID NO: 212769 - DNA, 711 bp, Cannabis indica
aatttttttaatatataataaataagtaaatatgattttagtacaaaaaataattattatagtcttttaatcaaaataatttttttctaaaagttgagttggagcagcttcagcttttagctgtagtttctcaaaaaattcttcaaaaagctattttttcactgtttaccaaacacatttttatcacaactttttcaaaaaacagcttttagcttttctaaaaactgtgccaaacaggccctaaacaaacaacaaataaactaattgtcaaggtcggttttgaacacaagagggtcatatgtgtgcttggaatgaggctcaattttcaaaaatgtcatttttctatatataaaaaaacaatttataaaaagtaaaattttgaaaaaatatctataatattcgatatcccaaaaggatcattttaatataattttcatcagtgttgatatttttgagtacttttgtctatttaatatatgaattttttatttaccatatttataaaaaaaaaaacagtcacatttataataaaatatttaaattttatttttatactataaaatatttaattttttttttgaaaattttcaaaacattctaagggccagtttggcacagttgtgctgtggggtagaactggtaggaaaaagctgagcttagtgtttaggtaaattattaatttttaaagtgctgtgagtttgttaagtattc

SEQ ID NO: 212770 - DNA, 586 bp, Cannabis indica
agaagagaagtaatagagctgtaaattctgaagtataagcattaagcaagaaattaagtggacttcttgctacctttcttgggaagggggatttgatcaggattatctttaatttgtgctgtgatgttttttgtttgtagccttagaatagtcgatatggagctgtcgttgttctaatgcttttagtatacatgaatataactactaatgtattcataaatactgtttttctgttacatgacattctacttgatctaaggatagaatcttgagtgttgaaaatctcatcaatatatgagttctctcgagaaatcaagcgcaagtacattgttgaacaactatttagtgacatttgagcatttctctcaacttaagaagccatttttgttgatatctctcacactttcagattagttacttcttttttaatatacttttgttatgtggaatatattatggcaattaaaaagttgtaacttgtaagtagttcttttgtagagagaaaatcagttgtttctctttgttatgtggtttgggaattatatattatagcggagagagacatactttcatagtttttggaatg

SEQ ID NO: 212771 - DNA, 522 bp, Cannabis indica
tactctcaagtgagttacgaattcaagctacaagtaactcggagtgggccccgcatgtgcaactcaagcttcgaaaattggcaatcaaccttccgagtcaatttcattgttagatcatcatctattgtcaaaaatagcctaaatgcattttttacatattttttagaatattttattattatttaataggacctccttccctataaaaggagagctccactagttatttttcatattcagaaaagtacccataaggtcaaagcatctctctctagaaattagagctttcacacttagccaattttcttgtaattctcatcagaaataaaaactcgaagtagacgtaactccattaccatcgcaacatgagcactgaactactataaaatttgtgtgtctctctaaattatttacttacattcattatttatctcaccaaactagcgagctggtgttggctactttttagcgtcaacatcagccaaggaaaagaaagaaatcaatgaaaaaaatacaaagaga

SEQ ID NO: 212772 - DNA, 596 bp, Cannabis indica
aaaagatccgtaggccggccagttcttttacgtacagctagctatagcaatctagaattttttatcatgtataaaagtccattgagcttttgtatttgagtacgaacataaatgtattttttgtttcaaaaacaatatatattatactgattcatttgagaaactcgatgaaattaatattatatatatgaattaatgtaccgtctttaaataacctaacacaaaatctaacacatatctaccattttttttcctttcggtatgactatgtcaatatcaagtaggctgcatatataaacacaaattaataggacagacaaaagctaaaatcgaaaaaggccaaaacaatattttaaaaatcaaataaaattgaggggaccaaatatatgattatttagaacatacgaactttaatataaaatgactatttttttctccaaaatattaggagtcttaagatttaactatattgtcacaaatcaaggcttacgatgtcgcaaaatatgtaatatctataacttgagaggtcaaaagtcacacttttactcttgtaggaagataatacttataaaagatcctttaatttatatcacaaa

SEQ ID NO: 212773 - DNA, 597 bp, Cannabis indica
ttagggcatccatccagtatgagactttccgttcaagtaggccaactcacttgaattcagaaaagaggtaagaacatcgtacaatatgtgatatgaatatgcgaatgtatatatgtgttaatgtatatgcatgcttatatggttagtttactaccaacacttgtacgaaaaaatggtacatagtgcattggtatagtgtatgtggtttaaagagtacatcacggtcttaccagcactagtacaggaaggtacacggtgtatgtggtacaacacttaacagtactcggggtacggttcataccctacctacactagtacgatggtggtcctaagtgcatgtgatatagtggtacatggtcgtatcttagttagaacgttcttactcatctgttaagccatgtaaataggtgtatggccgcctagatacaagtcgttattatgtgatatgttatatgcttttcttactcagtctctcgactcacggttctactttcatgtgtaggtaaaggaaagacgaaagctgaacatgagtgagcttgagctaggatgggattgtacatgtcatggcggggcaacctagagtgttcgatctcggga

SEQ ID NO: 212774 - DNA, 525 bp, Cannabis indica
actacttttcaaattcagatattacctaattgaattcaaaggatattgtcttttatcatgacaacttttgttttaataaatcttgtcttgataaattttatcttaacaatttttgtcttctctctatttaattaatttgaaaaattaattatttattgtaaaaaaaattactattttaccaattcaaaatagatttttccgagcgacattataatactccttattactaccattgatagtgtttcaaggtggcaattcgggaaccatgaacctataattataagcttcaataaactagattatttatcgagtcttatcaactaaataattcttatttattaattctatgattactacactataactatagaattgaactcttagtaattatagaattatatttactgagttttacttcattgtccattgatataatcaattccagtgattagtcctccatgtgttggttcataataagttttggttaaattacagttttactcttctaattacttttttatcctt

SEQ ID NO: 212775 - DNA, 522 bp, Cannabis indica
ataataaaataaaataaaagattgtaatgtttttattccttgtcctaatgtttttattaatgctcgaataattgttttgtagagaccaatgttggtttttttggagcaatgcatcatcagttctcctcaacatattcactacgtttcaaatgtttttaactttgcagcttggtccaatcaaaattcatactgagatgtgattagaagttaaaactaaatcgtacaaagttaaaaattattagctttggaggtgttttaactatattttagtatttcctaacagtgtgatcatctttacgttagttttatgattgaaagggattaaaatacataattccatcttcaatggaagtgtaaatagatggtgaaaagctaaaatatagctcatttaacaaaaagtatgctccaatggtgtgccaaaaaatgatctaaatttggcacataataaattttgtgtcaaatttagcacaacatttgttatgatgtaaaatttctgaaaatttttgaataatggcttgaatt

SEQ ID NO: 212776 - DNA, 670 bp, Cannabis indica
acttgcgactaaaacatagtatttagctacaagttggatcactagtttagttttagtcacaacaaatattgtgattaaaatacatttagtcacaataaattgtaatttttgtgactaatacttttagctacgaactttttagtcacaacaaatgaataatgatttataattaattacaacttttttatatacttttagttacaagttttgttgtctaataaaaataaaaaattttatagtgattgtaagtagttttaaggcttatttaaatacaagtactatataggttgtaaatatatgttttgagaatacaaacacttatttgcagatttatcaaaaaaaaaaaaaaaaaaaattatttatatattataacttatataaaagtatgaattatttaggtaattgtatgtgtttaaagaaacatgcatttcatgttgttattgcctaataaataggtagatttccattaaaaaaataattaaaaaaaaaatatataggtaaattgatagatttttcttttacctatacatctcataattaaacgatatatatagagatattgtcataaggtggccaatttattcaattagtgcctaactagcattattataaggtgacgctagctttgctagctttagaaatagtataaaatattccattatagttatta

SEQ ID NO: 212777 - DNA, 537 bp, Cannabis indica
gcataggctgcccagcctttggagtacatccccttggtcgtccagaccctttgacaaccatccttggccggccaggtcttaaacaagacctcattggtcgcccaagacttgtacgacccaaacatgtgtttttgcaagaactcaaacatgttctttgtgtttttcgcaactcaaagagccaagaatcacaatgaaggtcagattcagatctttttcatctagaaattacatattacatatcctaaggctatcatgcagatcaaaatactaaaaggataataatctaatgtaagaatcaaaggatgtttaatgctcatgtattcataaatcaactaaatcaagtgaaatagcaggaatcaaaagcttacccactacaagaaaccattgaggaagaatgtgggaagcttggatcgtcaaaatgatgcaaaaatctcaggagaatggtgcttgataagttcgaccctctagagagaaggaagagcttcttcaaataacaaattctaatgagagaagtgaaatgtaaaaagtgaaaagggt

SEQ ID NO: 212778 - DNA, 1082 bp, Cannabis indica
gggtcccaagtctaggtctgggttgggatccgagtttgggtcccggttcgcgtgtaggtttgggctggagtctaggtcctactctggttacggttccgagtctaggtccacgtccggttacggttccaagtctaggtacaagtccttgtttcggtcccgttctcgggtctcggtctacttccagttttggttcaaatttcagatcacatggtatggattcaggtccaagtttgggtctgggactgggtttgggtttgggtttgggttcgggtccgaggctgggtcccagatctaaacacccactatgggttcggtccaagccgtgggtcttgatctggatctcgatctcgggtcctggtctgcttccattttgggtgtcggtcacgagctgggtcctaggttcatgtcctggtctgcggtccggtcttgggtcctagtcctagttctgttgcccaggtcagtgtcctgattttgggaataggtcccactttttttctaggtttgggtcccgatctaggttcgggtttcagtttgggtctccgtttgggtttttattttggtttgggttcgagtctgggtcctggtcctggtcctagtcatagtcctagtcaagttccagttccaattgcaatttcgagttcgagttgggtttgagttcgggttggggttcgagttcaagtctgagtttgggtttgggtccagatctcggtctatgttcggatcacgctttgggtgtgggttagggtcttgggtctgagtctaggttcagatccgagtcctaggtttcgatctcaatctaagtcccagtttagttttgagtctaagtccagggtttctatcccggtctgggttcgagtttggatccgggcgtaggcctaggtcttggtgtgattctggggatgggtttgagttcgggtctaattttaggttcgaggctgggttcaagtttggtcctggtaattgttcgtgtccaggtgcctaccttgttgggtgcggggtaggtttcgagccctggtctaggtctgactttggattcccagggtctaggacaagtcctggtttgggttcgagtcccgaatttt

SEQ ID NO: 212779 - DNA, 786 bp, Cannabis indica
tctctctctctctctaagttttcaattctctcatttaattacattgtacaagaaaattatgtgtgttttcttattttttccctctatttgtttagccaatagaacttaatcgttcaattatcatcaagttattaataacagtaaaattaatacatatattctaagtaattaattagattgaagatcattgaggtaaaaaaaagatataatattgatgatatttttttctaaaaacaatatttaatatatgctattaatttattaatataattatgtttatttgaaaaaatataaaattgtagaatatttaaaatttaagtaattattacaaaagtaacacatttttacaatttatatatacatttaaagatgcacaaacaatttcaaactattctaatcattttaattaactatttatttaatcaggtaaagataaataaatattttattatagaaaaaaatagtcttactcatcatcgcctccattttgtaaggtacaaacttattgaaataatttgttaaatttaattctcttacctaaacatttttataataaaattctatcactgatattttaatacaaattttcattttcaatatagataatgttgtatgaatctctttatagttgtcctcttacaatcacatatgcagagaaagaatttcaacaacattatacaaaatgtccatttaatttcataaatagtagttaaatattattttttaataagttttttttctttttctaaattttggttgtaattgttatctttttcttctatttaa

SEQ ID NO: 212780 - DNA, 1421 bp, Cannabis indica
aagttggtcacctcgcaccacccttacacatgtgggtgtctgaaacttcaaggataggtgtttaattgaactgattgcccctagtccaattaatgctggtcgacctagcagtatgttgtaggtcgatggtaagtcgacaactagaaagtcttgcattatggtagtggataaaggcgtctcgcccacagttaatgagagttcaattattccttgactggtgacactatcgcctgtaaatcgacacagatttaccatgcaaggttttaactttgctttctccagtcccattttcttcagtgtatccttataagagatatttaatgaacttctgttatctaccaacaccctttttattcttttattggcgagctagatggtgatcacgagcgggtcgacatgagggtacctcacgtgctttgtgtcttcccatgaaaacacaattggaggttcctcagccttggctctcttagatgattctagagcgaaggttgattgcttgttcttaacttccttaacatatctcttttgggcattgttactttctccagcaggatgtggccttctcgagataagcaaaatatcctccccttcaatcggggaggttctaatccttggttgcttgggttattgggcagatttggctggttttgtcctttgccttgtcgtttcacatattgtcggaagtaaccacacaagatgaggccttctatctcatctttcaattgacgacattcttctgtcatatgttgtatatccttatggaatttacaaaattttgttgcatcccttttgtatctcgcatgcctcataggcttaggtttacggaatgcaaccctatgctcatgtgcgagatagatattttcccgagtttcattaagctcagttaaatagtgtagattggcacatacttgtcgtgcttctgctgttttttcttattattggctgattctttagagtcatctttcctctttgtactagagcctcctagattgtcagcctttgtcgagacggtgcttgtcgagatagtgctggctttacttcccaagctagtctttaacaatttcatctctttccttgcttccttttttcgaacaaacacctgagctctcttattgaactcattgatgtttttcactgggtgaccctacaaatcatcccacagtttgcctccaaccgtcgagagatcagttatgatccctgcttgaagagcagtaagctggatgttgttgttcaagtttctaacccttgcaacagctgtattgaaaggacttaagtaggccttaagcgtctctcccggctgctgctttatgtttagtaagggaagacgcttcaagtcgcctgtctcttgctgcctagaactatatcttgaagtctttagacagctactcccaagaggtgatcgagtgtgggtgaatttgttg

SEQ ID NO: 212781 - DNA, 610 bp, Cannabis indica
acatataattaaaagtgatacagtctcacttaaaattataaatagccaatatttactgcgtgtaattttttaagattttgataaagtgtgtatcgttaatttatacggaattgacgataacaataattgtttatttttgtttggcctaactaagattagcacaataatggtaatgaatgactaataataaggattaattgaataaaggagagagattattattgtaggtagtagactttgaaatatgtgaattattaatgaatgagattaggtaacaaagtccaaagagactcaaagtctcaaataggctgtaacttaaggctgcactgcacacgggtcgggtttttttgggtggtcagcttttcgggtgttggaaatgcacaaccgagtccgacaatatcaaaaagaacctttgtttcattcattgtgaacctcaatcaaaaaccatccctgtggtttcctctttcttatatattgagtactcactcattctcaaattcaatcattctacacttctaccttaataattacccagatttatagtataatactatagttattatataaaatttaattaaataaccaataatataaattataaaatcatata

SEQ ID NO: 212782 - DNA, 678 bp, Cannabis indica
atattatgttgcagagttggatagtacaaaccctaagcttatgaatgagtcccgaatgatgcggatagctagaggctctggtcgccccgttagagaagtaatggagatgatggaagagtacaaacgccttgcaaaggtatggagcaaaatgaaggggcttaagattcctaagaagggtgaaatgagtgctctatccaggaatatgaatgcacagcacatgagcaaggtactcccacctcagatgctgaagcagatcggtggcatgggtgggttgcagagcttaatgaagcaaatgggcggtaacaaagacatgatggggatgttcggaggaggaggaggggagtagtaaaagatgtaaagctctatttactaaactcatactaccaactacacggctgcatgcttacattcttttcattactcagccattttgtggtgatgtgaaagcaagcatcaaaccctttaaaatttcttttttagtacgtaattagcctaaaaatttcaagggtattaattttttctcttttttggagtcaaataattagagaattttcatttaaccctttcaattttatacttctgttgtgttttatttgtttgttgagagtgttttattacacagtttaggttttagaccaggcaatacttaaaataagataatatatttgtttttttttt

SEQ ID NO: 212783 - DNA, 562 bp, Cannabis indica
cctcaggtttaattatgataagtgttggtgggtttttaataaattagttttttttttctggtttgcattaatagctagaacatggaaaaattaataagattgacattcctttttgtcgcagcatgtacaaagcagcataattacaataatgctttaagttgcttttatttttatttaacagaagacgaaattataaattttatggcttcttaattatactgtatgtgctaaaatataattttttttcttttaatgagtgtgtttataggaaaatggtaattctagaagagaagaaaagaagaagaagagaaaaatcgtagatgtacaataggaaaaacccaatcgtatttttaatggatttaatgagatttattttattatatataaataaaaagtgacccatgaatttctcacaaattattttatttttaatataaataaaaagtcacacatgaatttagaattcggttatataggcacactttatatagaatagatatatattttgagtgttttataaatcttttaacacttgatccttaaggagcctcatagctctacc

SEQ ID NO: 212784 - DNA, 563 bp, Cannabis indica
tttattgcggccaacaatgctcggaaggcccaggtacatgctattaacccctgcttcttgaatattcatcaaaccacaaattcgaatcctaatgtccgttcggatgttggagctaaagaaagccgaggatttattgagattgactttttggcctgaagcttcttcaaaggtatgtagtagcgagaggacacgatttgcttcttcctccgttgcttggcaatacacatagctatcatccgtaaaaagtaagtgagagataggaggcgcactcctagcaaccttacgcctcgtgagtagacggttggcttcataatgtttaatcagagaggacagtccttcaacacacacaataaacagatacggagataatgggcaaccttgccgaatgcctcttgtaggaatgataggccccatcttcatgccactatttataacatggtaacaaactgagttgacacaccccattgttaattcaatccaacgattcctgaaccccattgcccaaagaatggcttccaaaaaactccactcgactcgatagtaagctttgctcatgtcaagct

SEQ ID NO: 212785 - DNA, 632 bp, Cannabis indica
catgtgcaaagccgtcctagaagaggtggattatgtatcacatttttctttggtcattaaaagaagttattcacagcaaatgcatgagagcacatcgtcttttaccattacagcataaaataagtgaaaaggaaggtaaataaaagagaaaacatgaaaaaaagaaatagcaatattactgaggtcggaaaattccctttactcaaattgcaagcagatctaaaaaaacaaaagaaaaagtccccaaaacaaatatgagtaatcatattaattgtacgcttgatacgaacaacgattataactctaataaaaaaaatataagactagaaatatatatatatatatatatatataattaaatcatgaagaaattagagacaaactatagttggtggcttccatggcacttgcacaaaaattagggagtgacggcgggtggagcgacattgtgggcttaacttggtggaatggctcgttgagagagagataatgaaaagtatatttatcgtaatagttataatatatataagttaattcacaacataaaaattattaactagaaatatatttattcataataaattgtaatatttaaacattttaacaaaaaattatgatgtcttttttattta

SEQ ID NO: 212786 - DNA, 457 bp, Cannabis indica
ctaacatgtgggttcgggatctgcaccttcctacgaacccagatggcttttttttttttcatccagaggtgagcaatttagttttttttttttttttcttatttaaatttaatatatatttaataaaataaacaatattttttatataagattttactaaaaattatatgtatatgtacaatgaatataataattaaatataaatatgatttttatatatattttatttatgggtaaatactattttagattttgtgttttgcaaaagttatcaaatggaccctctattttgttaaatgacaaaatgaactctgtattttctaaaatagtacaataggaccatgaactgatttttttatcaaaataaacttaataataatctgacttagagatgttatgacaaaactggttatattttctgtatctgttcatgttaaaattgttttaaagttagtta

SEQ ID NO: 212787 - DNA, 935 bp, Cannabis indica
agagagagagaagagaaagaaagaaaaaaaaaagtcagcaactgacttaaaaaataaaaagaaaaaagagagccaaaattgactaaaaaatatatatataaaagaaaaaaaaaaaagctttttaaagctttaataaataaaaaacagtaaaaaagaaaaaaaaattaagaaaagtataaaggtaaaaatttctttgtcaaattataaatgtaatgcttgaaaaaaaaaagttagtatttggtgtaaattttctaaatagaaagaaaccttaaaatgtaaatgtaaaataaactaaaaaaataataaaactaagtaagttagaaacaaaaacatgaaatatgggtttggatgataagtttacaaaaatatggcatatcaaataccataaaaaatcttaaatgtgaaaaaatgtcatagaagagtgacaaacttataaatgtcatatttttgtaacttttttacaaaatctcatatttcatgtaatttttacaaattaaaatgaaacataacactttccaaaaactgtcactcaacccaatcaaaagccttgaccatatcaagtttaagagcaataagaatattatcaaaaataattattttaattctattttaacatataattttgtatttttttgccttaacatttaaaatatattgtgttttatttatagatatattttttaaaaatataagatggaagaaaaaaaaattaaaaaactaatataaattaaaaataaatattttttatatgaaataaaaattattaaatagggtactttataaggttcgttttggggtgtaaatggaactatactttaattgttgggattttacttatgtgatggttagtttggtagtatgtaattgtaattgtaatggtaatggtaatacatatggtataataatggaataagaattagaaatttttacatcaa

SEQ ID NO: 212788 - DNA, 754 bp, Cannabis indica
gtatgatcaaccggaatcaatcttgaaatacatagtataatgcaaacaaaacaccttcaaaaaatgtcctcgaccaaacctttttgacgaaagaggggtcaaactgttataactccctgaccaaacctttttgacgagagaggggtcgaatcgttataacacctcgatcaaacctttctgacaagagagggatcaaacaactgtaatttttggttaaaagcttatctcacaagaaaggaaaatcaaaagttatgattagcacataaggttgaatactaacggttcgcgctaagggaaagtattaagcgagacatcaaagtgtcttgaaaaaatacttaaactaaacatgtgggtagaagatttaactactcatgtaagcaataaagatatatacaagatgacaagttcatcaaaaatatatttgaatttgcttaaattaagatcatttctgatgatcgcgaggcggaatcaatgatggctcgtagattgagggttgggcagataagctactcgcgcatgaagtagataattaactacttagcgtcagagaaaaatgcgaacaatggaaacccctaataaactttatgcatgtgattgtttaagttgtgaatgaaatggaagaaaacatccacatattaaagtttaaacttaaaagtatgaggcattaaaaaagcaaagctggccatccaacttgcaaatctgtctttacaaaagaaaagtgccaccaggttcaaaccattgtcttggccaaagg

SEQ ID NO: 212789 - DNA, 1226 bp, Cannabis indica
ctttagtatagttcactataattatgaacaatcaacgatgacaaaaaacataagtgaaaaataataggtgtagctaagtaattttcaagctaagaggagttggaacagagtcccaactgctcctttcaaataaagaaaattttaaaatatgaagagttggtgccaaaattctactcaaagagatggtttatactgtgactatacatctgttctattccttaaatgattttatatattattatctgtttaatctctctcctcatttgaatgcttgtttattttattttattcgttattactttttttccaaatatttaataattaaattatttaaatgttattcctaaataaaataaataataaaatagaaaaaataatgtataatgtattataaaattctaaggtaaaaaaattattattttggtaatatattttgaagaatatagttgagacactaccaagagaattctacatacggtcttgtagaaaaataaataaaataaaaaataaatagaagaaaagatttacatcttaatagttataaaagaatatttaggtcggtagggaaacattgttagttgatttaaaatgtattaagtacagcatgtgccttaattaatttcattttgtaaaccataaatattttcaagagacgtaatcataataataaataagataaacaaaattataatacacaatttatttattttaattatataatattaatacagaattttaaatgtctttgatgaatacacatttattataattatactatcaactaatattaatttaatggatatattaaagtattgtaagagaaatttatgtttgagcataactctggctctatggtacataaggcaatttttaatgaaaaatgtaaaagttgagttatactttgtaaaaaaaaagtaattttgtaatatttttacattaacttttattattatactccaatacataattataaattttaatgtaaaatttaatatgttatttaatacttactttttttttttgaatggaaaatgcatctttattaaccattaaaatccgctaccaaagaaggtagcaagtcgaatggaacagactccatatcgaagatacaaccaggaaaaaatatagaagctcttgcacagttatgagctaccatatttgctgatcgtttaacaaataacatagaaatagttttcaattctaacaacagatttttacactcttgg

SEQ ID NO: 212790 - DNA, 764 bp, Cannabis indica
cgacatctttgccttctaatgatgtttcaaaaatggtctcctctattggctagatctatcaaggttaacagtgatgctactattgataaaatccgtgcatatagtggccttggtatggtggtgcgtgatcacttgggtaccgttcttgcttctactgtttggcgcttgaaagggtgtcttgataatgaagtggcagaggcgttggcacttcagaatgtcatggtccaatgtcttttctttgggtatgacaatatcatctttaaaatggattgcttgaatgttttgcaaaaaatggtgaacaaagtgtctccaattttctctttggatcttgtcttggatgaaattggtaatctttgtaatagtttcaaagatgtttgtgttttactttgtcttagatattttaattttgttgtccacaccttagctaaagtctctcttacaacgtcctctagtactgttttgtgatcgggttctctaatttgtattcagaacttagtagtaacagatgctactcagtaatgcattctcgcctctcttttgatgagtttcataattcttggtggtggttgagacatttttctcataaaaaaattcatacaacaattgtcgaattaactgaaacagtaaaaataaaaaaaaaaaaattaaaatataatatatgaagtcattttttcatatcattattgttgatattacttattgtctattgttattattattctgaacaagcaaatcattattatatgcacatgatatgtttcttc

SEQ ID NO: 212791 - DNA, 586 bp, Cannabis indica
gtttttctacaaatgtgtaagaaaattctagtacttaatttagtattgtagaaatgtgtatcaatttctaataactatatactgtatacacgctcgaaaagattatatatatactagatttatattttaaaaaaaaaatattctagattttaaaaataaaagatgtatatttatgtagctattttttagcaaatatagttggatggcatgaaattcttttgattaggtggctgatcatgttcttgctgaagttatcgaggttaaggagatgttgagttggttgaaaaaaataaggtggcatgatgtgatggtggagttagacagtttggtcacgatccaagctatatttaaagttcgttagatatgatttctgtttttgggtcctacatttcagagtgtagacaaaatttttctagttttaataaggtctcttttagatttttgtgaagcgatctatcgtgttactcactattttggctagaactttgtggttaaatattggttgtacttattcagattctacaattctgagtagtttaggtgatgttcttttgaatgaattgagttaataaaattacatttttat

SEQ ID NO: 212792 - DNA, 775 bp, Cannabis indica
tactattattcttggatatggatttacctcttatatatataaatctcttcttctaattctttcttgaacacccactgcaacattaagtaaatgattcaaggaatcctatgaggaatgaaagggtatcctgtaaaaatatgtagcggatggattatatataataacatatattcgtgaagttgatgacaatatatgaaagatagtttgtgtgagtaggtgcttatttgaatagttgtatctataagtgggaggatgcaactcttaaaatatgctaatagtaatttatatttctgttaaaattaactttttattggagaatattctattaaaaagcataataatatgataaatgcacaacaaaaatggttagataggcatttatataataggtaagatatgatgtgaatcacccatacttgtgttttatagccacacattagcaacacagtttcagaatctatattttcaacacttcattctctccaatagtttaaataagaaaactgcagttgaaaacaattaaatgctaattttacctctcaatcttgctttctttaacatgaggattcgatatatgttaatatttcgttccttaccttttcattgttggctatgcgcatttcacaaagtgtttcatgaaaaatgcatgagctgatacgaattgggtacgtgcccagcctctcgggctatacattaacataaaaattgtttttatcctgtctaactaatcatctacaattttcaattaaggtaataaaaaggaataaattaaaaa

SEQ ID NO: 212793 - DNA, 696 bp, Cannabis indica
aaattattaaatattttctcatcgtgtattggaatagtctttccttttatttcaaaatagaatagtcactctaccaaaatggtggaacgacaattccattggaatgatatttcaatactttaatatgcaaccaaacaaaagaatagaataaatattgtttcctttttattctatttcattacctccaaccaaacgcagtgtattatttatacttataatgtgattcaaaatgaatataagagcgtcatttttttcttatgtttatgttttctaacttgtatattagttctttttccttctctataacaatacttgacatcaattcaaacctcaattctgtgatgatttgattactaatagtttcagttacagcagtgcaagaattatcttccataatttttaattggtcaaatgcctttcctttcctgatttagtagattctagacttttgtatttattttctttatgtagttcaaccaccatcaaaaataattttgactgagttcttacagatcgaagcatctggtggccaagctatacttttggaggagatgtttcaaaagaagctgatgttgaattaatgatcaaaacagtgagaaaatgttcttcatattgttttttacacattgtatgttaaaccgtggaatggtttgtaatattccatctcataaacctgcaggcagttgatgcttgggg

SEQ ID NO: 212794 - DNA, 987 bp, Cannabis indica
tttacagatttagtttgtggtgaaagaaaaaggtgggtttaattgattttttcttaacttcgtggtgagcgacgaagggagctttaagaactccagggattggagttcaaagcccgacgaaggccacgatagccttgactctagagaaagacgaggagattcgtggtggcacgccgaaaaatacgttcaaacagtgtgttgcacgtgtgactattttattttatacgcgagtaaaaaaaactgtttgaacattgttttctatattgtaaattattctgaatttctcaagattttgttggttatctcatatagctataacgtacatcaatatgaaaaaaaaaattagactaaaaagttcttctggataccgaaacaagtcaagggtgcatcagtacatctcttttaaaggggtgcactgtagaatcacccaatacttcataaagccggttataattttttttaataaaaaaagtggggatcaattctaaaaaatattgaagtataaacatgaaaagaactggttccataccaaaataaataaacacaaataataacacacagtaactcaaatataatataaagaaatcagttatatttatcaactagttaaaaatttgagataaaaaactggttatgtaaaacaactaagataacaacttacacacaaaaatcagttaaataaaataactcaaacaaaaatattcattcaacatgctccaacctaccaaataattactcatattacatatactcaaaaaaatactcattcactatgttatataactagttttattttagttataaccactttgaattatttcatgttatttatttttattcattgtaacactgttataaaactagttctattttaattataactagtttgaattatttcgtgttatttgtttttgttcattatgttacagaaccgattatatttcaatcataaccattttgcgttatcttatgttatttatttttatt

SEQ ID NO: 212795 - DNA, 627 bp, Cannabis indica
ctagcagcacctcttcccccacgctatcctaccacatcatgccacgtgtttgctttttctccacagttgtcattctaggagctccacaagctggcacttgtcatcatctccttccaaccgccttttccaagatctttgatgctgccaagtgttctaaatgcataaaaaatgagctcaaaatgccaatttcaaaaatacactataattttccattctcttgcatttatttgactcattttcccatctcacacttttttcttagccaataaattgaacattatctagtttacttttctacccttctcatatcccacctacctcgtttatgttagaaatttctagaaaatattaaaataattaatttattgactattttaattcactcactttgactataaatattttgaagatatcatcccaccacattctacaccacctacacataacttactccactacctacttttattttctctctttgttagaatgcattttttttaaagtcggatcctctgtctaggatttctgtccattttgttgtccacccaattaaaatagtccaaatcattaatgaattaatatcaccattttaacatctatctttccattaacagtaccgttaacagt

SEQ ID NO: 212796 - DNA, 775 bp, Cannabis indica
aaaaaaaactgatctttgccaatagctcggataaaagtaagaggatcctatccaattgcaaattaatgaattggaggaaaaattcaggaggtatcaatttggggagcagggaaagcagtttggatatgactcggatgaggaactcgagccttttcatccagacatcatgaacactgcatttccctagggattcaagaacccacatgtctcctcgtatgatgggaccatagatccagtctcgcatttaattaatttcaatactatcaagcgagccagcaatgttacgaacaatctacattgtattttgttccccactttgctagttggagcagcaagcagctggttcaacaaatttagtcatcattcaatcacctcttgggaacagttgtctaaggacttcaaaaaacagttccaggccacaagggataggcgacccaaggcatcctcactcattaacataaagcaatagccgagcgagatccttaaagcctacttaagtcattttagcatagctgctgtgaggatgagaaacctggaggatagtagccagcttactcctctccaggcagggatcactactgatctctccactgctggaggcgagctatgggatgacctacagggtcgcccagttaaaaatattatcgagtttaatgaaagatctcaagtatttgttcagaaagaggaagccaaaaaagagatgaagttgttaaagactggcttgggaaataaacccaatagtgtttcaataggcaccgtctcgaccaaggctgat

SEQ ID NO: 212797 - DNA, 599 bp, Cannabis indica
agatttttgtaattttttatttaggatttatataacaactaatatcatttaaatcaaaagaaaaggaaaaaaaaagtgtgatggttgaatatcacaacaattattgtttatagtatttaaatatttaattttaaattttgaggaaaaatatttaaagttaattactaaaaccaagatttactttcatctaattttgaatgtttgcaaatttttgtttggaatttatataacaattatattattaaaaggaaaaaaaaatgtcatgtttaatattattaattttttttcttaataatatcgggatcaggggcggtcctgagttgtattagatcttagaaaaaataaaatttttgttcctttattataagaatagatagtatttttaaaaatatatattaaaataaatatatattttttaaaaggactttttattcatttgggtccttagattgagtgaaatctagacacgaatttagcccgtcttaacctagagttgatcctgatcgggaacaagaattcaaatttagaattttctttttatgtagaaaatttagagcacaatattaatatatattgtcaccatttaatttttttttttt

SEQ ID NO: 212798 - DNA, 708 bp, Cannabis indica
tgacttatacaaataaagactctttctttgaatttgtcgcgattgttgtaatctattcttctaatcaaatttctaaagtgccgagaccttgagctcccttcaatccgtagcacttgcacacttcatcccgaagagtgtctcacttgaaatcttcctcccaaagagtgtctaacttgcagtcttcctcttgaggagtgactcgcttgcaattttcctcccgaagagtgactaacttacactcttcctcccgaagagtgactaatttgaaatcttcctcccgaatagtgactcacatgcatttttcctcccaaaaggtgaatcatgaacaagacttctcccgaagcttgattaacaatatccaaagtgttcaaactgtacaatttcaacaaggaacaatacagagtaacacaataataaaatattaagaacttgttggactcaagttcttcacacaacaaagaaaacactctctaactttgaaaagtaatttagaaaccctctaggtcgtggtcaagaaaccaagaagccattaggtcaataaataaaaatcttcccgaaaaggaaagtaaaaatctatttaaacagacagtcaatctgttcaaacagatacagtgaacctggacagtttttcagcaaagtttccataaacaaatagggcaactttcataacattaatatccacagatgtacacggtttcttggtcaaga

SEQ ID NO: 212799 - DNA, 680 bp, Cannabis indica
ttaattaatttatatttttttatgaccaatttagttatgcttatgagtattagggtggcattatctctaatgtaagatgtaaaattgtattatatttgacgcaaaaagtaaatttgtgttatatttacccacggtttacatttatgctccaacaatacacaaaatgtaaactagtaactaaccagttgcaattcaaaacttaaaaagaaattaatagccgattaccactagttattgattagctaacatggtactacctttatgaataaaaagaataataatatttctatagtggtaactagttagcacaacattaaaatatttttacattttactctattaattgtatttttagatttgatggactagtaactggttactagtactgctgaaaacttaaacaaaacactgataaccaattaccagttattgattatataacatgctactactagcatctttcaaaccaaacttgtaaataaaagaacaataacattttgatagtggtaattaattaccctcatatcaataattggttattatcaaaataacaaaacataaacacaagaaccatggttgaggaagcttcgttgtagatttgtttagaatgaacactacgaagcttgcaaaagggagccacaccccccaacaccaccgaaaaccccaaataaaaccaaaaa

SEQ ID NO: 212800 - DNA, 1453 bp, Cannabis indica
ttattttctgcaattactatttttttggttttcattactttgttttcccctattttcatccgattgttattttttatttgataatcttgtcattgctaatcgtttgattgttaaaagtttggttgttctgattccactctatttccaacaattaccaagaacatgggagcaacaatgaagaggtgtcttatgagtcttccaaaactagtgaccaagaaagcgacactaaagactcccaatgagagagggaaggaacgtataattatatcgtcataaaaacgtttgaagtcaggacaaacatgttcgagtttggtatgactgccacttgaatccaatgtcggtaccaagatattggaacggggagcatctgtaatgataataatgaaacttttccctaaacagtttgcttcacagtgggattcactttaccttgtgcaagtgaatcgttcgcctctcgaaccgacaagatgcgacaaagtaatatttaggtagggaggtccatcgctaaggtatggctcctaaactattattcgaacagggcatttgtgtagtggggatcacttcagctaagctttgatggaaaataaattatgcaactattacttctttttctttcaacttagctcatagtggtgtaattgaatttaatatctaaggaataagagcgttgagtaaagctcgttgatactttatttttattaatcaattgaacctcacagacctgacaatactctaaactgctgaacaaagcttgtagagttggtcttgaagtaactacgattatttttttagtgagttaaatactgccaacccacgaatctctagataagtggacaagtgctcacacatgtaacaactccctgagacccatgatcaagaaagcccaacgagatttggtatggaaagtgaccaatgaaggcatttcttcaatcactcgggggcaaataagacatagtatataggagctatgcacgttacatgagcatttacaaaaattatggtacatgagagtcatgtatgtcacatacaccttggtatacgagagcaagtggcattttgcacacctgagttagtatttctatggtttaatgaaatattgatgttattccaagtaactgagtttcttaatccttaagtgctagtacgagtgctagtaagttcattaagttgaacaaccacacatacagactatttgctcactagagttaataactgttatgaaataaacacttgaggtctcacaagaatataatgaccgagttcataaatctaaactgctagtgcaagtgttcctccttggatcacaaaaattaaaaagaaaagaaaagcacatcaattacagaaagctctctgaaagcaagatgctgtatccagaagagattctctagttgattgaagaaaaccctctaggagtaggacgttgccccagctgtggaaagaaagatgacatctc

SEQ ID NO: 212801 - DNA, 748 bp, Cannabis indica
atatctatactataattttctttctttatttctttttcctattgtattttaatttgtgaaagataacagcaatgtataaatgctttacttaattttcaatatatcttttgacattttttactctcaactctttctttaggttattatttttatttggatcgaacatgcagaagtcttaaaacgccatgagaagtatatatatggtaatttcacattaaaatttgttatttttttttcgttcaagattgatatatttatatatggcaggccaagtcaatgtaaatgtataataataataataataatataatttatttagctgtaatttatttattttttatctttaaaaaaaatctatttaattatgtattcaacattatttcaatgttaaaagtagatactaacaaaaagattattctaatgtttcttctcaaaatattatatatccacttaggtattacagttatgacattagttttaaatatagctatgactacagatgtatgatgacatcaattatataattataggatgagttttatatagatgtattaattatctttttgttagatccttatttatttatttttttttgtaagaattcttcaatttttatttattttctccattataaagtttgtataaaagtgagtatttaattcattatttgattaatttgttttagggtaaatactattttggaccctgtgttttgtaagagttataaattagattctctgttttgtta

SEQ ID NO: 212802 - DNA, 560 bp, Cannabis indica
caatacttataattggtttgcgcgaaataaattaaaatatgtaagacctgatattgaaatatgaataatatatgtgatattttttaccgtaaggtactttcagaatttatcttgttaaagtgttacgagtactagtggtaaggatttttgagttcgggtgtatagaattagtaatttaaactcacccgtttgtgtgagtttttgggttttgggtgcgggtgggtcaggttcaggttgaaccgggtccgggtgggttttgacttcggtttaggttgacttctttttttctttcttttttgaaaaatatcatttttatacattttttcattaaaaaaaatagaaaaaatgaaaagaaaagaaaataaaataaaaataatatatcattgtttagaattagatttttcttttgttttaagtttatgttttcagaaaatgtataaaacaaaattttatatattcgggtttcgggtgggtttaggtgtaaccagattttttcggattttgaattaataaaacccgaacatggcgggtgatgaacaaatcatatgccacttcatttg

SEQ ID NO: 212803 - DNA, 735 bp, Cannabis indica
tagtatagctgtaattttgcacagtcacttatattataagcaacgatgcaggagactgttgtggattttctagtacgcaagtgcacgtatcgtttacaagtattagactcttaagagtgaggtcgatcccacaaaaactgtagttaactgccaaacaattaaattcttaaattctatttggcgacataaataattgagtaaaaggagtttaaagactttgataaagaaaataaagataaatcaaagtgcaatttagcaatgattaaaatttagggtgattaatttcaattgaatctactttatattatttagtataatataattctcaaattttagttttcatgtgatagcggatttactaaagaaatttatatttgggctagacatataaatatcaacctatatgtaaactttctactctcgtgataaatttaaacacataggaggcattaagcataaaagtcttaaattctacacaaactatataggtactctcatcttatatcaaaatctatgtctatttcactatagcatagtcaatactcactttttagattttgtacgtattgatatcataaacagttaattgatagccaaacaattaaaagaaattaagtacgaatgaaataacatagaaaatttgaggaagaactaaatcatattaaaactataataaagaatcaaacaatctccattaataccctaattaagaagtctagctactcatattcattg

SEQ ID NO: 212804 - DNA, 645 bp, Cannabis indica
gattaatgactttggtttatcttcattttgtgcattttttaaaacagaaagaaataagaaaatcaagaaaaaaaaaacacctctctttctctctcattttcaaaccctcaaggaactagcaacaatttagattttttttactgcaattcaaagtagttaacaaggttttagtgatctaattcaatgtataatccctcttagctcttcctctttatttatcctatgtttttagttgagttcaagcatgtttttctagagttagggttgtgttaatgattgatgtttgagattgtttttgaagttgaattaaggttatttaagtttaattgaggtgtagtggtgactagttatgaggtttatttaaggtttgagcttaagagctcaaactttattctcacatggtggattttgtttttggttgttatggttggttttattgcatgaattttcttcattatgatgttattaggtattctggaagtatttgtaagattaggggtcgaattggggttgttgtgtagtttttggtagtttttgcactaaagtggaattccagttcaaaggggacctgtaggatccagaattttggctggtccccaagaaaccccaaagaaatagaattccagttgtggaaccggtctacca

SEQ ID NO: 212805 - DNA, 634 bp, Cannabis indica
tgtaaaatttatatatgaattttggtatctgtaactgttttttttttcattaagataacaactctagcaaatatactctcatatatatattttacttcttttgcgactaatattatattttagtggatagtgaatggatggtctagtattgaagtttttgagtagtttgtaactcgtttaaatattagtatattatgttggtattagttttggtaatggattgatgatcaaatttttaagtttataaaaaacatgtaaaatttatacgagttttggtatttgtatagctagatttttcataaaaaaaaatagttttgattatacggaagaaattgttttattaatttattgtcttaccaaaattatattgttattattttagcttctagattggtttttttttttttttttagataagcttttatagttatagtgtgtgtaaataactaattattttatatgataaaaaatagaattataatttatagtttttatggcattaattttatctataatgttttttctcatatctttaagtttttttttaaaaagatgacatatttagtataattaaatttgcatgtcatacatattaaaactttaatttatttttttttctattattttgtaaata

SEQ ID NO: 212806 - DNA, 710 bp, Cannabis indica
ttatacatttatatatcacatgtcctagtagattaaatatctaaagttatatttatacggtactttccttacacaagtctgttaaatcttattaaaatatactaagatgacaagtgtcaacatattagttgtttatttgtattttccataataattaattataattgttgtaaaattaaaaaataactaaataataagaaaaataacaattacatagagaagaaacaaagaaatagatataactataaataatattacatatatttttattaattaaataaatattattttttatttttaactttaaaattatttaataagattttttattaaaaaactacttaacaaaaaatacatttttacgctttatttatagtttaataaattttaaaattatttaataacttttttattaataatatataaatggaccaataatatattgacacgtgctaacttaatctattttaatagaatttacgagctagataatgaaaaaaataacgtaaacttaactttagatatttaattctcaaaaagaaaaaatatgtttgtatataaatgtataaaatctaaaaattcatatatttatgtcgcaaatattcttatgtttaaataggatttaacagaaaaatagtgacagaagtaaccgaaatgtaacttaaggtatttaatttatcgaaaaagaaaatataatatttaagtatata

SEQ ID NO: 212807 - DNA, 904 bp, Cannabis indica
gtttctttctctcctttgacggtccttaattttgtcatttctcttcgaaccagaagcccccgagttatcaattctcgtggaagcagtacctgttgaaacattgctcggtttacctcccaagcctattttcaacaagttcatttcctttcaggctttttccttccggacaaacacctgagccctttcgttgaactcagtgatgcttcttaccggacgtccttgtaagtcatcccacaactcgccccctacggttaatggatcagtagagatccctgcctaaagggttgtaagttgcgtgctgtcatccaaatttctaaccctagcggcagccgtgctaaaatgacttaagtacaccttaagtgtttcgtcgggctgctactttatattggttagcgaggccgctttgggtctcatatccctatcggcctgaaattgcttcttgaaatccctagacagctgctcccaggaagttagtgaatgatgagtaaacttgttaaaccagctactcgctgctcgaacatgcgaggtggggaacaaaatacagcgtaaattgttcgttacattactcgctcgcattattgtgttaaatttattcaaatgcgagaccggatctgtggtttcgtcataagacgagacatgcaggtttttgaatcttgaaggaaatggggtattcataatatcagggtgatacggcttaagctccttgtcagagtcgtatcaagatagtttacctaattcccccacttgatatctcttgaacttgtcctccagcttgtttatccgcaattggattggatccccttgctttggaccaagctgttggcgaaggtcaggtttttttcaattgaagtgctctcgcagatccaggtgggagtaattgttggtagatcttgtcttactcata

SEQ ID NO: 212808 - DNA, 852 bp, Cannabis indica
aacagtgatctttatagtgattcgcggtaagtcaatccacttatgtaatatgtatcttctgatgtgtacatactgcatacaagcaattttcataaagccttaatattttagtttctaattgttttactatttttaatattataattaatggttacttaatgtatactgtagactctttgcaacagttgatcctagattaagaagtgttgttcttccatctgggtaatatgtttgagaattacttttgtaattgcattttaaattttcaataaaaaattgcagctcgtctgtaatgtacgtttattgattttcccatgttaatataattccagaaagaaggtgcttgtaagtgatacagtaggatttatatcagatttgccagtgcaggtatattgaaaaacaagttcaatgattatatcctttcacagtttcactacctccatgattattttcttcgtcactaatgaaaatacaatctatttcttcagttagttgaagcgtttcatgcaactttggaagaagtggtggaagctgatctgcttgtggtatgttcacccaatttcaatgtgaaatatgtataagagtagaaactttataagtgaaacttggacgatctgactgtcaatatcgtttaagagccaaatgcataatttctgtatcttaccaaaacacaagtaaaattgatgaataacttgaagttcacaagcactgactattgtttagttttgtgaattaagcactttttctctttgtttcccttcatgaatgctttagtgatggaaattttatggacatgtatttgtttaaaagaggtttttacagatttaattttatcctcttagcatgtgttgg

SEQ ID NO: 212809 - DNA, 630 bp, Cannabis indica
tattacatattgcaagtttttgctattcttatggatagaatatcttaattagttttttctgtgtagaatatttactagttcaccttcgtaattttcttgtacatacatagtatgaaccataagctactagatcatgcaatgcaaatattgttgtttcaattgaataatgtaaactaaagtagactgaaaaaatggggagttaggtggcataaagataaggatgagatgaaataaataaaactaagtagcttagtaaacttcagtgtttcaaactaacatgctatttattctcaggcaggagaaatggtgattaaagaatccgttgaaccattattggaagaataccgacctcctggaattacttcattaaagtttagcaaattgtctctgggtcgtgtagcacccaaaattgaaggtgtaaatccataactagttccactattatatctctctaacttaattgttctgactgcaagtcccaattatgctaaaacttcctgctcaaacttattaaggatttttgtttgatctgagttttgctttaataaaagattcctacttttagtgattgattatatttatctagggtccttcacattatttatttataaacctcacttatggcggagg

SEQ ID NO: 212810 - DNA, 790 bp, Cannabis indica
gaaatgacactaagaagaaaaaatatggtgatttttgaatgttatgatttgtgagggtttggccatcatccatatacaattttttatttttacaaaaaaggggccttttaccccaaaattgctattatagccctccactaccattgagggctaaaaatcaattttttatattttttgtgtttgttattttctttataaatgattttatttccttataatttattgtttccttgtaatttatttttcttgagatattatgattgggatatattgtcaaatgtgaaaaaagtaatggttggggaaatttttttaggatttttgaaatgtaattttagtatagtcatagtatttttggtgccgctgtgtcaagccgtcaacatagaagcaagacctgaactacacaagaaagttcctaccgtatggtcataccgctaggaacttgggggcaaatgtatatccaaatttttacgatgatgacgtgtcaagagtagcaacacgtggaaaaaaatacagggactaagttaatgaagaatatgtaaagtcatgaccgttgggatgaccgccaaccatgaagagttagtctaggggtataccctaccccctacaccctcatagcacaagtcatacattttataataacattctccaaggtatttggggacatccacattacaccatacctactgacaacaggcaaggggtcttggggggtcatcccaagatgacgattgtcacccccctcaagatgggtcctgggggtcacccaactagggcggtcgtcaccccctca

SEQ ID NO: 212811 - DNA, 650 bp, Cannabis indica
cacattactggaaaataagatatgacatatggattggaaaacaaggtataacataaccattggtacaaccagatttgcacaatgattgtcaaagaaggattatccatagacgccttcataggtaaatatttcttcttcttttgaattttattatcattattatattttggtgttttaatgtgttttttttttttggcttattatcattattatattgagaatatagaggtcatccatattgacaaatttataattgattatgtcatttgctttctgctagataccgcctatactgtagactcaatatacacaaaagtgatgttacttgggtttattaaattcacagtttaattctgcaaccatattcaattcatatcatattagtacgtacaactcacatctacatggatgaggatgtttatatacaataaatatctttattctgctattatttccttctcctttacatcacattgtgattacatgaaatgcatctctctctatctttcaagggattaactcaatttgatgagattctacaagaaacagatggtttcattctatctcgtggaaatttggggatagtctgccaccagaaaaggtcagcttttttgttatattatgtgcgttttgagaagaacatatttttg

SEQ ID NO: 212812 - DNA, 902 bp, Cannabis indica
atatattatgttttaaaaaaaacgtaatcaactaagtaatatatatatatatatatatattagtttataaattgaagaaacgaaactctcctctctctttgtgggacgaaatcttcttttaccttgatctatttcttcgatttttaacccaaaatctagtaattcaagctccagtactagcgggatattaaatcattgaaaatgagagcttaaggtaaggattagttttgttttaagttaaaaatgattggttatacataatggctttgtgatttaaagtggttatggaaattctgacttcatagaattgttctggggtagctatggaattagtttcgatgtttacttgttgaatttgaggtgattttgagttagaaattgagtttggaactttttgaagcttaagttcgagctttaatggcgttttccgtttaagggctcgattttaatttttgttacgtaaaaagtgttgtatatatggtatatatgtgccctgtgaagtttgaaatgatttggataggtttcagaggtgtttcggtgagtgagaaatttgagattttcgtgcaagatcgtttttggaaattcttaggagatcggaaatcgtatttttatcataacttttcactcaggtgtccgttttagacattctatgtaccgttttgaagtatgcaacaagctctacaatatggtgtatgttttacaactaaaatataagttttattttagtatttatactacaaggtttagtagaaaacccttgattgtcttatgtcaatattaaataatattttgggataaatacttattggtatactgttgttgtgacataggaccgagttcatcgaggaggtttctccatttgggttggccgatgtgcatgaatctagattaaagataagaaa

SEQ ID NO: 212813 - DNA, 511 bp, Cannabis indica
gggatcaattctttacgagtgcggtcctccccaagagctcgtgcaattgttgatagcctacgaatagagtttaaccgcagctggatatcatcatttttcagctcatctatgagaacagctattgggtaaagcggttcatcaaccatagccattgcaatgccaaatttatctcacagctctaaaaagacgaaaaaagaaatcggaagaagtgagaaagaaggaacacagagaaagagaagatttgggtactgattttaggtttttggggaaagtttcagaagaaatttgttcttttcaatcttacaacacacaaacttagaatcttattttaatggagtttacaaaaactaagggaataattagacaatgcaccaatttttttaaaaaaaaaaaaattatatttttacgtttaaagatttcttttttatattttttacgattttttataaaaaaattacataaaaataataaaaaaataatgtcaaaaacaacaacaaaaaaataacaatac

SEQ ID NO: 212814 - DNA, 937 bp, Cannabis indica
tcatcaacaactttgtggtcattgatattaaaaattgccaacgacattaaatgtcattgttgataatatttttttgtcgacgaactattccccaatgactttttcaccaacgaaatatcctcactaatagataatactaacgaaaaaggatttttcaccaatgaaatttatcctcattgatacacatatttcttatagtgactctttccagctcagtttcatgaactcattgccaagatgaatgtgaagaatttttacactccaccttgaaggaggctcttagagttttatttccgttactcactactacaaaaaccacctttagaggcagtttttaaggcttttagcgtcggttttgacgaaatttactaccgacgctaatcagggcgacactataaggttgaatttaactgacgccatacatacccgtatggcgtcggttattagttaataactgacgccatatggatatatatggcgtcggttcctagcttataaccgacgctatatatggcgtatgaaccgacgctatatatacccgaatttcaattttttgtaatttaatttaatttatttaaattatatatttattaatttatatattattttataaattacatatttgttttttaaaaggtaaattgaaaattatttaaattaattttagaattggctaaaatacttaatttcctttcatagaagtaattaaatattacacaaatattgtaaattagtccaagtattaacaagttaatctaaacaagttaacctaaaaaaataacctatggaagagaaattcttgggcctttcagcatcaatcgtcatcgtgaatcaccgccatcaaccattagattgtattgtcgcttatctccgaactgttaaaaaaagtaaaaatttatattagtttataaatataatatttgttattataataaat

SEQ ID NO: 212815 - DNA, 755 bp, Cannabis indica
gataaattccagttgatcatacagatatatattctcctcaagtaattttaaagaataaaactttgtaatttcttggaaaatactccaactttattaataattgaatttttaaaatattacatcagaaggaaagattacaacattagtttactggtattagggtcgcaaatgctccacgctccaatggttctttattagcgagccgttaagccaagctaatttataaactccaggtccaactattgcctcgatcacataaggacactcttagtttgggttaaatactcttgctgatgcatctctcgtatttgcaaatattcatcttagcactaaatcaccgacattgaagagccttttcttaactttcttattgaaatatctcgtaactcagtgttgataggctgcattagtaatttgcgagtcagtacatttcaagagttcttggttttcttcttgattataaaaatcttgtctgtaggtcgcaatattgacttctactggcagcattgttttcgagccaaatgccaacgagaatggagtatgcccttttgctattttctcaatctgtgagcccaaagcacttgtgatagttcatctacacatctaccctttgcagcgtccaactcctttttgatagtatccttcaaggttttgttaacaacttctacttgtccattttcctgaggccttgagactgacgagaagctcttaataattttgttctttttgcataactcagtgaataactcaccatc

SEQ ID NO: 212816 - DNA, 590 bp, Cannabis indica
ggaggaggtgagattttgactttgttcacgtacagtcattactatataacctctacaatatctctaatttgatagaaaaaataaggaattataattaagaaactgttttttttaaaaaaacagaaaattattatttttttatttgaccttaatttttaaaaacagttttcaaaaaaataaagttataagaattaaaaattttgaaagcaaccaaaatactgttttctattttaaaaaacaattcattttttgtcaatattatttttgaaaaacactaatcaaacgcgacttatgttttggtcaatatttattttttttttttttgaaacaataggatatctcatactctttagtgcatgatttttatcaaatcctaaacggttagatttggtatgactatgtaatatgccacataagtaattgttttaactaactaatcgagttaattaaaaccaatatacatgtcggtttagttagttgtaacacgtgtaaattaagtcctataaataacaatgtacttgtaatatgaaaggttaatccttttacttgtaaatttagattcatatgaataaagaaagtgttattacatt

SEQ ID NO: 212817 - DNA, 585 bp, Cannabis indica
cttaagtgtggttctttggctttgttgttggtttcggttaagtgctttagtggagtcttcttgaatgtgtattgaactcccatggtgtgtgagattgagtcttgaatctctaacaaatggtatcaaagctggggttgatcgaagatggatcttggagctgttgaagttgaatcttgataaatcaagaaggtgatgtgatctgccaattcaagcttcagaaccaggtgatcaatcaagtaagaagatggggaatgtcaaattcgatcttgagaagtttacagagaagaatgactttggattgtgacgagtcaagatgaaggcacttctgcaagatgctctattgggggagaagaacttgcctgctggtttaacagaaaaagagaaaacagagcttcttgataaagcacatagtgccattattttaagccttggtgacaaagttctcaaagaaatctcaaaggaggaatctgcagtgggtgtttggaagaaattggagagcttgtatatgaaaaaatcactggcaaataggttattcctcaaacagaaactatattcttttaaaatgacaccaggaaaagaaattga

SEQ ID NO: 212818 - DNA, 679 bp, Cannabis indica
agtaaagtttacaaaagaaacagaaaataaaaagaattctaaaacagagcacaatgttaaaattacctccaaatagttaagtctaactggaaggataccaaaagcttactgggaagagctgtaagcaatcgaagctaaagcctacaacattaaaataagaatataaaattgtgaaccaaaaacacgtgaatttattgttctttccgaattctaataattttacagataaaaataaattgagtatttcgaaaattaaaaaatatccacaaagacaattattgtaactataattaattatgagtacaatgagagtcaaatacaataaaaaagtagtttatcaaatttagaaaatgagagaaatagataaagtacaaatattgttggaaatgtagtttattaatctcacattgaaaagtgtgaataggagaaagagagacacacatagtaagcaccaattattccatgtaggtggtatgcatggaatgtaaattatcaacaaaataagaagaaaaatttacacgcttacctcaaaaacaacaacctcgagagcaacccatctggcaatgttccaattctcttttagaaaagcatatattttgtcaaagtctcctgttgcctcgcttttagtgaacgataatgagtcaattttgaagcaattaagagatataataaaaaatag

SEQ ID NO: 212819 - DNA, 1174 bp, Cannabis indica
aaatttacttccaagttttgggattcatgggagccaagttgatattcagtacagcttttcacccttagacagatggttagtctgagagaacgatttagatattggaagacatgttgtgagcatgtgtaatagattttgaaggatcttgaacaagttcctacccttgattgagttttcatagaataatagttatcggagttccattagtatggcaccttacgagatgctgtatggtaggaaatgtcgattgcctatccactaggatgaggctagaaagagatgttatcttagacctgaatcggtccaaaggactagtgaagccattgaaaagattcaatcttgtatgcttgcttcacaaagtagacagaaaagttacagtgatccatagcatagggatattgaatttcaagtgggagacactgtatttcttcgaatatcacctataaaaggggttgcctagatttgaaaagaaaagaaagttgagccctagatacatcggtccttttgagatactggagaggataggtcaggtggcctatctattaactttaccacccgcgttattcgtggtgcataatgtctttcatatctctatgttgagaaagtatgtgtcaaatctgacacatattttgagttacgatgatattgagctccagaaaaacatatcttatgaagaatagcctatccagatcttagaccaaaaggagaatgtactccgaaataaaacgacccctctagttaaagtcttgtggaggaatagtaaagttgagaaagcgacttgggaattagagtcacagattcgggagttgtatctcaagttattcaagtaaattttaaggataaaattcttatatgaaaggggatgattgtaatatctcaataaggttaatagttaataattagggtttataattataatatgggttaatcaggtaataagtggaattatgatcctactaatctagttcaatataaattttaaatttgctataaatagataaataagcataatttataaattacggagatttatatagcataggtgaatgtaatatgacttactggtgtaataaaaatatttttagttttggcgaccttggaaactcgatcgagggcccaaaatatcataataggcttaatggatagaattaatgagaatattgtgataagttga

SEQ ID NO: 212820 - DNA, 560 bp, Cannabis indica
gtgccctttagcatttctcagtaatataatatcttcgaaggtctttttagcatctaaaagaccaaattgcccgtatgattttccgtgatgtaattttctctagttatgaagaagaattattctaatccaaattacaatatatggtgcaaaccaaatgcagagtacattaatacaagcatatgtttctaatttaatatcaatacttgatttatttgaaactttaaggtaccatttggttagaggtaatgtaatagaaaaaaaattatttttattttatttgattgtattttaggtggcgtttggttgaatcaatgaaatggaataaaaatacaacaactcttttattttaattttttatttggttgcatttaaagtattggaatgacttttttattattttacttttcttaatttgtgtgcattgtcatttggtagaattttatttaggttgcaagaaccattaatgaaattcaatcttgcaacatagcaaaaaattcgcaatgtaccacattactttagaaaagaggataaaaagcaaaaaatataaaaatacatgttac

SEQ ID NO: 212821 - DNA, 813 bp, Cannabis indica
aaattaaattgcaatgacctatcttttgtttgttattttatagaattaatgacctgtttgtttggtatactgtatttaattttatatgaaagggtcattgtcatgttcttgaaaaaaataataataaaattttgttgtcatttatctaatttgacaatttgtaatgtgggagtatcttattgttattgtcgtatcaatatcaattagaattagaaattaatatattagatatggtaacgtgtataattattttattataaaatatttatgtatagagatagtggagtatggtatggttagaataggagttaaagtgagcccatgatctttagttttcactcatatcaagtttctctgcaacttatcaaaaaaaaaaagtttctctgcaactgttggtttgggctgcctctaggatgaaaaaatgagtttcgatacagcacacgagtaggaacatgaaatgaattttatgagttaagattggaaaacttaagtaaaagtaacaaacacatcaacataacttgacatgaaataaaaatatattaaatactaaatacgacgcgatctgcttaatctgaatttgacataattttttaaataaaaataaaataacaaattaaattgttaaataataatataaattttgtaaaatatatatttagtgattcaacgttaagttaaaaaaaaactatattaattaatttttattaaaatgaaattgaaattttttaaaaaatatagatctatataagttttttaatagaacttcaaatttatgttttttttataactctaactttaataatattaaaagac

SEQ ID NO: 212822 - DNA, 544 bp, Cannabis indica
tgaataaggcactcttagcgaagttggcatggcaatttgtctccaaggaggacagaccgtgggtgaactgtttctccaacaaatattgcagaaaagattcattttggagtgtcaacactcgagacagagactcagctttttggaggggtattttgaatactagagatattatatgcaaaggtagtatgactctagtgggcaaaggtgattcggtggatatatggaagcaaccatggatcccatggctgtcctatgaggattttactgaccttatgaacagagtgcagccccggttcccattcttttcttctttggctgatgtgtctaatcctgatggaagttggaacttggaccttctccaagatatgtttggagaaaggctaggaactagaattggcaacatcactcgacttcctttcggcacaaatgatactatcgtgtggaaggaggcgagtgacggaaggtttactgttaaaagaggatacgaagccaaccttggagacagtcattgcgatgatggaaagctgtggaaaaaggtttgggg

SEQ ID NO: 212823 - DNA, 932 bp, Cannabis indica
gactaggatcccgaactcggattcaaaattggacctggacccggacccgaactccagaactagaacttgaaccccaaacccaaacccagaacctagacctagaacccagacttggaccccaaacccaaactctggaccggacccagacctagacaagaacccaaacttggagcaagaatcggacaccgacccgagcccagtcctcgaaccccaaacctagacccgaccccaaactcgacccctggccctgacctggacccgacccggacccagatcccagacccagacctctgaaccagaacccaaaccccagacccaaactatggaccagacctcggagcttgacccaagcccggacacgacctcgatccgaacctgacctcgactaggatccagacccggccttatccctagacgttaaacacaactacgaaaccgaccctgtaccacaaaactggtttggggttcatgtttgggtttgggttcgggtcgaggtccgagtctaagtctgggtctagggtcgaggatctatgtccgggtatgtgagcaaaaatattaaaaatatatttttttttgaaaataaaaaaaataatattttgatgtttgttgttttgtagttttttaaaacttagttcttaagaaacttttaaaaaaatttagctaaacacccatattaatttttaaaggttattttttattttaaaaagttaaaaacagtttttaagttatgaagtcaaacagtccttagttgtccaaaatatctaaaagaagataaaatgtatctacaaaatttcacaattagatacataaattatttgaagaatgtgtgtggtattattccttaatcccccaacttacattcggttagttagttagtctttaactaacttaactgtcaaaaaaagacagcttgcatattgaatcatttggcc

SEQ ID NO: 212824 - DNA, 763 bp, Cannabis indica
gcagacaaaaacaacaaatacaaaaccacagatggacaaatgctaatttgattagacaatttcattgaagtttttaagatgatgagtttcagttgcatactgaacatgtattatattatgtatgttttatagagtatattagatgtggatcgtaagtcatagtattttaattaaaaagtgaatgtttgtatttgtcattttcttttttagaaataaaacatggtttggaacctgtaaagcttttgtttttttgtagatgacaacacaaatatcagattaaattatcttctcattggtgatacaatttgtgcttttgtgggagacaaacaatatacatgttcaatataaatataaggagattgtttagatttaaagaccaaatttatctaattttacttaactaatgtatcgattattcatgtattaaattatgttcttaaactttgatatctactaaatcgtatcttttaaatttttgacctgtaccaaattgtagttcctaaactttcattcatattaagtttctgttagtaaaatttgataaaaaactttaaatttaacaattttgatagctcgagagaattctttagaacataatttaatacatgtcaaaattcagaaaacaaaaattctaattaacctaaatgtactcaaaaaaattaataaaaaaaatgtaatactaatttaaaagctatggattgatctctttcatcattaaattctcagagttctgcatcacttttcacccctatctcatgttcac

SEQ ID NO: 212825 - DNA, 1128 bp, Cannabis indica
aaataatatttttaagaataaaaggcggtgaacttagataaagggtgtattcatatttttatggggtgtaaatataagtccccttatttaaagaataattactatttttgtcttttgaacttccgacactacttgattttttgccccctaaaatatacggcttgttaaaaattcttcctaaaatatatcagttacataattatgaccattttgttaggttccatttcttttatcattaaaaattagtattttaacccctaaactttgaccaatacaaaattttgccccattttattaaaagttaaattatttcaaaaattataatattctattttttaaaaaaaacaattataatattctattaatttagaaaaaataataaaaattattaaaaaatcgaataaaaatattaattttatttttaaaaaaatattttcaaaatttattttatttatcaacacgtatcttaagaaattaaaccaaaattattaaaaatctaataaataatttaaataaactgagattttttgaagaaaaaatcacacttatatatatttataaactcatatctcaataaataaagaaaaataattaaagttcaataaaaaatataaaattattttgaaaaacgttataaattaaactataaaaatgttatggttacttaaaacaaatctatattttttgatgaaaacaaaatatatttaagtttgttcccataaaatttagtgaatttttaatatatttttttagtatctaaatgaatcttctaatacaaaatatattttttttaaatcgcttaattagttttaaaattttaaattattttttaatttttttaatcattcaaaattattttttaattttttcaatcatttcaaatttttttttttaatattatcccaatttttatcctcatgaagtggcatgtttacgtggacagaaccagggccatgtggcattacaactcactaaaaggaaggccaagtcagcaccctagcaaatgaaggtcccgacactcaaacggggatcaagtgacaaaccaactcactcttaggagctggccggccagcccagtgacaactgttagaattattttaccaggatcttagatctactcacagtatg

SEQ ID NO: 212826 - DNA, 682 bp, Cannabis indica
ttttaatcttttattttattttatgtaatatatattataatcagtagtattataattatatttatataaaatttagttcttaaagtttttgtttttattttttttatttttgatcttgtttattacaatttttgtgtatgaaatttattttataatagtctaaaatcaatttaattatttaggtggagttatgaatattaatacagaaatacaagatgtggtttcagaagataatgatatgcctaatattgaagtggaagaggaaaggaaaaatgataaagaggaaatggggaatgaaaaaaataagaagcctaaggggaagtcagatattcgacagttttttaccagaattgagggtggtaatcctgaggatcctagggtagcatgtaatttttgtgggaaggtttatgttgctcaccctaaaaattatggaactagtactttacaaaatcatttgaatcagttatgtccaaagaatcgtaatagggtgaacaaataaaagaccttgtgttttgaacctaagaaagagggagagggtggtgctactgctaacttgattgcagtacaatttgataaacaaaagtgtaggcagtctattgccaaataaattttgttgaggtagttgccttttaggcatgtggaaagtgaggggtttaggtaattgattcgtcagttagaaccg

SEQ ID NO: 212827 - DNA, 929 bp, Cannabis indica
tggaggatgatgaagcttgtaaagttttggagcagttgcgacatatgcgagaagtggttttgaggatgatgaagatgataatttgttttttggacaatccactatagcgacggtttaaaatcgtcttagacgacagttttaaactgtggcctatagtattgactatagccgacaattttaaactgtcgggaattctcttataccgacattttttcaccgtcgtctattctactaaatattcgcaacgcttgtgtaggtgacaattttatagaccgtcgagaattctttacctgacagcgtaaaactgtcaggaatttcaagtttttagtagtagatcatgcagtcaatgtattttatctgatgctttctttggtgatgatctcaaactccttgaagacaattacaacaccaaacatatactcttcataagagtttttttttttattttttttattcaaattagtaaattctttataaactttatattgttttcaattttgtaatttatgttttaacttcgtgactaatagttttattttttctattgaaaaaaattaacttttactttagcaccgaaaggatttggagtttcatttttttcctcaaatattgagattcttttcattaatgatttactatttcttctctattttttttataaatctgaaattgtattgccacaaacttcatttatgaactagacagcaccaacaaaaaaagatggcttgagttgtttagctactgctatactatacatgacatatatcttctacaatttgcatatccatgctaaatcatgttgttttatcttttttggcaaaataaaagatatctttattttgatatcatgttttatacaccttattttaaaacatagatggttactacatgtaaaatatctaatgcagggaatagtacattaaaataga

SEQ ID NO: 212828 - DNA, 537 bp, Cannabis indica
tgtatatctattcatatcatatacctatataccaagagcaagggatgtgcttagaaaagttaagcaaataaataaataaataaataaataaatattggacaagtaatccgattgtattcacatggaacatttttgataagcaatacaaacgccaggaaagtaggcaaattattaaattaccactatttaattttcaggtcatatataataatttatttaaataacatcacaatcattaaaattccttacataaaactttaacacgttgcatcccttaaatggttcccaaatcccaataccactttattatgttacttaatcatatacgtgaccaacataaccatgtgaaattactaaacatcactttttatagttgaataaaaccttggtaattaaaattttataaaaccgtactataaggtgaatatatataagattagttaggattttttttctctcaattttaacatgtattaaattatgtttttaatttcgtcaaaaaaaaaattatgtctttaaagtagttaaaaaatatta

SEQ ID NO: 212829 - DNA, 820 bp, Cannabis indica
gtgggtagaatgctttgccatgtgcaatccaggggtccttcaaaatgttcgtgcccctaccatcagtgataactttacaagcccctctcctaacgatatcattagctttcaccacactcttccagaaccaggagtccgaagttttggccttacacctgagaatattctgaccccttaggtatttatcttcaagaatcctacaacataaggattgccaccccgtaagcagcttccaaccccatttagccaggaatgcttggttcatttccttcgatttcctaaactcaaggccactgcgagatttagggaggcagagcttgtcccacgtcctcaaatgaataaatcatttttcttctccttctctttctccttatacttttttatttctcttctatgtttatatgattaatatggtcactattttattttctagtataatctctagcataaatgcgcttaccttctgtatttctacaaggtgtccttgtaattcatgttattaatggtggcttttattttttccgatttcaaatggtataattatattttgagtgttgatttataattttttagttaacttttacgtttaaaatttatatgtcggattaatatttttttcatttttttgagttagtgttatttattatagctataatatttttcgtgtaaatttttaaaaaatctaaataatgtacagtattggaaaacaaattagcctgatcatatttcaatttactacgcgtggtaaaaagttttcaattttattttcggtattgttagttattcgaaattttttaaaaatttataaaataaatattgt

SEQ ID NO: 212830 - DNA, 606 bp, Cannabis indica
aaatcagttacactattagtctaggcctaaacatagtgccactccaatttaccttttcaatgtcatcatttaaaaatgttgaaaccatttattcaaaaatcaaagcaactttttagtttattttatatgttgttaatcaaataaaaataaaatatatttaaaaattattagatgttattacaaaaataagacactaaaatactaattagtttgtgaaaaatattatctcatatatattattgttatttattttaggtagttaactttaaaaattataatttcattttcaacctatatattattgatcaagatacaattatgttacattttagtttatttatttttatagtaaaaagatatataaaatttaatataatacaataaaataaatttatatagaatacatatcatatagtaacttttacatgtaaaattacaaacaatttatagtaatctaattagattagttaaaaggtataaacaatttgtttaagttaccagttacttcttcttttttattaaaaaaaaaaaatataaaagaaactataaaattacttttaattccaaaatttttatttggtcaaaacatctatggttccaacatgt

SEQ ID NO: 212831 - DNA, 689 bp, Cannabis indica
tctagagttgttatgataaaattgagtatattttctgcttttattggtgctaaaaattgtcttcaagtaggttatattaaaaaaattattaaaattgagctcaaatactattttgtactattatgaaaataacatggtccaatttatcattctacaaaatagatagttcagccggtaacttttaataaacaagggatctaaaatggtatttacctaaaaaaatttatctcttatttaaatttaaagtaattcgcggtataaatatttaagtttaactcagataaatatttaagttcaatttttgacggtaataatatctaaattatatttttaaaattttcataggtactcggtcgttaggtcgcaagtcattatccacatattattttcttattagtatatctaaaaataatttttgaataaaaataaaaatttaatgacatgaacaaattagaaattgacgcgtcactattaatttgatacttaatggtcaagtatctatggaagttccaaaaatgtaacttcgatattattatcgtaaaaaattaaacttaagtatttattcgtaaccgataattaaacttaagtttaatgccacaaattattcttaaatttatactctagattaaatattttgtatattaaggtgcctaataatatatcgtgagtaattagtgatttttaatatt

SEQ ID NO: 212832 - DNA, 761 bp, Cannabis indica
tataattttttaaatagtgagtatctattccaaaattcattttttactcttaataacacaagaaaattaaattaaattttagaattgattttctaattttttaaactcaataaattttaattattaattaatttattgtagacatatatttctataaggtccattttcaaaacatatatctttggcataaattaaattgaaatcaagaagttttagtgattcgataaatattattttggtgtgattaaatttaaatttataaaaatagaattgggaaaaaataatgattaataaatctataggaaactcatcaattttaaaattattgtcatcatcgtatctcactcgtcactacatttaaagtcgttgtcatcactgtatctcacttgtaatcgtcactatcttgaaaataaaaatataacaattgataaatttatagatatatataaaagataatcatacttaataaagagaatgaagagtattaataaatgataatgtaagcaaaattaatttaaattataagataatatcatgcaattagaaaattcttttgaaaaaacttctcaaaaacctgaaaaaaaaaataaacataagaggacaagttgataaatagaaaaacgtgatgattttttatttaagatttataatattacttaaaaacatgaacctaaaaaagttatcattgtttaaaattgtaattattttttttatttcagattttaatattactgaaaaaatatgaaaaaaaattttaaaaa

SEQ ID NO: 212833 - DNA, 558 bp, Cannabis indica
tcagccttcacctttccttgaccgacacatgtaaacaatatttatgaatcgactgactcagtaagaaaagcataaaacatataaacatattactaacttgcatttagtcgcccagacacctaactacaaggcttaaccgatgattaagaacgtttttaacaaaagtacgacctatgtaccacatgtactaagtactagtcccgtactagtgttggtagggctgaatcacacctcgagtacaactgagtgttgtaccacatgcacttcgtactcgtcaacatactagtgttggtaacgttgtgtcatacccctttaacatcatatattgtaccaatacactcagtactgcagccgtactagtgtttgtagtatatatattacataatacaacatgcatataatatacatgcagctatacatatacacattttatactaattcttacctcgtttcctgatttaagtgtgttggtaaacctgaatggaaattcacttgctgaacgaaggccctatgtcacaatcacaaaaaataggtgaacaactttctaaaaccttttcg

SEQ ID NO: 212834 - DNA, 507 bp, Cannabis indica
tattttttcattttcatatctattattgactatccaattacatatttgaaggttttacacaccaattacaaattactaataagcccccatactatttcatagtgtaacacacttgtaaatttttaaaaaattctgaatagtttacaatactaaaaataaaattatgtattttggtacacacatgactatttttcttatacgtatggtaaataattgtttaaatcttatcttgggcaatgggcactgcaaactacatagaattttctaaaaatttagaaatggtattaaatatttataatatatgcgattatgaaaaagattaaattaaaaaattattctaaatgtcgaaacaaataagaatctactaaaactactctttacaggggtctactatagaaattttctaaacattatggggtctaattcaaaacaatgtcctaaatactgtatacatttaaattatatcctaatgtctttttatagtaattctgtatattccatttacta

SEQ ID NO: 212835 - DNA, 579 bp, Cannabis indica
ggaataaagtggagattgaaactgatagtatgctcaccgtacaagttatccgtgcctctcatcggatgtccctatgtttttgatttgggttattaatgattgtaaacttttactctcaaatctcccaaatgtttctttgcattttgttagacaatcagctaatcgagttgcccactatgttgctaggcattctcgattcctttctggttgtagcattcacatacagaatattccgtctgatcttcaaggccttttgtactctgaatgctaaatttcaatgaagttgctattccattttttaaaaaaaaagcttactttttaaaaaagttgtgattaaaaaggttttttgaaaataacttattgaagaattatggagaagttataactaaaagctaaagctgctaaacctaactttaaaaaaaaaaaaattattaaaagactttataataaattattttgtactaaaaatatatttaattatgtattgtatattacaaataataataatatttttatgaagaaaataagatttaaatttcttattttttagtttttattatctcttaaaaaaatttatat

SEQ ID NO: 212836 - DNA, 1020 bp, Cannabis indica
caaagtggtagttcccgatcttgattagggtcccatttcgcgtgtaggtcccggtctgtgttcattaatggtccttgtctcgggtcttggcctagtctgggtctaggtaacgattcggttctcaggtcccagatctgagtatcgggtcctaggtcctaggtcccaatctcggtcctagtctgagttctagtcctagtccgggttcaggtttcggtcctagtctgggtttgggtccaagtcctgatcttagttcgggtctaagtcctggattcgagtacaacttatagtacaagtccaggtttgggttcggatctaggtctgggtttcggtctgagtccgggtttcaggttgtgtcttggtccggctcttggtctggatctgagttcttgtacggttctaggttctggtccacgtctcgagtcacgggtcctaagtcacaggtcctggcgcaagtctgggtccgggtttggggcttggtcctggtattaatcccagtctgggtctgggtctgtgttctgttctgcatctagatccagttttttggtccaggtccaattcctattccagggtcctaattgtggttcttgttccgatttcgggtctcgggctcgagtcaagtttaggtcctggtcttgaaatggttccaaggtcgggtcttggtatgattccaagatccagacaccgactacgggttggttccaagccccgggtcgttagtcaagatttagatccaatcttgggtcccagtctcatttcaattcggatcttaggtcccggtttgtgtccgtgtctggtccgggtctggaattgagacctgggttaggtcttttgtcccagtcccagtcctgggtccaaattgttgttctaattttgacttttggtccccaatctaggtctgggtcctgggtctaggtttgagtctccaatcccagtctgggtcaaggtccaagtgtgtgtctccgttcgcgttcgtgtcccaggtctcgatccgagttttgatttaagtccgcatcccaatcc

SEQ ID NO: 212837 - DNA, 782 bp, Cannabis indica
cgcccccaaataaaaagaaagaaaacactgaattccatgtgaattcgaaaagagtcgaaatctcaaaagtgaaatagaagcattagaagaagttgagagataaatacctgagaaaaggttgagttaatggaggaaatcggatgagagtgatcgcagagacactctctgtgtaaacaaatgaatcaaaatttcgcagaaagtgaggagtttactactactacacttgatttgtatatcaaggtgttgagattatttgaaacgcactttttgttttatattagtgcaagtgggagtttgttgggttttatgccctaaataaaactcatttcaatataatcagatttacttattaatatagatcagaaataacatttaatgttgcatggttcacatgatttatttcatgattatatgtacataatgtataaattcatctgaaacccttttcacatacttgatcctgtttattgtgccgtcaacacattggaaagtaaacatgactatgtgaataaagtttcctagatttatcagacatagggttttactgatatgataatctacaacagagtttacttgcatttggagaaatgctatgttctttccagagcattggttaaagtaaagctcaggttggatgcatggagtatgcatcggaagggaccgatattgaactttgacttagatttattaaacttaccgtaatatctattcaagtcaatatcgcctagttgatcctagatcaaatgatcttaatcctgttatgattaggctcaatcttgaaa

SEQ ID NO: 212838 - DNA, 362 bp, Cannabis indica
gacaaaaaatcagttcaggatccgattgtataattttagaaaatacagggtcaattttgtcatttaacaaaacagacggtccaattagtaatttttacaaaatacatgatccaaaatggcatttacccatatataaaagaaagtactaaagaaaatgaggtgacatcctataatattttaatctattttaaaagaattttagtaaatttaattcattttacatatttgtagatgttgagatatatgacttagtaagttttttttattatttgtaaaaatcccacatggattaagaactacattattagtatacttatgtactatatataaagtattcttacattcattttaggtcatcaaat

SEQ ID NO: 212839 - DNA, 785 bp, Cannabis indica
agaagtatcgctaaccaatcgtagaggcgtcatttataaaaagtgttaggcaccactgattaggggtgttcacggattggtttgattcggattttcataagttttgaaccaaacctaaccaaaccagtataacggtttttttaatattagaaaccaaaccagactaaaaaatttctcaaaccaaaccattaagaacggtttggtttggttcgaaaccacggtttatgtggaattgataattattcatatttttttagtaattgtactatttttactaagtttttaatttcatttttctaaatatatatttaacatgataagcaatagatctataagatataaataatgatataaaaacattctcaaaagtcaaacataacaaaaaaatctaaaattttatgcaataaaaaacttgacacacaaaaagttctaaattatacatatagtcatatataaaaaaatatataaattaattatttattataaacggtccggtccggtttaaccgttaattatatattacgaaccattacgatgtaaacggtccggattgaccaaaccatcaaaaacggtttctccggttacggcttacaatggttcggattgtagtggtccggatttaaaccgcagttttccggtttatatgaacaaccctaccactgatacccaataacaatactcataacgattttaacgtcaattataaaatcaaaatgtgtaagacctaatattaaattactctctcttgtggtgattgatacattgaggtccttaaacatttctct

SEQ ID NO: 212840 - DNA, 671 bp, Cannabis indica
ctgataataaaacttcagacttttgccattccaagctcttcggattgcagtaccatcgagttctgcaagccgataggtcgcatggccaattttttcagcgataaggtacggtccttcccaattgtcaccgaaaactccatgtgctgggtttttcgtgtttggcatgactttttgcataaccaaatcccctactcgcagagttcgttctttgaccttagaattaaaatagcgagcagttcgctgctgatagggcgcattcttcagatgggcctgatcgcgcttttcctctaaaagatcaagttggagcaattgtttatccgtattttgactgatgttgaaaacatctcttcgtagggaccctgccccgacttcaactggtatcatggcttcgcacccataagaaagcgagaagggagtttcgccaatcgtggatcgaggggttgtattatacgaccatagaacttgcggaagctcttccggctataccccttacgctcttcgagtattcccttaatggtatgcttaattattttattcacggcctccgttttcccatttttctgtgggtaggcaattgttgaaaacacttttttaattcccaacttatcgcacagttggcgcatttccttgcaatcgaattattttccgttatcggagataagtttgtaagg

SEQ ID NO: 212841 - DNA, 802 bp, Cannabis indica
cattccataactttattacccatctatataaatgtataactaaaatccaaaatatcattaaattatacttaatgatacctatccgacaataaaaagcaaattactattatcctttcatacttgcatcattccttaccatttaaaacttaatatttatattaaatgaataattttataatatcaaatttcctaaattttcatatcctcaattattttaattcggcttcacacttgacaaccaatcttttaacttaaagaactcttttgaatattaagaatattaacctcatttgaattatataagatcttttaataataataattatatacttctctcattctaagttattttgactgactaatagtaatgacgcttaaaacatataagtgtaaagcaatcaaattaatattttatgtaaggattttgaaaaacaatttcaatgcttgttccaccaaccacgtcaaccattaaatatatgtgtagaaataagtttcaattatatttatggcctataaatatataaatcatttttcttccgtcgtcacgttttcctaatatttcatttacttagtatttatttattttatatgctatttatagactattaatcaactaattcttactctagtcataccacacgaaaattcaattataccattattttgtaaccaattttcatgaatagtctcaatgatttttaaatgtaatattcaactataataaattaaagatatattttatataaatatggcaccactgaataataattatcctgcaaaaataaacttttatttaagacat

SEQ ID NO: 212842 - DNA, 552 bp, Cannabis indica
tgatagttttaggatgtataatttgtgattcttgatgaaaaagatctgattttgacatttgttgtgattcttgactcttgtagtcaagaagaacataaagaacgtgttgcgctcttgaaaaacacacttagattcgaaacacacccttgccagccatagagatcttgttcaagacttggctggccatgggtctttttcatgggggatggctggccataggggataccccaaaagttggtcgcccaatgcttgggcttagggtccctggccgacccttggaggggtcatggaaccctagttgtcctctctaagcttgggaacccaggtcggccaaggccaagatgtaaacatgtgccagttttgttctcttttgaccatgacaagggttttgtgaggccttgtaggcatatacaactgttatctcatacgtggttcccttggaaactctgtaatagacttttaggtgagtctattaaactcgaatgtagaacttaagactcaccatttgtctaagtaggtatacttgagttggtacttcgctgatgcccagcc

SEQ ID NO: 212843 - DNA, 832 bp, Cannabis indica
cacgcaagggttgagaggacccgttgtacgttagctccacaacctaccatccgacacaataaattcgtaccaggatctcatcctgagattccagacaaactttgcgataagtgtgcggactgctaaagtggatacggacctaatgctaatacaccagcgcctcgacgaacctctggaaaattttatcaacagatttagcgaagaatacgtctgtatctcgaaatgcaccgattcagtggcaacgaaagcgttaatgcaagggttgatacgtggttcagaattaaagaaggcgatagtagtggaacctggcctgtccctcacaagggctctaactatggcaaaaggatacgtggccttggaagtagaagaaaaacgacacagtgaggaagtgtcgcgcgaaacctcgtcgttgggagatacttttctttttcgaatcaaagaaccggaaaccagctgtacggcctcataataggactgacaaccgctcggccaacgaaaaaaacacccgaggggcagtaatggtgagtatgggcgaggcggggcagccacacgctcaacagggagaagaggagctaccacggatgaccattaccttaaccgagttgataagaagactgcagggattgaaggaaaccaagtggcccccaagaatggccactggccccggcaagagggacaaagggcgatattgcgcctttcacagagaacacggtcacacaacttacgagtgcaggcagttgaagattgaggtcaaccgtctggtgaaagaaggattcttctgggactgcctcgcttcgaacgccatgcttcacatccagcggggaagtgacaa

SEQ ID NO: 212844 - DNA, 722 bp, Cannabis indica
tttttaaaaaaattctgaataatatttacacagttatttatgacctataaaaaaaaatggtcacatgtgcgtaaaatatttaaattttatttttaacacagtaattttctttttaaaaaaaaaaattacgagtaattttaattaaataaaacatatataattataaaaaaatatatagtaaaaaactgtaatacattactgatacagataaaaaaaaaagtgatgaattgattattttataaaaggtgtatgatatagaatttctcacatgtatatcactaatatatatgtataaatatacatatttatatattctttaggttaacgtgaatgaaacacccatatgattcttttattaaaatacaataataataataataattagcaacattaattaaaagattcacacatgctttggctcttatgtataggctttttgtgggaagagggccggggcggtgcggacccatctgcgaggccataattcagggacattattaggatattatttatttattttttattaattttgctatataatatgcttttatttacatattcacttaatataaattaaaattccaaacttaggatcgaacccaaaaataaaaggattaacctcaacctaatgggactattggagtgagactaggttgaattaattattggtccaacctaatgattacattcctaggagaaaacttgaccattttagttgacac

SEQ ID NO: 212845 - DNA, 795 bp, Cannabis indica
aacaaaggaaagttcagctgaaaagtgcaacttttctaagaaagaaaagagcaactaaaaccgaaaacacaaggtaagaatttgggtatgtatgcaaaagaatcttaccataaaaggaaaaatattttgtcaactaacttgccaaaaaaggactttacacaatccaatcaaacataaataattttatttcatgtaagttctctttcaaataatgagtgtttaagaaattagagtatctttataaatctactctagtttttgtagacctgcataaatcttcccatgaaagttaaactttaataaataaacgcaaataagaaaaaataataagaaaacaataaagaataacttcatcctatatacatgcttgaaacataataacaaaattctgaatttgtactatattcttctatgaacgatatagtgatatccttagtttttgccatttaaaaatagattttttttaaaaaaaatacttaaatgtcaaatattatacatgaattacaaaattataatataatttaaaaaaaaaacaatattactccccaaaaaaactaatgtaattatgcaggtgcttcattgcttttcttggcaacattaaagattgtaaacaacctacaaaagagaattaagaggttagagacttcaaaaataaattgaaaaaataaacataaaaatatagtaaatacaaatctatttataaatatttttgtggctattaattttttagttataaaataaatttaaacataaaattattaatataataaataataacttagaaaaattaatttg

SEQ ID NO: 212846 - DNA, 524 bp, Cannabis indica
acacattcttagtataattatattatcctcttctctgtgttttgtttttattcataattatctaaacttttcataaactattacattttgacaacacataatttattttttacataaattctttatttctttttagattactcataattagtatttatatgccatacacaataaaatataaatttatataactaagttattgtagcacatttagcagattctcctatttctagttaagtgacattagttcaattctttacattttcactttatagttttgctttattcattattattattattttattgtatttgaataattttttctgaggttataatacacattttttagggattattttacaaatacatgaaaacaataaataaaaaattacaaaaatacggctgtacgaaattttaaatattttgacgacttttataatttttttttacagaaaatacggtctttttatgttgtacttttcttaatttgttgttgaattttgttatatgtgtgttatttt

SEQ ID NO: 212847 - DNA, 504 bp, Cannabis indica
acttatatagtctcccagtgccaagatctatagggaagacttgctcccagatatttgaagaggctggttgcgatacacccgctagccctagttgcggtgcttgtttgggcggtccaaaagacacttacgcatgcatgaacgaacctaaggcaagttattttctcaagtgttattcttgtttctcttttaaccattaaaacagtccactttgcacaaccttgtctttagttaaggacataatgtccattttataactctggagcgtggtcggtcattgcaggtttgtgtgtcaacaacaaataggaacttcccaggccgaatgggacacaaggaaggtgagatatatcttgcttcaccgtacacagcagcagcatctgcattgaccagctatgtcactgaccctagagacttcttacagtaagatattcatagtcgtcgagttgaatatgaactcgagccgtatactgtttttctgtggaggctaaggagggtaaagcttgactt

SEQ ID NO: 212848 - DNA, 1099 bp, Cannabis indica
agagaataaaaattaggtttagtttagttgaagtgaatagttagttcaattggatgagatgagaccatcatgttccttttatagtatttcaactagggcttaagtttgaattatatagattaaaacagaataaaatattgggcaaaaattatacatagtagccagccactaaagggtcttttactagttacaattttgccactttatttcaaccacttattcttctttcaataataccatattttctaatttcaatcctacaaatgccaaaactatttatttaataattaaattaattatcaaataaaatttttatttatattatttattatctcaactagtgtggggatcataggcctatataatcaaacttccaataagtagaactggaatttacaaagtaaattctctaacttattaattcttccttgcgtcactatagattcgaaatttcactcttaattatatagaactagtagaactaatattgaaatattagaaaaaggctatttttttttaaattctataaatgaacaaaaatgacctaattattcaaaatagaatttaaaaccaaaactcatctaggtctttcatcatcacttggcttttatttaggtacaataaattaaatcatttacaaaacaaaccatagtgagaagctcattttcattagatatgcctaatatgacatacttggaacactttaactttattattattattattttaatccctcttgcaaaagttatagataattccatatctaatatattttgtattttctttaatagtgtttcatatgcaacattctgattgttatctttatttttatcctttattgaaacaagatagctaaaaaaacatgcttgtctctttccttttcttaaaaaatttctcatttagtatgagaattaactttatgttagtagatataacatcgtgatttttatctttatttttatcctttattgaaacaagatagctaaagaagcatgcttgtctctttcctattcttaaaaaatttatctcatttagtatgagaattaactttatgttggtaatacttttaataaaacaagctttttttctctctctctct

SEQ ID NO: 212849 - DNA, 762 bp, Cannabis indica
caaacaaaatatttaagggtaagtatatagtacattctttaaacatgtatttcggtatactcttatttgtttcgacacctaagagagcttttaaattagtttaatttttttttatgattgtgtatgttatagttatttaaaattatttgtaaatttttataaaactctgagtagtttacaataatgaaaaataaggttttaatattttgttgcacacatgcgattgtttttttttattaacttagtaagtaattgtttaaatcctactttcaactttgtaattattcagaatttttttaaaaatttacaattaatcttaaatagctacaatgtacgtgatcatgaaaaaaaatctttaaaaggtgtattatagacatttttaatatttaatatgtcaagtaataaattaataataactcatttgcggtataaatacttaagtttaactctcggttgttaataaatacctaagtttaatttttggcagtaataatacttaagttatatttttttgaactctgtaagtacctgaccgttaaatgttaagtcaattcatgacctggaccaatcaaagattgtcacatggcaataaacttaacatttaacaatcagttacctacaaaattttagaaatataacttaaatatcattaccgctaaaattaaacttaagtattttttgtaactgtaagttaaatttatatatttatgacgtaaattatttaaaataatatattcacatttatagataggttcaaatttt

SEQ ID NO: 212850 - DNA, 548 bp, Cannabis indica
aaatattttaactgctaaaaaatacaatgctaataagctataaaagagcaaataatatataagctaattaacaaacgtatatatatatgttcattaattgtttttttactgaaaagatgagcattttttttagtaaaaatcaatttaaatttaatataatataatgaattaatatatattcaaattgtgttggtgtggtttcactaccaaaattacaaataggtgacatttgccaaaaaatattaaaaaaataataatttaatgacatttaaaaatatactacaatatctaaactaagaatttaataacattaattaaattcaccaaaaatagattttagtaacacttaaaaaaaatgtgactataactagatatagtgatattttaaaaatgttacaataatagtaatttaatgacatttgctcaaaaatatcactttagtaaaaatagataacattttaattggtggttttttttaaaaaaaaatatgactaaaagtatatttagatttgatcaaaaatgtcactaatttgtatatatatatatat

SEQ ID NO: 212851 - DNA, 911 bp, Cannabis indica
atatagttacataggattccacagtcacatgaccctcttcagttttcttgttaactgaaaattttgaactctctgtagtctatccaacgagtatctacaggtggatgaaatcacttcctttccttctatcattactgggttttcatttcaagatctgtcgtgctatgctttgcaggatttgcagcgaacaaattctgctacggtcactgtgaataaccttctccaaatgtgaccagaccagaccagacacaatgtttcgtttttctccatagaagaaaggagctttggaagttgctaagtacttcagcaggtttggttaccacaggcctctctccctttgtccatgttttcctctttttttttttgaaattttttcctccactcatattgttgagcttcattcactgtatatataggcagctcactaatttaatgtaccaaaaagaaaagggaaagatgcaacagcatagctctcttttgtaccaccggtcctgtgagaaataaaatatcaaatgtatcatttaacgtaatgtatactgtatagtgtcataatttgcagggtggacctgatacgccaacatgatctactcttattagcaagctggcaatggaaatttagcttgtttcatttgaatggattacatgttttatttaatgtatattttacaagttcatgtttgaagtattcagccatgaaattcagtttcattgttatggtctctccaataaatttaagagtggaaggttgtatatttccatttttgtttctttatattatgtcatcctcatcatctagccactgaactaatatgtttgtactctagtcaacccagaaaagtatatcataataccctaacatctatttgaattcgaggcacacattgaatactatcatgagagaaaaaattgaa

SEQ ID NO: 212852 - DNA, 832 bp, Cannabis indica
gtaattaatttcttgcatcaaaaattggatacgagattgagtcgaatgatttgtatttttagcccaagcccgaaggacagaaacacaatgattctgctgggccagaaaactatgaaagccaccacccgtggaaagagagttaggtccctctttccaagcagtctccacagttctatagaaatcagaatcctctaaccacacattctcaaacctaaatcgagcacgggtaggagtggaattggctcgagagttaggaggagttaaaacaagcttaaggactctatgatcagacccgtaaaaacccaaatgatgcaaagaatgctcaggaaagacatcacccaagaatcagaagctacaacccagtcaagtcgttcacggatagtcttattagtccaagtgaatttatttccaataaaagaaagaggggccatattaaacttatgaagaaaattatggaagcaatccatggacacttagaaaaaaacttactttgcaaagaaatgttattgcaataaaattttttctttttgtttttttttaatagtgattagaatcactataagcattcacaatgtagacatcaaacagtatatatataagaacagtaaactaacacactgagcacctctacatatctacatatcaaaatccataaaacacctacaaaacatatataataacattaataacatattgttgcataaaaaaaaaaacattaataacatattgcccgacactctatgtctttcgctgaacgtatgttccttattaatagtattccttaagagttgttgtctattctattaggtgatagctcttcttaataaataac

SEQ ID NO: 212853 - DNA, 1114 bp, Cannabis indica
aaacaatatgcatatacatagttgagctataacaattgttgtaagcaataaatatgtaagcaatatagaattttttttttttacaataattattgcaaagaaagaagattggtttttgtttcttcattgggaaaggaataaacttcaagctgtttgaatgactattatactaccagacagaggagttctttgatgtaagcgaaacataaaaatttaattatattaaaaataattaaaaaaatttgaaaataaaaatcctaatataatatatttaagggataattttaaaaaaaaattataaaaatacggtacatacggaatttttaatatttttatgattttttttagattttatttacataaatacgggtttttggtgtatttttatgttgtattcttgttatattgttgttgatttttgttatttgtatatttttcttatgttgttttcttgttacttttatgtgattttcttgtattttttatagaatactgtaaaaatatatatatatatataaaaaaactttgaacataaaatttaaatttttataaaaattaaatgttgaaatatatttttttattttctctaaaaatttagatttatttaactaaatataacatttttttagtttaattttaaactttttttttaaaataatttatatttttattgaatttttaattattttattattttttaatatatgagtttattaatataaataagcttaattttttcttcaaaaatttttagtttatttaaattattaattagaatttcagtaatttttgtgttattttttaagatacacatttataaataaaataaaatttgaaaataatgttttaaggaataatgtaggttttttcaagtaaacattatatttttttagttaatttaatatttttattaggttttttaataattttttattgacttttttagaattaataaaatattataattttaaaattaatattttttaataaaaaggggtaaaattttgtatttgtcaaaatttaggggtaaaaatactaatttttaaaggtaaaagaaaaaaaagttaaacgaagggacataattatgtaagattaatggcacgtttactacaca

SEQ ID NO: 212854 - DNA, 602 bp, Cannabis indica
aatttttcactaatttttgtttaatttattttatattaacatataattttttgtagacctatataaaattttcattattaaaatatgtatatttaattttttttaaaggttctatatttgaaaaaattctattaattccaatgaaatcagcactatgtaagctgttggaggcaaaaagactggaacacgatactattctgaactaagtggcaccacgtgaattattggaggcttaataaaaaaaaagttgttaatcgcacttgtaaacgaaaaagttaaagttcgatagacaaattgtaaaaaaaattaatgagagagaaatataaaataattttattagttttttttttgtcacatatatatatatatatatataaataagggagggctataaccccccttatgtgtgtgactggctactcgataacttttgcatgctttcaactactcacgtggtgctatttagttcggtttaatttaatcgtgacccaatacattgttttagcattaagttaaaaaaaaaaaaattgcggctaaattttgtaaactaacattccacttgcaagtaaccatccaagctcaaattttggtactaaaactct

SEQ ID NO: 212855 - DNA, 911 bp, Cannabis indica
aaattatataccacaaagaaattgtaacaatactaaatgaatactcaaaatatatatatcatgctaacaaaattatatataccactactaaaatatgtatacatatcaaaaaatttatatattacaaatagaaactaaacatcatcttaaataaatcatatactatagacaataaaaaatatataccatacaaaaaatatatatatacctacaataaaaaataaaaaaataatataatattattaaaaaaattatatataccatattaactgttatccgcattttcataatcataacacgtggatttttaatcaagaaagactaagaagtcatcagctgcccaacttcctcaattgatgctccaggaagataaaggcaccaacttagtggaagagtgtccgagaaggggagttccccgactgctagctaaacggaggggatccgtaagccaagctctccctccattccaggaactaaatttgtctgctctcgagaagaatatgaattttccaagaagggccaaggaatttcgagacacgctaaactgggctacgcctttagcccgctaaagcctcacctatacgtgttaaactacggccccagtaaccaggctttttcatgtacgacgttagaggctttcccccacgatacactatcatacagagcatgcgtgtccttgtgtacttaaccaaattatccaatggctagagataagggaaattcaataggagaagcgctgaggtgacacgcgtttgtgccccagctcatacgagatgatgcccttaaatgccatataggaaatacgccacttactaatccaatagtcagatgtcaccctaatgtcgatccatccaaggcagtgttgggttttatgaccaaaaataaaacttaaattcaatgtaatccgtatt

SEQ ID NO: 212856 - DNA, 781 bp, Cannabis indica
aaaagttcaagaatcaaaatcaaaattacatagtgtatgtgtagtatagtaatagtaagtaagaaagattgtgattgtattagtgtgtcatgtgactactacacactatacaatacacaacatattatactattaaagttcataccatagtccataatattactacatattcatagttataatgttcaaattaaaaatatacttatatatttaatgtccatataatcatttataaaataaatacatggattggtgcctcggctcctcaatattaaaacttgaatttgaaacgttccttggggcttaggctttgactcctcttctttttttcatgatattatctgtattccaaacaggactagccctaggctaaggcggactaggcccgcgcctagggctcactcctattaggggtctaaatgaaaaaaattaacttttaataataaatatatatatatattttttaataatttttaaaaatattatttattgttataaaaagtgtctaaaaatattattttttaggacccaaattaactcagagtcggccctaattctaaagtttcgcatctttcataatcaaaatcaataatcaaagaattaaaaccttaagtagatatatttaaaaaatatttacttaattaatacttatttcttactattaaattccaagttgattgcactgataaattggagttgcctaaggtagtgggcgaagcaatggctgttaaaatcaaacaaatgacaatacctaataatacattaatgcatattttaatat

SEQ ID NO: 212857 - DNA, 570 bp, Cannabis indica
caacaacatataatatgactataaataaaatttaaggttctgaaccctcacttcaacagtgcacattaactatcaatggtggtaaaaattggtgtaccggatgcatcgccgaaaataggggtactgtatatcaaaacaatcacctcaacgagtagatcacacccataccaaccgtttatcaaaacggtacacgatattgctaaaaagttgccgaaaaagggtggagctacaaaaacattactggtaaaaaatagcgagttgggcgaaatagcttagtgtaggttgttttcctcgacaagctaagtctagtggtgaaggcatctcgtcaaacggacaccggaggtggtaaaaaaatatgttcaaagtttgaatcgccaaactttgacttgcgatctcgagctaacagcagcgaaagaagtagtgctgcttggggggtaaggtcgccagcacctggggttttgattggtccgagacgtggggctggacggtggccggagatgggtcgctggagtctgctagtgatggggtttgtgggtttcttttggctatggtttgaagagagagagagag

SEQ ID NO: 212858 - DNA, 597 bp, Cannabis indica
aaaaaaaaaaaaaagagtaatggtgtgtgtaatactttgtcaaacaccttgcaaaattgcactttaagaaagaaaaatacaaaaacaagttccaatttcaaaatctttgcttatcattagcatgtttacttaaaaagtgaagagaatcaaatattgatttctatacaaaaattaggaaaaataaaaaaaaaaaattagtttcactatttttataaagaaatacctttccctttctcaacatccattatttttattaattaaaaataaaaagacaaataaatctttcaaaaatttataaataaaaaataaataaatggtctaataatgacaattaaatcaaattttttcaaaaaaaaaaatcaaattaaaatatttgaattacttgttttaattatttaaacaaaataaaataattttaattttcttttgcgacataaaagtattcatttctaaacttaattgatttgttgtaatgaaactttataatgataatatatttacaatgtaattatcattgcaccatttatatgaataagcattaaaactctatacttatgtaatcacaattgcaacatttatataaaaacaaaaattatc

SEQ ID NO: 212859 - DNA, 2099 bp, Cannabis indica
gttatattatttaatatttgttttttgataaattaattatttaattattaaaaagtacaaaaagtaacaagataaaaattttccgtgctctacagtgtctcactatttttagtggaacactgtagactcccctatatataggatgaacatttaaagttgggttggaacaattttgtgtaaaaactacactatttttgagtttttgctgtcctattagagatggcctaagctcgttgtcgctaacactattttaatgcgaaacaggagagagggtattaacaacctaatagtgcttttttttttttctttgagaataaaaaaaatgtgaagtctttacactattttatagtgaaattttgaggtgtgattttactcttttgtaattactgaaatttatatcaaaacctcaacaattgtcaattatttagtattttcccgaaccaatgtgaatttatttttgtaatttatgtttatattttatttttacttccaatattcgaaattgatcacttagatcaaaccagggtttatttatttattcaatcacctaaccacattattcgtcattgcttattcctatatttttagcaactagtagaaaacccaataatgcagagcatattaagattcaagtctctaatgcaaatacaaaatgtttacccaataattcagcatatgaagatttaagtttctaatgcaaatttcaattttctccctaaaccatatcaccaatcctatgatgaaacttgaaaaccacacgtttcaaacagtgacttcagttttttttaattgctatacaagtgacaagggtgttatggagtaagtggagttactaacctgttctgttagagcaaggttggcgtcgaagaaagacttgatggttccaatgtcctcccagtagtcattgaataagtatgcctgacatggatggtagataaataaactcagaaaaactgttacacaagaatgaggatccaaaaaaaaaaaatagttgaagcatcaaaagctgccttacttggacattgtgttctttcacggctgatggaataatttcagaaccaaagtcattacaatgaggatagctccattttaatagcttcaacagaacatcagttttaaacacataaacacccattgacgctatataaggatattttgctgcatcattctgtgacagcccgagaacagaggtatcaacttgctgcagcaacgaacagacaacattattagactaaggctccagaaagaacaactagtaaaaaataaatgtaaatcgagtagatggtaaggaaaagttaaaaaccattgttttcaagtcagggccctttggtttttcggcgaattggataacacgtcctgtgttgtcaattttcatcaatccgaaatctgaggctcgactacagtaaaatttaaattcacatcatgttaattctcgtattcagaatctggtgctttaaaataacacaacacacattgattcaagtacttcactccaaataaaacaaaaagattaaacacagagtaaagattttagtatacccatcatccataggtaagcatgagactgtaatatcagcattggtgtcaacatgcttctgcaagaaacagtgtggcaaccatgttaaaggcattttttttatataataaagctaaaaaactactttaccctagtgaaattcaaatagatacctggacgaaatccatatagtccatccggtaaagatgatcgccagacagtatcagaatgttctccacattcttcgtcttggcatcctgcatttgttattaaataaaaatttaagtttttatttaagtaaatcttaattactcttataccaagctaatctttagcatatactatgatcccacaaacctcaaaaacccatataaattgtctaacagcatcagctgttccttggaaccatctcttcccagaatcccctggagtttgagtggcagccagaacctgtttcacaagcaaaataattttgatttgagcttgtcaattaactttcacaaaaacattatcaccccactaaataaagcaaaagaaaaatctttctccgatattcatcttacctccacaaaaccatcaccaa

SEQ ID NO: 212860 - DNA, 608 bp, Cannabis indica
ctttttctgcatattggggattcccttggtgatagggaactggtgaccaatctcggggcagataagggtgccttcttcgaggtgaagttggaggagggcgtggtgaaaacggcaaaggaagtcgtcggagtcgagcatacaaggatcaacctcgttggggagctcagtgtagtcgattgagcgagccgccttgactagggcgttccagtcaattttggagaacatggatttgagaaaatcggggtttagttcaacctctttctcgactactttcaccacttcgatccggagagggaagccattggtgaccccaatgatgttagaggacagcatgttatgagtaaggagtctcatattgtacaactattctctcttccaagctttagagactgatttcaacacaacaaataaagccctaaccctaattataacctggtttaaaataagagtatcccacatcggttggctcttcttgcacctctctgaaggttggagcttgttcggataccttgggccttcacgctcggagggtccgtgatgagagactccgtggcttttggcattggggacgacgtaggtgcagagaggcttggatgaggtgatattaa

SEQ ID NO: 212861 - DNA, 671 bp, Cannabis indica
aaactagagaatcagattccaaataagtaaccaacaacttgtggtgatcagcccaatctaatcccgtgagtaaagctttagcttccatttcttgtgacttgtatctacctgtgaatgactttgaataagccgcaacaacttgaccagaagagtttcgaacaataataccaacaccaattttgttacgggaaacatcacaagttgcatcaacattcatttttaattcattgagaggtggccgaatccatttagattgagtagccgcacctgtagagatcgtggatgagttctgattcgtagaatgctgctgaaaattgcagtaatatgcagcagatttcgcccatatttgtgatggagaaaggactcgtttgccatgtatgtaattgttcttatcagtccataaaaaccacatcgtgcataacatttgttccatttcaaaagtggttttaagagtggatagcaaaaccagacaatcactgaacttcattcgtgaaagcatatcataatcaagagaaaaaccagcagaattgctaaactttcttggcatgtttacagagaaacagtgcatgttctacagactcccaggcattagagcaaagactccatgctgcagaatcaattatctttctgttacataatgaagcagcagtaggaatagctcgatgaaaagc

SEQ ID NO: 212862 - DNA, 912 bp, Cannabis indica
tagcaacccaaagaagagaaacaaagttactccacatgcagtcctcatcatgtcgtagagcttccctagcaaggacatgagcttcaatgttggcagttcttggaatgtgcttgagggaggctgaagggaaaagagatagggactggcgaatcaactccacgaggctaggacagagctgagttatgactccacttactgttgactttcagaatgagttgttggcaatctgaggtgataaggcttggctgaaagtgagaattgttgcaccaacttaaacctggaaggagagcttgagcctcggtaaaaaagaggggggggcggggggagggggcgacctgagatggatcgggaaagggacgttgcaagacaactgattggggccgttctttaagtgcagctcccacgacctattttgtagaccttttaaattctatcgctgcatcaacacaaaggcaaatacaattcgggacaatgactaagctggaaccatctgcagggttagaattttgattgtgttgtctcacatttggggtgagacctttagcatttaagtgcatagcttccctgtaatcctgcaaaagtcttttaacagaatcttccacatcaaacaatttagttaaggtattgttgaagagagcattatttcttgcattccaaatttgccatagaataccaataagtaaaataaaaatcatctttttttgagattttctaaaccttggagataaaattccttgacatcacagtttttataattgaaataaaaagttttgagggaagaatgcttcaaacagatctagccttgggacaattcaagagtgcatgtgagactgtctcgcttgacttctacacgagctggaatggggtctttaagagaatttttattgaaaaggttcagtgcacagggagata

SEQ ID NO: 212863 - DNA, 922 bp, Cannabis indica
ttaagtgttattaaatgttgtttctgtaaatatacaagaagaaaaaaattgctttgaattgtaaaaaataaaaaaaaaatcatttatttttgcaaaagaatttttatattaaaatatctaaaataactttatttaaaaattaataaaatctatatacacatagggtgatgatttagtggtttatgttaaatgccccttttgtctcactacagctgaaactacttttcatgcgttagttgggtgtgttcatgctcgtgcttgctgtaacaaatcaagtgtggatgttggcagcaatatggaggatgatttcagcaattggctgctggagctgcaatgtcgaggaagagaaggcgagttgggggagacggttatggtcagctgagccatttggcgggccataaataactttgtttggtagcaaaaaagttggactactgcaaatgtagttacatcagcaagagtgctacttgatcaattcaaatatgctcaaaaaagaaagggtctttctttgtcttcgttgttcgacagaggtcgtttggttgagcattagagtgcaccttcttcaagaaagatcaaggttaatgttgatgacaccttatttgagcatgaaggcaggtttgagtggggttgtgtggctcgcgactccattgcaatgctgtggaggctttcaatcagagtcatttggggagggttaaagctgaagttgctgagatggttggcatcgaagaaactttaagttggattgatcgacacaattggggacaagtgattttggaatcagacagcttggtatgcatacaagctattcaaagtaaaatctctatgccatcttcttttggtcttttagtccatgatgttcgtgcgttgcttttatctttagacaatgttgaatcgtgttctgtcaaacgatttgcaaacaagc

SEQ ID NO: 212864 - DNA, 512 bp, Cannabis indica
aaataaactatataattagtaagatgactcttgccatcggttagtaataattcataaaaattattatattaaaataaataaaatcctataaattaacaacaatagaaacggtgcctttattatttctcaaaattatattgtattaatgagagacttaccagaatacgaatatccctttaacgtgtagggtctctgagtggtccacgagttaatgggcaagatctcctcgtggcacggcgttgttatcactgagtttatgttcaactcgtttattatatgttcgggcttgtaccaccatgctgcaaaaatattgtaaacaaatgatattttatttatttatttattgtaactacttgactgaaaagtcccggaacatgaagcattaattgcccaaaataattttatttttgttattgttttttttatatatatatatatatatatatataagaagaaacaaagaatctagtgaaatatacaaagaagaaattaactatctattattgtgtatt

SEQ ID NO: 212865 - DNA, 788 bp, Cannabis indica
aaaaacacgtgagatatcctcatgacgacccactggtaattaccatatagcttgccaataaaaggacaaaaagggtgctggtggacatcggaagttcagtgaacatcctttataaggatacactgaggaaaatgggacttgaaaaagccaaattaaaaccttccatggtaaatttgtgtggatttacaggcgacagtgtcgccagtcaaggaataatcgagctcctattaacattgggcaaagcacctttatccaccactataatgcaagactttttagttgtcgacctgccatcaaactacaacatactgttgggtcgactaacattaattggactaggggcagttacttcaattaagcacttatccctgaagtttcagacactagtaggtgtgggattagtgcgaggtaaccaaatgctggctcgcgaatgctatcgcatagagctgtaaaatagaaaggtcggtcactagctaatggcagtcttgactgaggaaggcaagaagaaggatgaggatcttaatcctcagattcgagatgaaagaaatttattgaaagcgattgaggaattagaagaggttgctctagatccaagaaatcccacaaagtgtgtattcattgggaagaaattggatgaataattaaaatagcaactaataagttttttgaaggcaagcaaggatcagtttgcctggagccacgcagatatgatagggattgaccctaagattatctgccatcacctgaacatcgatccattactcgaccaagagacagaagaggcgacc

SEQ ID NO: 212866 - DNA, 813 bp, Cannabis indica
ttataaatccagacgtcacccccaagccaagcatatcttgccttcccccagatatcaaagctgctaaacattctgttgcattctggtcgaaattcatagcacgaaaaattggatcaatataactagtatacatattgacaaaataactagtttcatatacaagattacctgcatttcactgtgatcatcactttgaagaactatccgaataatagcatcaaaacaaacatcataaactgcttttacgacatcaacagcagaattctgacagcaatccaaatttataattagcaaaattaaatatgattttcaaaagagagaaaaaaggaagaggaagaagaagaaagaaaaaaaaataagaccatcctcgcctttaataacattgtcacaagatccaatgacccggcaactaattcatcaggttgctgctggggctgacaatcatagaaaatgtatcagaaacaaatacctaaccaactatcttcaataatgaaatgcattttatattacacagttatagccatacattatttaagattggccctatgtatggtagaattctggaaaccagtggatggatacaaccaggagcatttttcagtgcctgggaaaataaaacaagaaaaaaaaaaagaacatacgtaaaccaatatgcatttttcagtgcctgggaaaataatacaagatgtagaaaatagtgattcgaattgtgtgtatatttcatagaatagtacatatttatatacaaagctaggagactaggaaataggaaactaccaacaaaataggaaactactaaatacaagttaccct

SEQ ID NO: 212867 - DNA, 598 bp, Cannabis indica
ttttttctttgttttttagtttatttcgatttctagttttaaaactttttatgtgtacatatattagattgtggaacacattctattccttgtgatttgtatattatttgatttttatgtggtatggtatttaatatgttttagttttgtcctgatttagttaagtattgtatactactgttttttgttttttttttttttttttaaattggtgtagttgttatatgtgactggatttatttatagtttcattatattattttagtattaaaacggtttgagaattctatgttataagccttggtatgaagctgaccaaattttgtttattatgaatcttcgaaaagttagccattgggtatttgacggcttgatttgaatgagagaattatatttctgtataattctttgaggactgccaagataaatgcgacagcaaagaatgcaataaagacatactatgttttgcttcctttattctttgatgttcttggtttgtagaaaaagaatagtggagattgctagtcttcctgggcaagagaacaagtgagtttatatgtacatgagtaaaaaataagacgttattgtccagaaatag

SEQ ID NO: 212868 - DNA, 610 bp, Cannabis indica
ttaaattaatatactacttttaagggtttttttttcttaatatattataacacataaaaaagatagggataagttaaaaataccacttttcgtatccattaatcaaaaataccctcatattatattttattaaaatatacccactatttgagtggattgcccattataccctcactctctattaagtctagcatataatttacattaacctaaggggtctaatgagaacatcatctatataagtgggttatcttaaaggatataaaaatgaaagtaaaaattataacaagtaaataaagtggtataccatgtaatttcctccaaaagatatgtcatggtacaaagtaactatacctcacacttaagctaatattccattcttttaattttatattttttttctttcttttcttcatgatatatcatattacatactaacgatatacattagaacaatataaatataccacaaacttaaactaatattctatgaagactttttaattttttaatcttttcacaatatataccatagcaaacaaaatccatataccacaaacataaatagatatttcatagtaaaaaactaatataccacaaatttaccata

SEQ ID NO: 212869 - DNA, 906 bp, Cannabis indica
tttttttttttttactttctaaaccttaatgggtcttcatcagctcaacccattagtcaaaatacgtataaataaaggcttcatcccttcatgaaaagggttaaaaaattttgtataaagaaaaacagtaaatactccataaccaaagtgctaaataatactggcacattgactaaagtaacaccctgactaagtaaaaatttcttcttgtttattttttaatagtattttcttcaacttaatcgtcttttaatttaattttcaaaaaattcgataaacaatcacaaattttcttatgattaaaaataagattttttataacagtactactcaatgagtatatataaatatataactagaaaccccataaaccatcataagtagggtaaatagcggtataagtatccaaagttttatgtttgtaagcggcataaactcaatgtttatttttagcggcataagtaccgaatgtttgtaaaactgtaattttcttccagtttcgtcagtgcagactctgttttactacatatttctatctagacccaatgatcaagaatttaagccttacatgtgccctgtttgagataataacagagtctgtactgacaaaattagagagattatagttttacaaacattaggtacttatgccgctaaaaatacacattgagtttatgtcgcttacaaacataaaactttagatacttatgccgctatttaagctcacaaatataataaaacgatacaattacaacaatatttcatttaaaattaattaaatgatacataatgatttcatgtgtaataatgtgttaaacatagataatacaattgtgaaatatcagtagaacagtgaagacttgctgatatgcaatacaattcattgtaaatatatataactaaaac

SEQ ID NO: 212870 - DNA, 818 bp, Cannabis indica
atgcaagccgatcgggttatcgcttatgcctcccgtcagttaaaggattatgaacagcgatacccgactcatgatctagagttggccgcggtggtttttgcattgaagatctggcggcattacctttacggagaaaggtgtgaaatctataccgaccataaaagtctcaaatatttctttactcagaaagatttgaatatgagacagaggcgttggttggaattagtgaaagattacgactgtgagattctctatcaccctgggaaggccaatgtagtggccgatgccctgagcaggaaggggtcccggcaaggtacgcgtacgctagtgtacttcgaagtacttcctaccctaccctcgttaaggttacgacgaagggaaggtaattaggtttagggttaagtacctaccgacgacttagtttaggtttaggttttgggttaggggttacggtacgacgtccttaccaaaccttaacgttacggaccgtcgtcgaactaacttcgtagtacttactttaagttaaaaggaaaaagtaaaaaagttaaaacggtccgtcctacgaagtagtacgaacgaagtaccggtaccgggttaaggtttaggtaaaagtaaaaccgtaccggaagtagtagggtaaggtttaggttcggtcggttcggtaacgaaccgaaaccgaaaacgttttaccgttttacgtagttcgtacgaagtaagttaggggtaggtagtcgttttcgttttagtaaagaacgacgagggttttgtgttcccgagcagtgcggaacttagaaatgagatctttgaggaggctcatt

SEQ ID NO: 212871 - DNA, 819 bp, Cannabis indica
cctcctttcttcttcaagctacacgagtagcttcaatggctgacttcttgtttcccgtcaaacctgcaacacacatacaaaaccgagagacaaaatagtagcaacaaagatctaaaatgatctttgttggttttagaagataaaagccaaaaaaacacaacagaaaaataaagaagaacactacagatttgatttcggagttccaatcaagggtacatctccgtcaagcttccctcaaagacgcttgaatctccactatgaatgtcaaagccggattacaagttcatggagattccatgctacaaaccagcaggtaatctcaacatttttcctctcctttcttcactttatttctcttggtttatcttacaatatctctcactaactctctctatttttctctcttgtttctgagggtgattacaaaagaaaacactgctgcctttttctctctataggagccgaataccacacttgtgaaagtggaaggttgtacatctatttatattgttgttgttggctgttattgtgtttgtttctgagctgagaaatagttgtaatctgttgttgatattttccttgtaaagctgaaagtttgttagagtcttgagatatttatttacttctttatattgtaaagaaataaaagatctaggcctatgaaaacagaaccgacaactctatgagttataatggtctgttgaggctttctaaaaggtcttatttatttttccttgtaacttattttacgagatagttagtatgggaatttatccaacaaaaccaatatgattaatttatgtaagagtatttgatata

SEQ ID NO: 212872 - DNA, 604 bp, Cannabis indica
aaggtatgtgttacttttctccgttgcctcgcaattctcctttagcgacatatgatttctcgttaatacactaagtgccagttcgtacattgattcctcaccaaagaccttacagccagcgggttacaaatatactctgatacttacacaattaatgagttgtaccataaaaagatattgcaccgattcacattccctttaccttgacatgtgtcctccagccgaatttcgggtattacaatcgccccttaaaaatttattttttagtaaaagagctttttaataattacggagggcattttttttccaaaatcctttcttgaaaaggacgcctcctttgattctggcggttgtactgtttcaaagatcattatgaatcgcctattcatattctacacgattcctagccgttagatttctcaatctttggttttcttgtcactgaactttgtgtataaaaggggggctcaagcctgtcacttttcataaacctctagcttctttagtgaaatccattttcagaatggattacttccttcctgccaaaatgtctcttctgagttcaaaagtatatccttcctgactcataatacccaaatgcacc

SEQ ID NO: 212873 - DNA, 758 bp, Cannabis indica
ttttcttttttaattattatttttttaaatcattttttgtactgtttttcttattggtaaattaattattttttatcaatgagttttatttttttatttttaagaatgattttttttcaagatgatgaaaaatgtatatattagtatgtacatatctttattccctctaattagaattttaactttttgtttaataatacataactttgttaagttttttttagttttttttatttttgtcttatttatgctgtctatatagttaattgttaggggaattatcctactatttttttaaaaaaaaaaattaaatttttggtttggatttctaaagtactttctccggtggtttttatgtgggttgctatacgatttttggttgcaatttaggttgctatgtaggaatctatgtagaattccgtaaaattttttcttaaaaaatctctcatttttctttactccatttgctttttctaaaatattatttttttagttttttgtatatttcttaccattcttttctctggtatttttttaataaattttaattgcttattttcttttaagcttttttttcttatttatttagtagtaaatatataatagtgtaaaaaattatatgaacatatatatatatatgatattaaactttttttgtttttatttttttataaatttttattaattattattttatttttcttctatattttgattattagtaaataatagtaagaaaattagataaacttacattt

SEQ ID NO: 212874 - DNA, 741 bp, Cannabis indica
aagtgtcacaccacaccaatcagctacctcagctcgaatcgatcggatggacaacgcgagcgcattggatcaagtgtctgtcttcacccatttgcacaaaattgggtaccccttgaggccctatccctagtgtcataattgcatcttgtatacccttgtaaataagggctcatatcccatgtgggactctctctatatcacacacacacacacacacacacgcgcacgcacgcacgcgcacgcacgcacgcacgcgcacgcacgcacgcacgcgcacgcacgcacgcacgcgcacgcacgcacgcacgcacgcgcacgcacgcacgcacgcacatgcacgcacacgcacgcgcacacgcacgcacgcacgtacgcacacacgcacacgtgcacatgcgcacacgcgcacacgcgcacacgcacatgcgcgcgcgcacacacacacactaggaaagtgtcatagtttgtcaaaaattcactcactttgtaaaatgtttcaacaatcccccattgaattttaaaagcatttccatcttccagtatcattcaacgataagattgagtataaacaaatgtatctttcgatttgaacctttgcatagtgaatacgatttagattttactagagtgactcgtagtcttgaactttatctctaagatcgtaccacgcaactaacctttcgaaggtagtagccaaaaagccagtctagttactggcaactcacctcactccacattcac

SEQ ID NO: 212875 - DNA, 620 bp, Cannabis indica
ataacttctataagtatataaaaattaatcgatggtttccttagagtttgggtaaacgagtttaaatgagtgaggcctcattttggtaattctctattattagtttctcgaaatgttatttacatactaagtattttaagggtaaaataacattgaagggtaaaatggtaatttagtccctactcaatgtagaccatttatagaggatcattaattatttagattaaaacaatgaataactaatagtgtatctattctaccacttgaggctagctcaagtgatcataggtgggtatgtgtgtgttggaggtcttgggttcgagtcccaggtaaaacatggttgtaatatataaacgcttaaatcaaaaaaaaaatatagtgcatctattcttgcagaatagagtgtttgatgtaatcgggagtgtaatttcgaatctatagtggaattaaggaattaataaaaaaaaaaataattcgttaaatttcaaatctacttattaagaacttgtttacataagctcatagtcttcacattggctaggatagtatcatcttttagataagagacagaaatttactcgataaattaaattctaagaattaatactataccatgctct

SEQ ID NO: 212876 - DNA, 990 bp, Cannabis indica
tggcctatactataggccatagtgtaaaaccatcggcaattcccctttaaaaaaatccacaatttttaaggcacacttaaaaaccgtcgagaatacatcacaagtgtttaaaatcatcaggaatacccaatttttcctgaagattttaaatactcacttaatttttttagcgacggtcccccaaaaaagtgtttttaggactgtcagaaatagtagtttttgtagtagtgtaacactaatctccatcttgtacaatcgtaatcatcaacgggacacgccacctgaccaccacaatctcatgtaaacttttgatacaaggcaccatacagatcttcgatcacaaggtcatcacattgaggacttctcccacacatcgtacatgaatcccactatcccaacttctgaacctttggctctaatacaacttattggcaactgttcctctaccttatcgggtcactacctcaccttaactcgcatattagtatgatattacccgctttgggcctaagccttcatagttttatttttgggcaccttcccaaaatacctcatactaatggagtaggtagaacacttatatttaaggcaactcttgcctattcttctgatgtggggcttgggttgatatcccaacaccatttattgccctatttcgattgataatagcaattgggtatgagagttcaattatagtttctaacactataaataggtctttggggttcactttgtaatacaactagttttctatcaacaaaaatactttgttagaaaaccttaaaggtttgataattcccaaagctatcttttagagagttctcttaatgcttagagatatgaaaaagtaagtttctggacaaatgtgtaagccttatttaagtcatggtatctctactattctacactgaaggttgtcggtgagtatttatatatatatatattattctcttattatattatgttttatataatatatgtgtatttttt

SEQ ID NO: 212877 - DNA, 724 bp, Cannabis indica
catattaataattaattaaatactataagacagctaacaatttagaccaaattaagtaatattaaaaaagtgttggaaattaaaccaaaagtatatgatatgttgtgtgtggaggtataaatatcttcgattttgtcactgatttcaggctaaggaaagtgcgcatgaatctccgaccacatgcatatatataatataaatttattgaaatttattataaatacagccaaaagtagttttccctaatgaaattagtaaggtaatattttaaccaaaaatacaatttaattatgtacgtcttcgatgcatacatgcattttaataaaaacaataataatcaagtctataattttatatggataaaattttaatggatattttgtgcatatgttatacactaaatccttttaggctatgtatctccaatagtatatactttcacgctcaaaaaatgaataagtgttatattaattgatccaaattccacaataatgatccaataaggggtgagaaatgctaaaacactggcatctagtactttattcttatgtatcaatattactattggtttaattaagtatcggatctcatatactttaatataataatttttaaggagtatcgctagtcagttgcaaaacatgtctagagatgctagacactatactgacactgatgcccaataataatgctctattaagggtaaaatgagcatcttttttaa

SEQ ID NO: 212878 - DNA, 833 bp, Cannabis indica
ttatatatttatatacatatattgggggaatgcaattgattatattatatatggtattccatcttttattatgcattaatgttaattcatttttcacctattgatcaaatcaaatttttataataaatgtttttattatggtcaacctcgtttttaggtattagtctatggggtacgtacgtagttgttttttatttatataattaattattatttgtaatagatgataatatatattatatatataaattcttaccttttataactctcttacttttttgccattttttaaatgtctattcatatcaatatattatgtaatctttttccgatgatggtgctttttttttttttttttttagataaaccgatgatggtggtgttaattaattaatgttattacatatgtttattcatttattttataatattataagtggactattatattcataatgagttattggttttttcaacaataaacaaaattttattgaaaaaaaatgttgagttacatttgttgagaattatggggttccatctcaaaaccaattggcaatgagttggctcaatacttttacatttaatccatgtgggacaatgttctccaatatcccccctcaagatggtggctatttttgctcaccaatcttgaatcaccttatcataggccctgccatttgctcgcttattttgttcggatctcaggcgtctttgcaccatctggatctcgtgcggctggctaaccatctggataggtgtagatcgaaagcccgcaagggatatggctctgataccatgttgagaatcatggagttccatctcaaaaacca

SEQ ID NO: 212879 - DNA, 763 bp, Cannabis indica
tttttaattataattaaaatatacgaaagttcttaataatttaattacattaagaatactatgtcttatcaatatttaaaattagaataggtagtattagtaatattaaattgtacgtaccaaaataagccatttctatttttactattaataatattactttaatgagaaaccaaaagcaaaatatatttacaatcctcatacccgacaagtaggctttcattgattgatgactcactctctgattgttcactacttcacagttcacacacagcacactcccctccaagtttggacgtgttgccttttaagctctttcaatttcgaagttgccttgaaattatcgaccatcgtttatcaaccatacctatatgctttttatttaatttaatttgattttgatgttatttataaatcgatgctatttaattctccttgtacttgatcacgacacatgtgataattacgtgtacaaatattattaagtaccgtggaaaactactccttctaatagcactagttttcttagatggacactattttaggttcacaattactcacaaataattctttttagactgacgatactttaagtttataatggatcacaagcgattttgatccatattagaatttaaaatgcatataatttcatctcaaaattaattaataatacaaaaaataatcaattcattttatatatagtaatttactttaatacattaacaatatagaagtaagagatataattttgtcccgtgat

SEQ ID NO: 212880 - DNA, 1111 bp, Cannabis indica
tcacattccaaaatcaaatacatattacactgccgagttccttttcccacgtgacacacctcgttatcacctctactactgatgctgcaatctcatctcatcccaactgtcccccctgcccacatctccttctgcaacacagtcagtatccaccctgcctgagcctacctccaaccccactttcactctctgaacacccaccagaccttgctgcatcaccaacacctactataccacctttgccaccaactcagccagcctcaccagctcctgtcccacccatatcacatcctggcaacacacaccagatgcaaaccagaggcaaaagtggtattcgaaagcccaaagccttacttgctactcaagttcccacctcactccaacaagctcttcaaaacttaaaatggaataatgctatggcagaagaaatccttgccttaaaaagaaacaaaacctacactctagtgaggttgcctcctggtaggacaacaatcgggtgcaagtgggtatatagagtcaaagaagattcagagggcaatgttactaaacttaaagcaaggcttgtagctaagggcttccaccaacaaccaggctttgatttcacagaaaccttcagtccagtggtgaaacctgtgaccattcgagttgttctcactcttgcattatacaaaggttgggacatcaagcaattggatgtgaataatgcatttttgaatggggatttgcaagaagaggtgtacatgttacaaccacctggttttgaagaccccaatgctcctgatttggtttgtaaactacacaaggccttgtatggcctcaaacaagctcctagagcttggtttgggaagcttcaccattgtctattatctcttggcttcacctcatccaagtctgaccacagtctcttcataaggcataccccactgtctatgaccataattttggtgtatgttgatgatataatcatcacaggaagtgatccctctctcatctcttactacaccactgccttgaatgaaaaattctccctaaaggacttaggatctcttcacttctttcttggtattgaggtcacaaccacaccaacaggtcttcacttgtcccaagggaa

SEQ ID NO: 212881 - DNA, 620 bp, Cannabis indica
gttaccaaacgacacctaagtctttaaaaatgagcaaaccaaacgctgttcgatcacaaaaaatggcaccatcaatagttaccttgattgcattctcctgcggcttaacttgaaatttcgctctattactagcttcaaaaattaaaagagaagcctctgaacctctattttgggctgactttcattgcacaagacaattcatagatgagatgagaacaccatctaccgtagcatacttttggttctaaaccaacttgttttgagccttccataactcccagcacaacataacagcctccccacacttgtccttattgcacttttgcaaaatttactcaaaccaggtgctaaaattagcagcaacaatcggcctaatcccagccaaaagcctctgccagcattgagcagcaaatgaaacaggaaataagcacatgaaaaatagttttctcacttttgacaaacagggcacataatttgaactgggacccttttactacttaattgagtcaaggtgggtaaataatttgaagcaactcgccataccaaattaagagctttcagtggtacctttaaattctagagcttgcgccagaactcgtttctgaaaggcctaggcccaa

SEQ ID NO: 212882 - DNA, 786 bp, Cannabis indica
aggcagtttgtattatgtaagaccagtaggatagcggtatattagattaaaagcaaagtgcacgagccgcatttagaatgtgttggtgctttctttcttctaccgagttttgttgtggtctttccacacaagaatggtaatgttagatgcctttagaggccaaaaaaagaactcatattaagttctttggcattatctgaacgaacaacacagtttgagcttcaaattttgttcttagcataagtgtagtgtatatcttgatttatcatcaacaattgttaaaagataattgtagccttcaacactaattatgtgaaaagggccccatatatctatgtgaagtaaatcgaaagtgtgttgtgcaaagttattgttagaggagaatgtgagtcttttttgctttgctaattggcatatagagcaatgatatttagattgaaatgtaaatgaagagtcaatctttttattgaatatgtttgaaccatacaatgagggatgaccaaggcgattatgccattattatgaaaaataaaaggggaagattgacaaacatgagccatagcagcaattttttggtgcagcagatataacttgccacattgtttagctatcccaatcacccgattcagataaggctcctggatgatacacatatcaggtttgaaagaaaaaagattagtggtgtaattaacataggcagtaacagaaaagagattgatcttgaaattagaaacatataggacattatggagaaagatttctggtgttaattgaacatttccaatg

SEQ ID NO: 212883 - DNA, 904 bp, Cannabis indica
tctatatgattaagggaatagttcaaaatatttacagtacaatcagctttccataataacattaagccacccccataagacaatctagggacttctaagccaaaatcaaaactcaaagaagtcttaaaccgatcgatagagtgaggcttgagtctagtttccatcaagaaaagaaccaacggcctgtgagtcttaaccaaaagggaaagctggttgaatgctcgagagttccccagccctcgtgcattccaactaataagagtcatttttctgggcgggtgtgcccagcaacacccacctgttcagttagagttatggaaataggagcagaatcagcatccccagacctggctcgcttcagctgcgaacgcagagagccaccaatttagacttggtgcgagtgaaaagtaggtctcttgactcctgaagcacaagcaagacctttccctttgacattaggatcaggagcggcagtttgcctctccatattggttcccaagtcaagagaaggaatagcatcagcaagagatctagcagccatcagaacctcaggatgctggaattcagaatgatcagaaacaatagtagaatccgttggtgcaatagtcatatggtcaggaacagaaccatattgcaggggagtaacatactcagtaaaattagaagtaccatgagtggtaaggttcggattaataggagtaggaatcataagaacactagaactaacaggtgaccctaaaaacgaactaggccctatggtagaattcaacaaaccagtgaaagtatatgattgggccaagaacgggtttagcaacccctgattaggaggaatagattgcggtggtaattcagagatggataaggcaggagggtgaggatagtcaaaaggaccagacttatccat

SEQ ID NO: 212884 - DNA, 2042 bp, Cannabis indica
ggtagataaagatagagaaagatgatacacaaccaaatgtatcttgactttgacacttgaccatataccataaactcaaaaacatattgctttagtacttaccttttttttaccaaaaaaactaaaaatttaattttctaactaattaatcctttttaaatgcttaataatattgtaagattaataataactttgtaattaaatctaaagttgattctcatcatattaattattaattaattacaggaggaataatggtgattttgaggaagttatgatgatttatactgagacaatatcgatcgatgaagttgatttttacagcaaaagctatgacgttaattaaagtagtactttgatactattgcagttattaggtggtggcatgatctggttttggtacagggaactataggttattaattattattattattgttgtaaattaattgcaagaccactattatcatcattattattatagtagagtttagctagctagctcatgaacaaattaattctttaattattagttttttttttaaaaaaaaaaaagttttacatttcgaaatcaatgtgacaaggatgaagagatatatgatattggtgttcaatcaattaagtgcagctgggcagtcctatctttagtacgatatagcttattggttgcttgagatattgctttgattattgatttagtgatacatcatttgttagaaatggacatattaaagaaaacacaaaatggattattagaagatcttttttacatctttataatgtagtatcattgatgtgaatgtcatcatatattatgtatagtttaggaagattgattttttgataatttatttatttatttaaaagaagaagatattttgcatgtgaaatgaaatcaatgtatatctatatttgattaagtggttctatgaataacataaaaaaaagaaaaaactattacaatttaaatataaatttactacacatatctttctaaataacttaaagtgtgatttttttttaacatttaccaacaaaaatatctttctattaaagaaatgtatgatatttctaaaaattttaaaaatattatagttaaacttaaattataattaacaataattttgaatattatattttctttttataattattacttaaattaaatatttttaataaaaaataatattatttatttataacatccatataaaataaataaaaaaaaattaatcataaaattaaaaatatatataactaaaataaaaactaaaaatataataagtattacattgtactgtacgtaatactaacttagtattatcataattaagtactatcaattatcacgtacctaatgccacatcatgagaaaaataatgataaatgccaccgtactaaaatcaaaaatatatttatatttgcttataattaattagtttatgacttatgtgatattaaaaaataattaaaatttagttcacttgtacttacttaactacgaagacgtaaagtttaattttctattgtaaaataataattaaaaaaaaattgtgaagattgtaaaataataaaatttgaaaaaatatataatagtttatatgaatgattatgtatagagcttaaattgtgaagattgtgaagattgtaaaatttagtttatatgaatgattatgtatagagcttaaataactagtacgcctcactaaaagtatatatgaaaataaatagtgccccattgttaattaacgataatttttaacactaataatatttttaaacactaataatatttttaacaattgctatttatttagacatggcctaccaatatatttgccatgctggcctggcctgcagagcctaatatttatacataaatatatataaagggtgttaaaaaaaaatcaaagagaacagatttttggacctcttatcgtgagttgtttgtgtttttttaaacaagtgagttgtttgttgtataaaagattatgtatggagagatttcatccacgagtatcaattgggtactgttcaaagtc

SEQ ID NO: 212885 - DNA, 787 bp, Cannabis indica
aatattcaatactatttaacattaattaactactactaattaaaacctactacctatactacatattacgtacgtacttaccgaaacttggtcctgtacttcctggaatatcaatcaccaacctaacaattcatttaaacaacaaaaaatattactcaactctgtatttaaataacaattattaatttgttaattaactatcatgttatacttaattatagctaatcaaaatcttaaaactactgattcttccatatgaattcaaactacaatgtgactatatttttttagactactcttttattttttaaattaaagaaatattttaaacctactttcaattacacagtacttgagatttgatctaagtacttcctctacacaagtacctttatatttttttatggccacttaatttaattagcttcaagtgattaattacctaaacaactcaaatacaattaactgttttattcctaatatttaattagtaagatattttattattaactaagaataaatagtacaattaaattctgaaaatcttttgtgataaaatgaagtggtcattttaatggtagaagaattatatatcatatattgattccagctgtgacatgatattttcctattattttataccatatagtacttattattactatatatgtgttagtactataacaatatttgcatacaccatgtctctcttaattatatatataaaaatatttatgtataatacatgattattaggcattatagtatatgtccaatattacttgat

SEQ ID NO: 212886 - DNA, 512 bp, Cannabis indica
ggaccaacactaggcaaagctgagaactgcaaatgttgataaaccagttaatatttgaaaacaagctatacaggaagttgacacaaatagttaacaagagaaaaggtagtcacacaaatcttctctcttctctctctgtatcatttatatattaaaggttttttttttttagaaaaagtttagaacgcattagaatcatgtagtttagattttcaggaactaactcttcggaaaaattgatcaataataatacaaactaataatgagtcatgccttttatgcaccttttaattatgaaaataattcagtgatgcacagaaaaattaaacttaaataaaatcaatccaaaccatcttataagcactcaaagtatggtggaaatttctaaaaacacagcaatcggatcatagtttctagagaatagatacctctattaatttggctttaatatttgtggatgagcgggattgacacagaatgtggaaggtcctgataatgtctatctggacatt

SEQ ID NO: 212887 - DNA, 587 bp, Cannabis indica
atatttatttttctattattagtactatttttatatttttttcaataaattattaagtggacattaaatgatatattaaatttttgaatcaagatttataattatgtattagagcacaatagtaaaagttgatataaaaatgtcataaaattattttttgtgctaaatatagttcaacttttacatctctcatcttagacttattatctccaaagagtgattgagaatttaactagtgttaatggaatgattgattatatattcttttatgtatgttttttttttttttaatttaagcatatattctttatgtaatattaactactgcttaaagttctttcaattccaaatatttttaactatcatagttctttttggtaattgtaatgtgaaaataataatttaaataattacatcatttttatttttaaaatagatatttatttcattataaattaatatgtataaacttaaatataaaattaatctgaccatgtaaatgtgtatatattatttgaagtgttaaacaaaaaaaattaattgtttttaaatttatataaattaattttaattttaatgataataat

SEQ ID NO: 212888 - DNA, 955 bp, Cannabis indica
atcttctcttcattactgattgctctagttattaacactggcatatttttatcattgccaatagttagtgcttcaaactgagcaatgagatcagcagacacccccttactgtgttcgataaagggagtgtcttctaaagagtgttcagatgtgcaacacccctcttctgaactttttaaacaaaggggttcactgattcctgaacgggaattgtacgcatggcacaaactcttgatcgagttacaggtcccgtgtaggaggtaggcttagtagttgaagtgacccttcttggtcggtatccctggaggaacatccagtcaccatgctctgtccggaacgagttagggttttctttgggaacccttacactgtcacttctagccttctttgggaaggagaaaggcgtcctacacacctcatctcataaaagggtgttcattgatctcagcagatgcccctgttggccttggcggttaacagggattacgattggaggcctaatcggcgtgcctcctactaatttcctcgtttcaagagggtttagtgaaggtgaagtttttgtccccctcttggcttttgttgccttcctacctctacgagtttgagaagtcggtgttgcctcagtttcctccggggagataaccatcactgaggcgacagtgggcaagaaaatatgaatggaaccaatcaagatacactcatggccccattccttttggatcattacgggggagccaatcttcgttggcctcccttctgtcttgacaaactttgccgcagaccttttcatttcctgggattgcctctttttgaagccctttgctgccttgcctctcaaggcttgcatagtcttagggatattcttcacaccttttcctctctcagcctttctaacttgtatagctgtcttcacattctccactgtttcgggtaccctggatgaaatgggtgctcg

SEQ ID NO: 212889 - DNA, 650 bp, Cannabis indica
ctctcgctgcttctcaactttatgtagccctctgacgttcaacctagaagattgatgttatccattaaacaagtttaaccgaaatagtaaccaatccccctatgcttccttcaaagcatcataactattactaattccagtttcctgctgtgttcaaataataattttggaccccttcctctttggaatgacccagctctctacatctttactctcctgagcattcgaactctggagtgcctgacttggttcaccctcgttatcatccttcctttttctaagctatttttcaaaacaaccttttccatgacagcaaccgggatatcttcattatttttctgctgtagcacactcccagcctcataatctttgtctctattttttcctccatgctactggtttctctttgttgcagttcgagatattatggccaagcaagttacaggctgcaaatttagttggtaaccattcgtatttaacatgttgctccacaagttgattcttctcgttaacaaaggaaatggatctcgggggttcatctttgatctcaacatccaccaacactctagcaaatttaatcatagttctatctagttgtaaccttgtcaggcattatggggttttttcgaatgtgtctaataggagcactt

SEQ ID NO: 212890 - DNA, 528 bp, Cannabis indica
gtaaaaaggaaaccaaaccaaataacaaaagctacttttatgacattattaatttatagttttctgtggattgattgctgttgataatacagaaaatggtcagccattcaatcaagattgcaaggtttaaaatgtgtttaatttcgatctctttttcgtttgaacttttgaggtacttttccagctgggcttccatattctattttcgttacagaatataaatgaaagctacgaaatccaataatattgaaactagcaaataaatcttagatctcttatgcacaactgataaactctttttttctttaaataaaagaaagaaaaaaaaagaacaagtctaaaaaatgtaagctggtaaaactaacgagttatttttaatagaggttgttacgtgttctacaatggtctttaggcttgttttgataattcattaattaatgcttgagattgttcatcaaaataaataaataaagtggcgtttgctaacatttttttaatcagttttttattttaaaattaaaacgtaaa

SEQ ID NO: 212891 - DNA, 560 bp, Cannabis indica
tcatcatcatcatcgtcttcgaaaataacctctgttacttcttcgtcctccagacacatatcagcccatttcattggtagatcaccatcatttttactgctagacgccatgaagtagcaatgaaacagtaccaaaaagcaataccaaaaaaacagcaaaaggacaaacttacacactcaaaagagagcgacaaccccactcaaaagagagcgacactaatccatttcttaattcttcctaataactttagttataaataataaatctcttcacataacttctatataagaccatcgaaccaaataattcacaaacaatcatagaaagcaatattcaactaagcttatcattttcctcaaatcacaccttcacctccattaaattagtagcaagtttcttgtatagaaatagattctttttcttgcaaagtgaaacaccttaaaaaggtgatatgttagagttattagttgacattttaattgatgtttgatgtgttaaatttttattggtggggctcctcctagtatgacacgttagagaatttttggcaccatgaaatc

SEQ ID NO: 212892 - DNA, 888 bp, Cannabis indica
agctcttcttcataaagctattataaagtggctttgagctttatagaactgaaattcattccaatctaacaaataattaaagtgcttttaggatttgaaagtccaaaaattacttcggaaataagacctactcacccataattaattttagtttagctagaaagctttaatttatttttttttcttttaatttagttatagtaatataaattacataaatcttctcaaaaaaacaataatacataagactatatatgcaaaagataaatgagaaaactttaaacagcatttaaggtatccaacactctatatcattattggtgtaaataaagtcaaaaaatgtataatacactcctttaaaaaattcttttggcacaccttctatttgttttgacatgcatgaaagtctttttaatatatttttttttttataatcacaaacattgtaatttttttggactattagtaaatttttaaaaatttcaaataatttacaatatcgaaaataaatttcaaacaaccacgtacttattacatataaaaaaaaaatcataggacaacaaaatattttaccttatttatggtaccataaattatttgtaattttctaaaaattaacagatgctctcaaataaatatttactatagaattatctaataattaacttcctacatatttatctatatttatatttaaaatgtgctcaaacccctttttaccaaaaaaaaaaaaaaagaaagaaaaaagaaaaatatatgctcacccacaacaccagcatagtaacctatatcctcgtccttttttgcaacaccgaatcctttatctgaaaacatcaatttgaaattgaaacacatattttgatgtcaacagcaattaattatatgaaa

SEQ ID NO: 212893 - DNA, 526 bp, Cannabis indica
cattgtataatttacagactttggtattgtcaaagtgtagaaacgtttgtcaactgccaaagaagattgaaaacttaatcaacttgcaatatcaaacacttgaatttcatatccaatgtggctttgagtgatagaaatagtgaagagtttaagatgaaaagagtagcagagcttgataatttacgttgcatttcggggttggaaaacatcagaagcttcacaggctaggataagaaatacttgatgcacttcgaccacatacaaatttggaacatcttgagattcaaaattatagaggtacaacattgtcggattggattggagattctgtattttctaatttagtatcaatcagattactctattgtaaaaattgttgtgttttaccaccacttggatgtgaaagtttgtactctataggtggtgatgatgatgagataattcatgacaagggtcctctatttagttctctagaacaattaacaattacaagtatgttggaattgaaagagtggtcatttagatt

SEQ ID NO: 212894 - DNA, 1102 bp, Cannabis indica
acaaacaaatgctgggaaaagaaactgatgatgagtctgagccaaaaaacttgttaaaggtgggtcttggttcccaagcccaccaagcattatgagtctattgtcttggaattgccatgggcttgggaacccgtgggcctctcaattcattaaggaccttgtggtccaaaagagacccaattttattttcttgtgtgaaactttatcaaaaaaggatattgtggaaaaacttagagtagctcttggctttgatggggcgtttactgttgacgctcaaggaagaagtggaggtgtggcaatgctatggagacatgaggaagaagtgcaattgcttggttatggcccaaattacattgacgtatcaatacaaaatagagaaagtgggcgttggagactaacggggttatatggagagccaaatagagcataccgtaagaagacttgggaccttgttagagcgctgaaagctaagtacgaccttccttggtgcattgtaggtgatcttaataatgttacctcgcaacaagataaacgtggtggtaacccatatccaacttggcttatcgagggcttttgtgggatgttagatgagtgtggactccatgatttagacttgtgtggctatccctatacatgggaacgtgggcgtggtacggaagagtggattgaagttcgcattgatagagttcttgtgtgtcaaaggtggctgagtttgtttccttcggtcaagctttacaacttggaagtttcaacctcggatcattgtcctttgctcttaacgccggttatcctaagtcctagaggtgcaactaccaaagcttttcgttttgagaattgttggttgaaagagcctctttgctataaggtggttgaggatacatggagacaatttgaagggtacccgattatggaaaagatcaaaggctgtggagatgttctcattgaatggggcaaagactattcgggcaattttaaggagagaatcaaggaatgcaaaacagaggttcggcattggaaaaagggaagagattcagaagctacgaacaattataaagtggctcaagtcaagcttaataacgttttgttgcagcgggaaatcttt

SEQ ID NO: 212895 - DNA, 681 bp, Cannabis indica
attgtgaagacagtgtattttccaaccccatgtactatatgcgattaagtggtaagattatgatttttttatacgattatgcacacaaagtattttttttaaaacagtgactcctaaataaatttgatgaatttagaaatttcactttaaaattttgatggataagtataaattcgaaaatatttcaataaaacccacaatggtaaaaatgggttgtatttgagatctttagctcaaatgattagagactattatgtaattcataactaaatcggtaaaaatggtaaagtagtaaggtttcgtggttgttctgtatatttagttaaaataaataggatgaattcaagaaggtctctaaataaacaaacatacaagagtagtagagaaagaggctcatgattgacgcttttaaaagaaaagtaaagggcacgctccaatgaaaatggatataaaactataggagaagtctacgtatacacccttaaaacatctcaaatagtggtaattttcaaggggtcataaacatctaaatcacttgaaaaataatatatttttttactacattcatttttttacactttttggtattaaaatgaactaaataaataataaaaaaaatataaaaaaaattgtactattgttaagtactatttttttagggggtttttttttaggtagtta

SEQ ID NO: 212896 - DNA, 885 bp, Cannabis indica
cgcaaattactctaaattatattttttagaattttttgtggttaaaccctccaaactaatattttactttcatttaacccttcaagctcaaattttaacggtaaaacctgtcaaactattgaaccgttagtaaatttaaggtgtcatcccatttacttttgttaattgcgaacatggctgccaacatagttatttatgtgtacaattttaaacatgtgtcacatttatattggtacatttaatttaattatttaaaaattataaaaattattttaaatttttgaaaaataaaaattattttaggttcttattcctaaaaaaatcatatttttataaaaaatagatattgtaaaaaaacaattaattaatacttaaaaaaaacttttaaaaaaataacctaagctatctttgtttctctctcactctagctcgctgctattcttcttcttcctcacaaagcatttatgctcaaagacagaaaaaaaaaaagatgatgttctttttaaaagatgatgcagtcatcctcatcaacatcaacccttgaagatgacgatgcactcccctcgtctctggtttcgccagcattgatcgaagctccaatggttcagataaaaatgccaaatctgaaactcgacccactccgtcgagcacaaacacttcaccacacaaatcgaacgcatcgccagatctcagatctgagatctccacaaccctgaacacaaagaaaaatatgagaaactacagatttgagcatatgccgccatgtatgacctacatattttggcaagactcaaaatgacaaatagaaagaggaagaaacaatgtcgcacctgcctagatttgttcatctcagctttggagtagtctcctcgtagcttctgcgat

SEQ ID NO: 212897 - DNA, 789 bp, Cannabis indica
tatatataaaaaaaaatttaaatgcaccttaaaaactaattgtacaatatacatctctatcatattttcagcatataaaatataatcattctattatttttatatgacagtgcacacttatattttagtgtcagagaataattttgttgcgcttgttgttttcaataatcttgtaaaataaattatttaaatctgattaaaagaaaaattacaaatattttaaatgagtatacaatttgttgggcctcattcctccactagtccactttaactctcacattagtatgatattgtccgatttggaccgaagccctcacggttttattttgggcactttttcaaaaggcctcatgctaatggagttggcaaaacacttatattcaagacaactcttgctcattcttttaatgtgggacttgggctgataccccaaaatcttaccctcaaaccaaggaccacatactcgtgacctcccctccagtaaaaccaccttatgtcgccgctatcaccaacaaaactcgtcgcccaaccatcaatgttaggatttatgccctaaaaacttgtaaagatatttctgattattaataagagttgaacattttgataaatgcataaatgttaaattattaatatttaatattgaataatttacatataaatatcaaaaaattccttattcatacacgaggttgtgatttagatcacttagtcaagaataaaacaatcagcaacatattaaagtttaggaaatctttaatcaatagttttagtgcagttcactgatgcccg

SEQ ID NO: 212898 - DNA, 715 bp, Cannabis indica
ttattagtatgcaatatatttatgttaaagcaactaaaatatttttcaaggttgacttactaagttcctacaactttctttgtagttccttccatttggtctccaccaaaagttctagccaaaccaaaatctgaaatcttggggttcatgtcttcatgaagtagcacatcactggctttgagatctcgatgtataattctcaatctcgaatcatgatgaagatagagaagccccttagcaatcccacatacaattttgtaacgcttaggccattctaatagtatgctttgcctttaatctgcaaatgttggcatctacttttattagaacaaaattggcaacttatatatttatagaacatcacatgtactaaaagaggtgaaaagagtcttgccaaaaatgaaatagtcaagacttttgttggacatgtactcataaaccaatagtttcttttctttatgaatgcaataaccaaatatcttgacaagattccgatgttgaagcttagcaatcagtttaatttcatttttgaactcactggctccttgtccagaacacattgataagcttttcacagcaatttcttgacctccttccaatgtacccttttacatgacaataacaataattatttaccatattaagaaagaaaagaaaaagagaattttcgaaagcagattcaagagaaaagcttactttgtatacaggtccaaaa

SEQ ID NO: 212899 - DNA, 595 bp, Cannabis indica
tactcatagtagcaagtaactccaccatacaacaaatataaattgtcatatacacacttattaatttattacacatatttattgtatattatattagttataaataatataacatggacttatagggcacaattgacttttatgaaagatatatattattaaaaaatcaaataccataatatttaaacacaacatacaaatttgttgccatcaacattattgaaatatcaattaattcatagtctataattgaaagaataagaatatataaattaattacaacctctttttacaatttttttcttaattttcgcgtctaaaaatacatgctaaaatattttttaattttttttgatataaaaacattcaatttagttaaaatattatccctgtaaatttcgaatagtttgcagcatcaagaacagagatactgatattttaatttaccatatttttgacactgtaaactattcgaaaattttcaaaaaattttaaaaaataatatttcagcatgtatttcggacgtaaaaattaagaaaaagattataataagaaattataattaacactcctcgtatactaattacttaatgaa

SEQ ID NO: 212900 - DNA, 677 bp, Cannabis indica
tagttggtcgtggtggcgatggtggcatgggcacatatggtggggtggtcacgcgtgtcgatgggtcaggcatataaggtgaatctggcacatattgtgggctaggctttccaatattggagcccggcgtgctctgctgagccatgatagctcttaacatttcttcttgtttacaaagtcgatcttcaagacttttttgttcctatttgtgttgttcttgttggtgacaaattatttcttcaaatgtgtctttcaaagccttagtcgaactatcatctttgtgttggctttgtctattgataggcttcggagtgtcccaatacagtgaaggaggcacaccttctcctacaccccgaacacgtccacgtggctcaggagtgcccaatgctctcgccaacacatcatcagggccttcaggtgtccatttaccctcagcttgaagttgtttaacatgaccctataaaaaagtttgtgcatccataaatttttaaacaataccaataacataatagagtatatagtgaggttatttaaatataaaaacttacaatatttttttgaacctcgataacttctccaacaagttctccttttttattccttcgactaatactccacaagtcagtcctatcaatattggagagttcttgccctgactctttttcaagaatctcttg

SEQ ID NO: 212901 - DNA, 783 bp, Cannabis indica
caaacattgtaatcaattcttatgtgaaaaatagatcattttgtactattattagtagaattaaattttagatttttatatattttaatttaataattaatataaaaaataattaatcactcttgatttgacacctcagtaatattaaaatataataatatgccttttttctaattatatatattttctagaatttcacatttaaattgaattaaatttgacctaaaatatatcataaagttatatttggtctaatttttttatttgtactttaattcatattaatacattaatatttaaaatactattattaatatttattgaaaatatttaaaataattaattttatttatattattttaatatcttataaatataaaaaaaaaaaattagttaataagtaacaaagagataattaaaaaatagtggtatttattatgagttaaaatttggctcatgttatcttttgtgttaaatttggtacatatttttacattggagttaagtattagcaaaaatgtcctaaaacatagcaatacattattacatttttaagaaaatataaaaaaaaaataaataaataaaaaggaatagattatcgatagaagcaaaaagacaaaaaaaaaaaaaaaaaaaaaacagcataatcgaagtccttttattatagtcagagtcggaatttttttatttttattaaattttgcttttccaattatagttctcgattgtagatgctctaagattattgatagaagcaaaatttaagattgtttggtaggatag

SEQ ID NO: 212902 - DNA, 798 bp, Cannabis indica
taacccatatgtatttacacatagcagccttattccattcctctaatcttttaattcctaatcctccatctcttttttgttggcatacatcatcccatgccacagcaccagccccatgaaaagcagcttgtcccttccgaaggaaggttctacaactgcacattgtgtcaactaaaaaaaacaaaaaatcgatcttatcattatattataataaaatatgtcaaaaaataaactaaatatatgtatcttaactacaaagaaacacacatacaactaaaaaaaaattgttaggaagaaactaaaaatatacaccataaaaatacacattaataacaaaaataacagttgaacaaaaaatattttgaaaactatttaaaaacaactataaaataacataaaaataacaaaacaaatgtacacatataccacaaaaaaaaatgcgtaggaataaactaaaagtacacaccataaaaatacacataaactaaataataactgtacaaaagaatacataaaaataacagaaaataactataaaatacttaaacagcaacataaaaataaatataaaatatcaaaaagataactataaattaataagaaaaataacaggacatcaaccttattaaaatatagcaaattatccataaatcaactccaaattaataaattacaaaaaaatcaagaaaaattactacttttattaataatgtaaaagagagaaacatataggaggagtgtttttaattttttttctaagatagagaaaaagtgtaaaaaaatatgagaaaaaatgtg

SEQ ID NO: 212903 - DNA, 640 bp, Cannabis indica
taaaacctcttctcggatctacaccaattgcagatcagttacttgggtggctttaattttttctaacagatcgaattgcaatgtcaaaatatggagtttgcctaccacaaactcaatgcctgatctgaccatgccatctgctagctgaggtgaaatcttaaatcgtactagtacctgcgcgggaccctttctgcttagggcatctgccaccacattggcctttccaggatggtaaaggatttcacagtcgtaatccttaaccaactccaacaaacgtctcttcctcatattcaaatctttctgattaaagaaaatttgaggctcttatggccagtataaatttcacacttttctccatagagataatgccaccaaatctttaaagcaaaaattaccgcgttaagttctagatcatgcgttgggtatcactgttcatattcctttaaatgatgggaggcataagcaatgatgataaatatttttatgttgttgacttcttcttcttctttctagttgttttcaagtagttgtaccatttctacagcaacaagcttggcatagtcggcgaagtcaaaattttcatcttctttaggagttcttttgttgttgttttctggttgctatatggttgactctgatg

SEQ ID NO: 212904 - DNA, 625 bp, Cannabis indica
tattaattataatagtgttttctgttaggtttataaagttttctaatcattcactattttagaataagataagtacagctttataatatcactacaggatgaaaggaagcaacgccaactgataatatatggagtgaagcaatgtaacaatagcattcctacaaaaattatacataatcaagcaagtagtagtggcactacaatatattataaatcctccatgtctcaaagtaaatcaccattgttatctgtttgttttataaagttttctaatcattcactacaatatattataaatcctccatgtctcaaagtaaatcagcattgttatttgttagttttatcagcattgttatctgttagttttataaagttttataaagtaaattagcattagtagtggcactacaatctatctatcaatgataatagtgctttctgttagttttataaagttttctaatcattcactctttaaaatacgataagtacaactttataatattactacagggtgaaaggaagcaacgccgatcgataatatatgaagtgaagcaatgtaacaatagcattcctaccaaaattatacatcattaagaaattagtagtggcactacaatatatt

SEQ ID NO: 212905 - DNA, 820 bp, Cannabis indica
acaactgaaaagaaaccatttacgataattatacaaaacgacataattattcggaatcggaagatacctattcacagaatcactcattcatttacacatgttatacatgaaaaattaaacatttttgcaacaattatacaaatcaaaaactttgtgtgctaccgccttccaaattaatttccactcattcttgaagccttataatctgataaaatctgcaaagttctcgctgcaatctgtaaaggtattttttttacgcttcattattgtaaatttaataccaataaatttatagagaaaacttaataaatttaatagcagattgaaagaaggaaattgaaagaaattttattttatatatgtatattatatatttgatttatatatacattatatataaggtaacagaactacaaacctggaattatctttgattattttcattactggactatgataagattagtcctcttgctctgcttcccctccctttctctatggccttcccttcaatcatttttttaaagcaaaaagaatcgacttttgaagaaaatcgatagataaagaggagtcttcttcctctgccattctctatacctttccttcaatctttgatttcctataaaaaaaatggcttctatgtaacagaaaaaaaacatagaaccatacaaagcgtatacctgtgagatttagtgtgaatggccaaacattctccacccacgaacactaacggcgccaccattaccaccatcgaccataataaaattactcaaccataaaaattctagcttctcccataagaagagaggagaagaagatt

SEQ ID NO: 212906 - DNA, 533 bp, Cannabis indica
gatgatcgattattgccgagagccatattagcttgcaatttgacattaatgtcattcatggccaaatggtgttcaaggcggctttcatgggacaaaagtaaggcctgtacttcttcaatggtcagagtatcgcttcgggaggtgatgccagacacaacggaatcaaattcggggccaagaccgttgagaacttgaagaaccaagtcttgatcatcaactggagaacctgcgatagccagtgaatctgcaatactctgaactttatcaacaaattcagagattgacaaattgcctttgtgaacatgagagaattgacccttgagctggagtcttcgagcgcgagtctgtgaggcaaatttttgttcaagagcgcgccagaccgcgtaggagctatcgtaattggcaacagaagcaagaacattttcagacatggaggatcgcaaccaagaaagaagtagttgatctttgcgtcgccattgatgaaattctggatttggggaaccattgagcagagtagcaggaggaggtacgcc

SEQ ID NO: 212907 - DNA, 660 bp, Cannabis indica
tcacatattaaatagttaattaaatttttaaagtatattttcaaaagaaatttaatttattactaaacaaataaaaagtgataatagattgattttttttttttttgtaagaacaaaaaaagtgataatagtttggcataagctatattttattgttaaaaaaaaattacacaaagtatctaaaatcatacttgtttttatatatttttacgggctgttatttcttttagaaggaaaacaatttttatttaatgttgttgcaatattacattatgtttccgtaatgtgaaaatagttgtttttttttttttaagaacaacccaaaaagaaaaagaagggtacaaaaaaaacagtatcttaaaaacgtaaactttttgttgatttttggtattatcaaaataatcaccaaagaaaatgctattatattgttctagattgtaaggaactccaaaaaaaaaaaaaaaaaaaaaaaagacccaactaagctaaatgcaacgtttggatttgaagtccaaaatccattcatccccatctaaacaagcttttcaaattttagcccaaattccactagtgctacttccatgtcctggattgaaaagactaatattgagaaacttacaatatactgacttttgatccaatctttataaaaatactacc

SEQ ID NO: 212908 - DNA, 601 bp, Cannabis indica
agtaatcttatgtatttttttttgaatcaaatgtgtactcatttctcatgtgtaagatagagaatttagttataaatggtcacaagaactaattgatacaactaagtaaaattaatcaacctccataagaaataataataaaaaaactaaaatcaatcatcccaataacaaaacaaaaaaatgaaattttctaataactaactaaagacatttcgggacagaaacacttctcaaagattttatttagatatttaagtttttttttaacttttttgggcatttttttatgatataagtcgcaacgttaatattacgttgataaattagtttaatataatattaggatagataataaatttatttggattgaatataaaatctcttcactttgccttcatttttttctctaacctatatggttatccttaaaaaaatattaaagatttcaaatacccaacacgaccccgaattcgaaccgggacctgggacctgggacccggacctaagaccctgacccgaacctagactcggattcaaatttgaactcgaacccagacccagatcgagactcggattcggacccaggaccctgactcggacc

SEQ ID NO: 212909 - DNA, 1055 bp, Cannabis indica
ttcgcacaaaatcgattgatgaagtaatcggtattacaccgctggagttgtcggaggaagaagatgaagtttcactaggagtaatagggagaaggagctgcgattcacagaaggacttgtttcaacctccactgtgtcccaaatcctcactgagggaaattagacgcattgatgaagctcgagatgacctgatgcattttgttcatgcgaacaatcaatgtaacagtgatttggctaaaggtaagatctcgactcctcctatcttacaatctggttcagtaattaggaatctggagcaatctatgaatcaatcagagaaggctaacacggtgaagaatactctagatgacatagaagatgaggtgaatttttggcaaccatcaattgtatgttatgttctgggatctaatccccctctgcatatattagaaggatttgctaaccgatagtggaaagacaagattgataaggttcaaatgctcacctatggagtgttcatcattcggtttacttccatggaatacagggatcaagtactcaacggggggtaattttcttcaatcgagggctagtcattatgaagccttgggatgcaaatacaaacttcagaaagggggatgtcaagactattcccatctggattcaacttgagggatttgaactcaaatattcggggcaaaagtctctctttaaaatagtgggacaaattggcaaacctgtgatggtggactcggtcactcgggaaagggatcgactaaattatcctagaatcatggtggacgtcctcatgaaccagaagtttcctagtatgttggagtttgaggatgagtatggtagcaatgcatctgtgggcgttaagtatgaatgaaaaccagatttgtgtacgaattgctctggaatggggcatttaaatggagaatgcaaaaagaaaaatggtgctaaacagagtggtgtcaaagaagataaaaggaaggagaaacccgactatagatgaatgagggattttaggcagaatcgaaaggagaaagtgcaagagcagaaaactcaagtaaatg

SEQ ID NO: 212910 - DNA, 782 bp, Cannabis indica
agtttattgagtactacttcacgtcggtcaacgctatagacagtagcgctgaccgacgtgaatagtgtaatttgtagtagtgatgtctccgtttcaagcctatattgggcccccttacaccccacaaaataatgggtctatacaagagtgaatcactttagctacttcctagattgacgactggccctatagaccgatccaagtatttccaacgtgctttattctaactccaacgcttcaaggggaaacttcctaaatgtagtcaccccaagtcaaggacacttaactgtggagttccttcatgaagggctaccaaaacagggtacttctttctaatataggtagtcccaaacaattcattcaagtcctcaacaccatgtagtcccatgtatacataatctcaaaatcactacatacaacctttccccatgtcatgtggattatacagctccttgtctttccttcgcggatcatggggctctaattgtcacagcttgactcatgccccctggtagtgaatagatccacccacacaatcaccacatttaattcacctagggtttaagacaatactcataaattgtcccacttatactaacattagatcactttatatcaaaatattcccttctctaaattaattagttggatacccccgttaactactcatatcctatattgcacttaggaatatcaacaaacttaactcatatttccatttctctaattttcctaccatgtcagatgaactaccactaaataacatatcggcacagtctatt

SEQ ID NO: 212911 - DNA, 747 bp, Cannabis indica
ttattttttatttttacttttttggacaaacaaaattaattttattttaaaaaaacaaatattaattatttatttaattaagattaagattatttgtaagagtttaatattttgagcactcaaatcacatttaaaataaaaaatttcaaaaatatttaaaaaactaaatttaaaacatatatcaaatgctttaaactcattttttatttttatttttttgacataataataagaatcggtcgtgaatcgacaatgcatgtatcagcaatcagcacaagatcctcttcaaatcagaatagctgtacaagatcctcttcaaatcaggatagctaatattttaaagcttctttaaaatttattgtttatgctctacatttataaattttaaacatattttattaattatttgagattttagttttactatatgtgtaaatattaatattatatatttgaaataaataaatatatcacagaagtaaaattttggtgatgtattttaaaaaaattatatggtgtaatgtaaaaaattaaagtaaaatagagaaaatagagtttggtaatatattttaaaggataaagtagagaaactcataagagtgctcttaattaagattaagattgtaatatcggtaagaatttttattttccctacttgagtattaattaattatttttttctttaatcgatttttatatatatgttaaaatgtggatatatatatttatgagaaattcgtgcactct

SEQ ID NO: 212912 - DNA, 547 bp, Cannabis indica
cagaaagccaaaatccctaacttctttgtggcaatcttttttaaaaatcgtagatcaatgatgtgtaaaattttaaaatgattttcttaaaagaaaaaaagtaaaattgacattattttttttaatacgtagtccaataatatatcactacgactacgagtttttgagttgacttttaattaggattgtacaaaaattttcataaaccgaccaatttgaataacccaacaaaactaaattaaaaacatcaataaaaaacacaaaccgaaaaaattgaccaaattataaacagtccaatttatgaattgagcaaattaaaaataagtacaactcacctaataaactcgatttaattgaattaacccgacaaataccattgttttacaaaaaaaaaataccattttcagttttgtattttttaatatttaacttttattataacataaataatattatataatataattataaaaaaaaaaacccaatgacctctcacactttctctctttaatattttatgggtggaaattttatttattttgaaact

SEQ ID NO: 212913 - DNA, 1066 bp, Cannabis indica
aacctctataacaaatctgtgtgcttactactttttcattttatttgtgtaacacgtgacaagcatcaagcatcagattcatacgatcccgctgtccgttgatcactttttgaggtcaacatagtggttcaattgagtgtgagtgttaaccatagatatgaacatctatagctgttatatttatctagaagtaaaatgatagtttcctttgagtttgggtgaagacgataaatgatagagcgctcatttatgtaattatattagttactgaaatatcatttacaatgacctaagtattttaaggataaaataaaaggtaaaataataattttatccttactcaatgtagaccatctgtacaggatcattgattagtttgattgaaataatggacaattcatagcgtacctatattaggtatatggagccttctatgtaatcaatagtgtaattctgggtctatagtgaattcatgagaaattaataagttagaaaatttactcggtaaattttaaatcaacttattaagagtttgattacataggctcatgatccccgcaatacttaggataatatcaacttgatgtctcaattaattgatatatttaatcaattaaaattcaaatattaactatgtcaaatttgagaatttttcactaagttgggctaaattgagaagataagaagaatttgtttgttaattatgataaattagtattagtaattaattatatttagagttttaatttatagttattaatgattattcagaattgaattattaattattatttattaattaaaaatataataataattataatatgtataaagttttgaattttaaaactaataattgtatcttataaggattatggaattaattaataataaataataaatttttatttaattatatgatataattatatttaatctgatccgatttaaattttgagtgagatttaatcttggccactcaaaatattttattcttttatttaatataataaatttattacctaagcctaaagataaagttaaaaaattctaatgactcactttt

SEQ ID NO: 212914 - DNA, 1133 bp, Cannabis indica
tttttattttttttaataattataacgataatatttgtacacaaatacttcactttttttatatatatattttaaaatagcaaattatattttagttttcaacactattaatttgtttataatatacacgttaaaatgttatattttaaattatatcatttaatataaatatgatatatatatatacataaaaattataaaagttggacaacaccgcgcgaagcgcggcttagttccctagttattttataaacgatgtaagaatattgtttagtaactaatcaacaacactcaaatgctatacaaaattaaaatatttctcactaaatattcatattttcaaacatttaaacattacataaatatatacaaaataaataatgcatacattaacattcacattcacataactaaataaattatcatgagattttgttttcttagaaaaagattatttctctaattctctacaaatatatatataaggtgtataaatacaaaattttctattcaaattcactatccactgcatgatatcttctaaatcatctccaggcaaagtaaaaatttggatcgaattagatttagtataaatattgaagagaacattagaaaccaataatacaagtttgacactaaagaaaaaagaaatctagaatatatacttctttttcactaaataaaaattgtcattggaagcaaccaaatttcatcacttcaaccctttttttctgagcaaacaattagataactagaagaagaaaaatgaaaatacaaaaattattacaacatagtgaatgaacatatgaaaataaacttttatcatatagttggtgttcacttaatttaaatattccaaatcgtaattgaattataaataaccataataaaaataaaactaaaattattaaacctaaaattaaaatgaaaaaacttagaaataaatcaaaactaaaaaattaatcaaatacaaagaatctaacagtgagctaaaaataataatgaaataccaaattctaatacaacatatatcacacacatatacatatatacacggtaattacaataaaaaataattcgtgtaaaaatatatacatatacatttatccatatatatatatcaaaaataatct

SEQ ID NO: 212915 - DNA, 689 bp, Cannabis indica
agagtgttggagatgttcttctttgaagggcgtttccaagctgtattatgtcttacctctttatcattttctttttgtaaatgagctccactgatttttaggaagatgatcaccgaatagatgacgacttactcagattactctttgaggatcattctcgtgtatctcataatacgttacttaaatagatcgtttgaacattaatttaaacatatataataaattattctaaaatttttaaaaattgataatataagtctaatataattacaatataaataaattacataaaaattataattttttatatactaaacataataataataaaaaaaaatctctgccaaaaaaagtgaaaataacacttttttcctaaacttcaaataagcaacaattatatatataatattttttatatatatatttacatttcgaaacaatatttttttaaaatatttttacgaaaattcacatagcaactaatataacaacttaaatcataatccaaatccacatagcaaccaccagagtaactatcgaagcaacccaaactgtaaaaataaaacatagtatataagatgataccccttgtatatatatacacttagtagttaagtggaaaattttagtagtcgtacttaaattggacctatttaagttgaaaactagaaactcaaactaactcagcc

SEQ ID NO: 212916 - DNA, 768 bp, Cannabis indica
ttatttttttcttataaaaaatgaagttatataggttgtttttgaataaataatagaatagtgattgttgttgagattaatttaggatattaaagtttgatttatttctatttttgatcaatctagattcgactaatgtgggaagagaaatactaacaaatggccttatttttctctctagtgaaagttaatgtctcttttttagcataataaagcaaatatccctttttattttttgttatctaaaatactcttgactatatataaggtatatattatatgttttattcattcaaaaaaaattatgaacaaagaaataaaactgtctgatcaaaatatgaaattgtcttgcataatttatttattatactgtattttttgttgcggtacatcagtttaattttcaattatagttggagtaatatgttatattttttagtcaaacattgatgggtctatattattgaatgcttttttttgtcgttctctttttattaacaagtgttgatatacgtacatcaacgtataaaactagttattgtgtatatatgaatatgaatcatataattcatgcgagaaaagttataatatatcaattgtttgtactaagataaaaaaatttgatgaaatattaatttttagtctgtggtatatacgttttgcattatggtatatacattttgtgtactacagtataacatttagaaaataaaataataaaatttggattgtatgaaaatatactctaatcctaacctaatataccat

SEQ ID NO: 212917 - DNA, 507 bp, Cannabis indica
ctttcaaggacttggaagctctctagtaagtactttcatagaaaacaaaccctaattaatttgatctctttaattatcatcatgttcttcattagtaatgaaatgattcatacatatatatattaatttaatttaattattggattaattgatatgttgttgtagtatttcactatacatatattgtattggggctgcatacaatctacttagggtttgtaataattgcttccatggcaacttcaaaggacccaacctccctttagcatgggctgctctcttcttcgatcaggtatataatatttatatatataggcactaaatttacttaattaatttgagtatcatattaattataatagtaattacttttaattattaactataggtattttgatatttttgagtaagttattattattattattattattattattattatttaataaagaatacagatctacaaaaaatgattttatgctagttttagttacaacaaaattt

SEQ ID NO: 212918 - DNA, 695 bp, Cannabis indica
tttcaataaactcgatcccaatacaaactacgagtcgggtccaggtccgtgttcgtgttgggttaatataactatctaacaccagtagtacctaattgtgaaaactgaatagggttaatgtgtgtggtgtgtttgtgaatggtgtttaagtcaaagtcatggactcatggaggatagagataaagatagaggaaattattacctgaaaagagagacttgaacgagagtgctgggccaccacatatgagctggttcaaccacatacttccttaacagcccagcccaaccatatcccagcaccttacttgtccaatccaaccaatattatatacattaataataaccatttttcttttttacttaaccaaaaactgcacccactttaattgacttttgtttttataattgtaaaaagcatattggtaaaacatcactgtttttatgacaaaatcaatcatttagttactcctcctaacaagttttatttagcaacagttaacaactttaatttacttatagtacaaaaaagaaaaagtaagttttagtaataaaagtaaagaaaagcattgatatttttagtaacaataacagctattgaatcatgataattaaggtgtgaatttagaaatctaaaaaaatatttaattcatctattatatgtatgtaaaaatccatctgttaatttactttttact

SEQ ID NO: 212919 - DNA, 946 bp, Cannabis indica
  modified_base (861)..(861): a, c, t, g, unknown or other
gtatttttcttctctttttatttatgttcatgtttatgtgttcttattgtgtttgattatttgtttagttgttgtgttttgtcaccattgtttcatttagtagatttggagttgtgtcttggtgttgattaataattttcaacatatttcaaatattattaaaaacacacgagatatacaagatcaaagaactcataattttgtatttgtaattttaaaaaaaaataaatattattttggaccatatattttgccaaagttatcgattagattatttattttcttaatgataaaatagacactactttttaaaatgataaaaatagaactttgagttcaatttttgacaatattttttttttaatataatcaacttaaatacaatttctaacacgaataaatacagaaaatgtaacaatttttatcataacatctctaaattggattattattaagttttattttgacaaaaaatcaatttaaagttctatttataccattttaaaaattacaaaattcattttatcatttaacaagactgaataatcaattaataacttttacccaatataaaatctaaaaataatatttactcaaacaaaaaaaaatcccatacattcgtaaaagaataaagtaatcaaatatttagccaaaaaagcttcatgggacccaaatgtattattttaaagtaagtctaaaaacaactaagttttgtcacatttaattattattattaatatatgatatgatataacatatttttatactatgtgaaatcaatcaaagttttactttttttctataaatggtgtctactaatatttattaagggggtcttaaaaaaaatatttagttatactntattttctaattttattacaatattaaatgatctatttttttaattctttttatgtttagtttgtagattttttttttatattga

SEQ ID NO: 212920 - DNA, 748 bp, Cannabis indica
gtcgatgatgatggaggtagtagtgctactgctagtgatagttagtgatggtgggagaagaaggaggaggggaggacgagaagggaaaaaattgagtaaattttttttttaaaaaaaaaaaaagaaaaataaataaagttattaacgttttatttttttaataaattattaaatgtactttatagtttgccacatgaatattaaatttgtcatgtaaaataattaggtaaataggactaatcacatttaaagaatggacagaataataaatttacaaataaaatgacactgaaaggagttttgtcactaaaaaataattaacgagttaagtgtgtaacaattaaaatatatggagatttagccgcatttcttcaaaaattaatgataaaaatattattttttatatatatttttaataaatcattaattaaacatttaaatttttttatcaagttttgcaactgtatattagaacatattgttataaaaattaataaaaatatatcacaaaatttatttttttttgtaaaatgtatcacaacttttaagaaaataatataagttataatttagccaatgcttcaatatactctgaattattgagactttttcatttagtttctcgtatgagtcctctttaaaaagtaaataaataaaaaatccttaatttataatggagaaatactaaaagttattaataatgcctaacactttattgtatgtcatatagctattgatgcagttagaa

SEQ ID NO: 212921 - DNA, 905 bp, Cannabis indica
aatttttttgttattttttttcaatacctatgagaaataatactctgcctttgtctttttttttttaatttttttattaatagtaatttcaagtaccataaaaaagaatatgaaaacaagatatcttcttaaattttcatccacacaaagatgaactttctcaagtcataaccctaacgaacaatgcatatatatccacatttattttcttaggtgatttttgcataagatggttccaagtcacattaataatgagaagaaaagaaagaaaacgttgaggttttaaatgcaagggagtacaaattaattatatacactaaatgtgaatgagacctattttttccaagaaacttgactttttttggttttgagattcagccaattattttttttcttatattaaagttagtgtaaggacaattattgaccatcatatattttgaaaagagactcgagagagagtgttctcctatctcgagagtttatttctcttttcgttgctatgaatttagcacgagcgtttctcgctgttttggtttaatgcattaatagctcgtgctaaattcatgacaaacatagaaaaatcctccaaaatatagtcatcacctttaagattctattcaatattatattttaaagttcctacctatttttaagctaaactttccaaattacccatcacaatttaccatatttctataacacaagtgaattttttttttaaaaaaatgatattgataaaataaagagagaaaccttactaaaaaaatgcaataaaaaatttaaataaatgaaataagttgagggtataataggttgaacaaaaaaaagtgggtattttgtgaaaaaataatatggataggttgggctaattggactatatagaccagttaaataaagggaaa

SEQ ID NO: 212922 - DNA, 725 bp, Cannabis indica
ttcctttgaatcttctttgttcttagtttttcctcacaatggacaattacgtttagtatgacattctttttcgcatttgtaacatgcatttgccctacactctccgagatgacgtttggtacatttaggacattctggaatgttgcgtccattatttctattagatcggtggtcgttatcagttttttacctcttgtcttgacttgactgtccaggctgatctttttcccttttcttttggtcattagaattggctccacctttcttagattccctcatgacagcattttccttccaaattttgttttcacttcgcttagtcgtatgagccatttcgacaacttgagcataactaaattgaccccttgacacaatctctacatctcgagcaatcattggtttcaggccttccaaaaatccatgtgcttgcactctatcagtacgtaccaaatctggagtaaattttaccagtctatcaaattttttgtgcatactctgtcacagtaaggatcccttgggataatctattaaattaatcaacctttgctgctagaactgcttagttataatatttctcattaaagacccttctttaatcatcccagttcatggtatttacatcctttgtatgttccaccacctcccaccagatacgagcatctttcctcagcatgtatgatgcacacttcactcagtctttttcatcgacccttagcatctgcaaa

SEQ ID NO: 212923 - DNA, 522 bp, Cannabis indica
tgaacaaatttagacaagaatatgggaagaaaaagaatgaaacacaaccaattacgaggtttgaacaagtgatgatgaatcacttgcctactcctcggccagaacagccccaatggctcgaatctttattgaggtagaagagagaattaaaatgttgattatcaatgtgttcttgaaaaaatcactcaagaagcataacttcatttacaatcaacctcttacaacagacactatgattattaataacttcataggtctatacagcaaactcaaatatctttcgctctctcttgcacactaaactagctcttgtaacctctgaaattttctctcaaaaactgtgttgcaaagcaatagcgattggctatatatagccttgaggttgaacccgatcctaattgtcataactttaggtaaaagcgttggtagttataagaggttgagccgcagatgtctattttctctattattgaccaatcacaacaatacactatatctacatatatgtgtatacacatatat

SEQ ID NO: 212924 - DNA, 862 bp, Cannabis indica
ggaaggaattcaacccgagcagtaggtcttacgtttttactcaaggttgaaactttttcctggcaaattgaagtcaagatggtcggaccgtttaaagtagttaaggtattcccatatggagcggtggaactgaaaggcaagagtccagaaacttttaaagttaatggagagcgattaaagctctacttgggaggtcaaatagaccaaggcaagtctgccatcatattggcgcctctttgaaaagcaactcagcgtctagctatatgacgataaagacagcgctcttgggagggaacccaagtgatttagttactttgatgtttttttttagacttttgtttatttatttttagcattttaatgttttgtaaacttttagacgtttgttttatgttaaaccgtgctaagcgtgaaaagtggaaaaagaaaaataaataaataaatttttcgagccatcactcagtggtcgcaaccaccatgttccatggtcgcgaccctttttcatggtcgcgactatgggatttacagaaagcccataaaattaagaccgtcagtagtcgcgaccagattgattcatggtagcgaccctttttcatggtcgcgaccatggtcgcggctatgggtcttacagagagccttgaaatcgcgcattgatccatcgttgcaactaagccattatgtggtcacgaccagggatcgggctgaaaccctaaattgcctttaaaaagccccatttcacacctaaaccctattctaatccttcaatcactcttctaaactctctcagccgaccctacaccttttctacaccaaaaatttcaaatttctcatttcatcccaatttctcatcaaaatcccattc

SEQ ID NO: 212925 - DNA, 797 bp, Cannabis indica
tttatggtacgtaatttgtagctctataggtgtaacgcctaaatctttcattatatgtttggataatttataataatgtataccaaaaaaatgtgaagaatctcattagtttaaaaattaaaaaagaaacatatgagaaattctatatatattaaatattgctttaagggttcgtttggtacgccgtattattataccgtattatattgaattattttttatataatatttttatgtaaaactatatgtgatattaatttttatgggcatctaaatatgtaatattttagtataaattaaattttaatatagtattatataaaaatataatatataaccaatacaatacgatctaatatgacgttccaaacgagccctaatattggttatatagtttagtagttctacacttctctacacaaaggcaaagagaaaattataagttggaatcccccctcccccaataaaaaaagagtttttagtggctaaactctcaactatcgttttatttgtacttaatccttcaagtttaaattttagctgtaaaatttttcaaactactaaactgttagtaaatataagatatcattcggttaactgccacaatggactgtttatgtgtaaactcttgtacacgtggtacatttatattggtacatttaatattattatttcaaacctaaataaaattataaaaataaaaataaaatattaaaaaattaaaatattataagtttaaatatttttataattttaaataataataatattaggtgtactaatataaacgtgtcaca

SEQ ID NO: 212926 - DNA, 949 bp, Cannabis indica
cttgtgttttactatcatttgatgcaacagatactgaacttgtctgcttatcttttcttgcaagttagatgttaatttgctttcatcgtccattagatatatgcttggatccaaatgtataccctgcaatcaaaaaattgaaaagaaaatggaatcatgctatttttaagtgagatgcacaagaacataagaaatgctcatcgttatggttttctaacaaatgtgaagagaagtaactaaaattatgagtacgagaactaactccaacacaaatgcaatacacagagcagggtgcaaataactcacaattaagtcgtataaaggtacatttttcataagtagtcaacccttttaagtgagatggacaagaacataagaaatgctcattgttatggtattctaacaaatgtaaagagaagtaaataaaattatgagtacgagaactaactcaacacaaatgcaatacacagaacagggtgcaaagaactcataaagatacattttttgtaagtagtcaacccttttatatatgtacaaatatatattaataataataacggcacctcacttcatcaagtgcttatagtttcttgtcttccccaccaaatcgtaaaggagattatagaaaacattggaagaattcatcatcaatccagcaaaaagttttatcttcccattaccataaaatagaaaggataaccatacctctattattattggttttccatctttcattgctttcttcagatcaccagccaaacctgtgaggcatgaaacacagaagacatgttactgaccagtaattttgaaagcatcacatgcttaaattttctgtgaataagcaatggtaatggtgaaagaatcattgacttaatagcccaaaagaaaaagatgctacctttacgaacaattctgcattcgcggcaaaattcagtaattaactcctcag

SEQ ID NO: 212927 - DNA, 864 bp, Cannabis indica
gttattcatatcacaacaatgattattaatagatcagtcagaatcgtgagtatacatgaactcctatttgtgttcattataagttttttgatttactcattaaagtttcttagagaaaatgattcttacaccttttattttgggagcttaataacatgagtggctgggagatgtgataataactattattaagtgagattggcgagacaacaagtccatctcaggataaataaaatacacaatgaaagttgttcagaacgagtaaacaaagagctcgcaactcattggtccacatactcgtgagtaagaacttgcaacttattgatccacatattagttagtaagagctttcagttcattgatccacatactcacgagtaagagcttgcagctcattgatccacatactcgtgagtatgcttaaggagtagaaataacttcaacgtttactcacctcgcttttgacatataaaggagaaccgtgagatgtgttgtatcttaacacttaatatttttcctacaaagacagttaagaaagataacatacaatcaacaagaactatccaacacagtcaacataaccgtctatggataaagacaaatagcagttgaacgattatttaatattatccatgtgtacaaaaatgacacgtggagaatatccaagtttcatgagcggttatgaatgaatagatcccaagagaataattgtcactaggggtgttcatcaaaccgctcaaactgcccacaccgcaaaaaaatatagtttgaaattctgtgcggtgctgtcgcggtttgaatttttcctaaactgcacagtacggtgcggtttacggtttttaattattaatatgcagttcaaat

SEQ ID NO: 212928 - DNA, 921 bp, Cannabis indica
gtggctcatagattgattcagtgtaacccttaaatagagagactaaagtttttttaaatggaaaagtaaagttttcacttttattgtgtaaacattacacacaatcacatcacattagtttttaaaacattagaacacaaaataaataaaatataacttttataaaattgacactgtaagatttaggaggtgtatatattaagtatacatatcactactctttattgaaacacagtacttaatatttttagacaaataatggtatgtttacaagaaacctaacaagtaactaactaataatcttgttatatctccaaacaatttgagaggagttatatattcgtattgttccatcgaaggacaaatatatcttttgaattatacttcaaattcaaacaacctaaaaatctcacattatttaaatcagtatctttgttagttgtagtgatttaagcatatgattatttgattctttattgttactttttattttaagaaatttccactgttattataaattataatcgtttaaaaaaaaaataaaaaaaaagaactggatatatcacccatttaacaaacactttcatctaattctaaagcatattttactaaaccatacgcagcttaattaaaatatttatacaataattgctactttgtacattattaaaacatacaataatactttgtacattagcaaaacatacgataatttgatttatcgttagtactttgtacgatagaaaaatataaaataatttgattttgcatcactactttacacattagtaaaagtatacgataatttgatttgtcgtcactacttcatacaataggaaaaaaatataataatttgattttgcatcactactttgtacattaatgaaacacacaataattttaggagcttttttattttta

SEQ ID NO: 212929 - DNA, 793 bp, Cannabis indica
tttgataattttttgtcgttcctgaaaggtttgtaaattatccttaatgagcattagggatgtcatgtttttgttgtgtcgtccctgaaagtggctatttgggacgattaacgttttgggataatgtgtgacgctatcaataatcgtcccttaatcctatttttcttttttttttaaaaaaagataatattttaaaaagagaacaaaagtattaggaatgtcttaagtaaaaattgtcatccctaatattccccatattgttagaaaaaaaaataaattttattagggatgacaacatgatacaactataatgaacaacttaaagttgccttgatacaattgttcctaatgactatttttcttgtagtgaagttaaggccatttttaacagtgacaatctgtttgattgcttaagagatcccacgtgtaatattgagtcaattagaattttttaaatgaaaaaagatgaaataaataccgtagttaggcaatagtcatgctaactaaaatatccatattacattcctctttcttctattaattttgaattttttctgacaagtatttcgagggcaacacccattgaactagacctaaggacccatcaaaaagaactacataatttgtagctatttcacatcgatatatagttatattgaattgatatatagaactatgaggacaaaagataagacttaagcatagtaaaagtagttttttttttttctttcttctttttttcaccatgacattgatgtatatatgagtgttttattcattgcacaaaagacaa

SEQ ID NO: 212930 - DNA, 584 bp, Cannabis indica
ctgttgttttgagtagttctgttctgtgttcctataaaaatacagtatttttgaaaacatttctgtgtgacagtatttttataaaagttaacctaaattctaatatttttgtaagttttccatttaaattgggttattcatcaaattgttcaaactgtttaaatcactcaaatcatctgtattgcaacaaatgtcgtttgaatttttttgtagtacggtcacggtttgaatttttcctaaaccgcacagtgcagtactgtttgcaattttgaattgctaatatacggttaaaatcataccgcaccacatattataacaatacaacttttatatttatttacatctaatatgtaaaagcccagtctaaagtccactaattattatattgttgaaaaactttttttatatttattttaaaaccttatggtatttttgaccggtgttgtttaaactttgttgtatttataatagtttaattatttggtgatagtcaaaatcgtaaagcaccgcaccactccatttattgtggtgcgatttctacggttttttaattttatagtgcgagtacagtttgagaaattaaa

SEQ ID NO: 212931 - DNA, 572 bp, Cannabis indica
gatagcatagatatggtctcgtgataccgcgagctcagtataattcgcgaagcgcggtccaccttttcttttcggcgaggattccttctctagaggggacttggcaaatttcagacttcggtgtctccgtgaactgcgtcttcttgggcttcgacctctggaactttctccctcggggactgcgggatcgtgactgaggcactggtaacttatgcttgtctttgcccttctccaattctgccagagaattctcaatcctcttatgcggttctgccatggcaaagaactcgactagcgattctggtctccgggcctgtagctccttccaaaagtcagttctcggcagtacacctgttattagcatacagactagcaaagactcaggtgccttctcaaattttgttacttcggcattaaaacgcttaaaatagacctgcaaagactcaccgggttcttgtttgatgttagcgagagtggtatagggtggcctataggtcatcgtggcttggaaatgcgtaaagaacaggtcgacaaaggtctcccatatacagatagaagcctcaggcaattgg

SEQ ID NO: 212932 - DNA, 596 bp, Cannabis indica
aaataatatcaaaataacaacaaaaaataatatacatataacaaaaaatcaataacaaattaacaagaatacaacataaaaaactgtactttatgtaaataaaataaaaaaaaaattgtaaaaatatttaaaattccgtaaaattgtatttttgtaattcttttattatttttgtgtatttgtgaaataatctcaatagaaattgttgtgtaatttgaagcccaaagacaaagctcattttcttcagcccaaatccataaagtatgttataaacacatgctcagatctgacatatataacctatctagttgcatctagctgtgggcttcttcaatacgaatagagttttacatatataaatggaagaatgaaaaataaaataaatataaaattattataattagataaatataagtaataagtttggtattctttatgctctcctctatttttcactctttaacagttacacatatctataacatcataatagaagaatggatgtccactaaaaaaaaaaaaacttgtttataattgttttgattatataaaaagtaaccgataaaattcaatacttgattatatatatttttaaa

SEQ ID NO: 212933 - DNA, 670 bp, Cannabis indica
cttatacgtgtgacacattcatattggtacacctaatattatcatttaaaaaacataaaattaattcaaattttatactattttttattttataaatattttattttttattttttttataatttctatttaattttgaaaataatttttaaataataatattaagtataccaatataaacgtgccacgtgtacgaaaatatacacataagcagttcatggtggcagttaatcggatgacacattaaattttctaccggttcagtagtttggagagttttactgctaaaatttgaacttggatggttaaatgcaagtgaaacgatagttgaaagagttttgccaccataaactctattatttttatcaattagaaaagtacatacgtagcagctgcatttcaaaagaaaattgagggttttcattttataagttcgtaaaaatattattttttttaaaaaaaaaattattttgtaggaattttctttttaaaaaaaaggttataaaaatatagggaggaaaatagtataacccttttagttatcctagggtaactatctttacctgtttttccctatacttttaaattttttatttgattttttgaaaaaaaaaaataaaataatatgttatgaatgactgtctatagtatagaatatgtagtataatct

SEQ ID NO: 212934 - DNA, 654 bp, Cannabis indica
aatacaattttctcaattcgatcgcatacaccaaacacgagaacacaataaacactagagccaaccctgaattttggtgggccttaaaaaaaataaagttttttgggcacttattaagaataagtggtatttctaagcgattttttttttcttttagcccctatgctccgtaaatgttagatagcctgccttaactcaagaccgaccctaatcagtgcactcatacaaattaggcactcaatcatatacacacacaatctacaaccataaaaatacagaaatacatgtagtaacaaacataacagtcataattaattaaaagacaagtatacaaagaaaaaagagttaagctatatagtgacataacaacataattagattatgactgtattaatacatattgagagagtaatttatagtaaacatacttatgtttaattttcaattgtaaataaatatctaaatctaatttttgacaaaattaatatctatgttatatttctggaacttccgtaagtacttaatcgctaaatgtcaagtcattatccacatgtcattttttcattggtatatttaaactaatttttttaaaaaaaaataaaaagtaattaatgactaggactttcagaacttgccacgtgacaatatacttag

SEQ ID NO: 212935 - DNA, 1052 bp, Cannabis indica
atttcaatttatcacaaacacttggaattcaaaattattaggcgaatagtaatcctaatatgataatagattaaagtaaaacttaatttagtgatcatctaaacaagattaaaataataatcataatattaaacatagaagaatagaagcaatttgatataatagaaactagaaattaacattcatcgatgaaatttaaaactcatgtttcgggttttgaaataacttttagctaaaagaaaactactcaaaactagatattataatcaaaatcataataaatagtaagagtttaaggagaagaaaaagagctatgttgaagaacactcaaagttgcaatcttcgtcttttccttgctctttctctgagtttctctctcaatttcgtagctaaaaaattctaaaatttgtaccctaaaagtcttatttataatgcttgaaaaatgtctcactaaaaaaaagagatatctctcttaaaaaaagataaaattcaaattgcccagtaactgccttcttgtcgcggcgagcaatgcccttcaccgcgacaacagtgtcctcgccgcggcgagtagcgcccgtggccacgctgacaacacctggctctttatttttttctttttgctcgcagcggcgagccttcaaccttcgctgtagcaacaccccacgggttttgtttcttcatggacttctaaaactctaggaaaatattattttggcacgtcatttcatctgctaagattacctagcctcaaaaatactaaatacattaatttttactcataaaaattaattttcttccaaaactcgaataattccgaaaacgatgaaaaatacttagattaccaagaaacaacatcctctaactatgaaaaaatcaacaattttaaagtctaaaaggctcttatcaaattccctcacacttagattttactagtcacttagcaaaacactgactaaactaaatacacaagtaaatgactcaacatagaaaaaaaatcaaacaatggctttgccaacagtaaatttagtctcaaaaattactcaaacagataa

SEQ ID NO: 212936 - DNA, 682 bp, Cannabis indica
gccaacaaaggtttccaagtgttgaagggtcagctagggttccatgactcagccaagaacaagccaaggtcaccaaacccaagcatgaacaggctagctttataaggtaaaaccctaaagctgactaactcccatgattaagccttagggccgaccaggtctcaagtaagacctcccaggccgaccaaggtaagttttgaatcccatgtatgtttttctttcaaaactcaaatatgtgccgcgtatcctttattaatcaaagattcaagaattgcaatgagggccaaaatcgaatcttttccatcaaaaactcacacattgtacattttaaaactgtcatgagaatcaatataccaaagggattacaaactaacatgagaatcaaaaagtttccaaaagcttcaaaagcttgaaacttgctaatgacaggtacaaagaagagatacccaagaagaaaagatgagacatatatatatagagagaagatccaaatgcattccatgcaaaaaagccaacacttggcaagacaaggttgctcaacagagactactacaaacaatacgagagctagaaagtccctatccgaccagatgttcaaatagggacttgggggcaaatgttatcccaaattttatctgcctaactgttgggttttgtgacgtaaataaaacccatttcaata

SEQ ID NO: 212937 - DNA, 538 bp, Cannabis indica
tcaacaatgatggagcgaaagaagaagatgagagcaccaccatcgttgattgtggtgggtttattctacagtctgcttatttttttttacaataaaataagtaaattaaagaaacagtacgtgaaatgaaaattgagagtttattggattttgtgttgtaatttcgtttttggtttttttacaatttgtggaattttttttatattttggggtttgcctttgaatttgttcaatctctgtacaagaaattgggttatatatgttcatgttgttcaatcctgttggaaattttttttttttttgcattataataattttgtaatttttttgaattttagggtgcaaacaataaatttttgtgtatgataaattaaaaaaataattaattattctgcccaaattaataaattaattttttcaaaaaaaaaataaaagtaattatttatataaaaatttgatttaaaacaattatagtggcacttttggtgtgtcactatatctctaaaaatattaataaaaaagaaagaaaaaagaaaaa

SEQ ID NO: 212938 - DNA, 514 bp, Cannabis indica
agcaatggcattcattgcaaaatgaagaggcaacaacatacgggaagctcaaaaccttttaagattattgagtgtcttaagtttgagggagttttgcctcgcttccttcattagtagatattataattgatggaaatgaacagtgtccattattagtcttccaagatcagcatgtgtcacaaaaatgagaattgagtatttggacaattcagactcattgtatgatgcaataaaaggaatccttgttccacttctacttcaagtggatgtttgccttttagtactctcactccactctgccattaccctcctcttcaagagcttcttttagtgatatgtggaccatcctttagatccctccatatggatttatttcccaatctcaaaactcttaagattgaattcagccgccacattgaagcaatctcaatgtcagatgggaaatctctttgaggaactaacatatttcagaatttgagggttgtggtagttttgtatctttcccaaatggtgg

SEQ ID NO: 212939 - DNA, 699 bp, Cannabis indica
aaataccaaaatatctttcaattttcagcatacactttaaataaaggactaaaatttcaacccaccaaacttactttccaatattatattttttttagttaaaatatgcatatgtaaattttataaatgctacatacatatgattcatttgtataaataaatcagataaccataaacttgcataatcaattcatctttattaatgaaccacttgaggctagctcaagtggctataggtgggtgggtgagtattggaggtcctgggttcgagtcccaagttaaacatgttgtaatatataaacgcttaaatcaaaaaaaaaatcatctttattaatgtaaactaaagtcatataaattaaaaggactttatatatgtttaggtaaatggtagatgagaatgtcatttaagctaatttcatatcataaatttacaaaataactaatcaaaaataccaaactttcattataaatcccttttctttcaatatttaatgcttctttttcttacaataaagttataatctcttaagatatatctcttgttattaatatttttaaaatatgaatttttttttgaagtttttttattaataaaagaacttttttactaacataactctatgaacataaattataactctataaacacatatttccttgaattataactctatgagggcatatttacttttctaaaaa

SEQ ID NO: 212940 - DNA, 577 bp, Cannabis indica
atgaaggtaaaattggtagaatgattaaaaaaagaggtaaacaaaatagattttgaaagagggagtaaaaattaaaggcatcaatttaaaagagatatgtagtgtaatttcttctaataattaataaatatatttttttttatttaagtagtaatattgtcattaaatttttaagttataagattctcaatagttattttttggaatatatattttatttattattgttgtggtagttttttttttatcagtttgcacttaaaaatactattgtacactatatattggagtaatttctaaaaacattgtactaaatataatatttgctccttatcaaaattatatataacataatatttattctttttttaggtaatgtatttttatttttacttttatcaagaagaaaactttattacctccttatagagtaaaaaataaaaaaaaaaaatataaatattacgttatatttttttgggaaatgctctaaaatattttaaaatattacattcttatcttaaataaataaaaaaagaatgagccctaattatctatacaattttaaactaatcactaa

SEQ ID NO: 212941 - DNA, 547 bp, Cannabis indica
taaaaaataaaataaaaatggtcatcatctcttcacagaaacaaaatcactttacataatttattgtttttgtaagacattaggtcctggacaaagaattaaattcttaacatgagcatccctctttcctctaataaatttgtcatgcatcacatactttttatacaaaattaatatacccaaatcagcaagtgaatatatactatgaataaataatatatatatattattggataaatatattatataccttagcaaatattaaattatctgatataatattactttaaaaaaaattgaaataacctacaactttatctgatataatatatgagttatgagttagggggcatatgagttattagtatttggtctaccctgattaagtttatagcaacacaataagaagtgtgtagtcttatcaatggtactacatccttattttagcaaatataacctacaactttatgtactatatatcgttttgctttactttaaacacaacaaaagcaaagtgacatgcgtgtaagagttgattgctttactt

SEQ ID NO: 212942 - DNA, 639 bp, Cannabis indica
tatttatgtatatatgttaagtacggtattagttcaaactagggaatcaagtatcctaaaaaacaggtttggttatcaaaaaattaaacggaagatgaaaagtgtcaacaataggtttttattcaaaatacctgagaaaacaaccagctgacaaaaataaattgcatattctaacaattttcactaccattttctgacaaagaagaaagcctatagcatgctgcaatagataggttctaacatttaattgacaattttggagaattaatagaagataacaactaaagctcccaatttcattaattctgtcgaattatagaaaaacaaacccgagtaaaataataaacatgtggattgacattccccatgtgtcaactgtcaagtttttgaaacaaacgctcaatcaatagaatttttttttttgaaaaagagaaagaaactacttgtcttagattgactcctgccccgtcaaccaatagaattattttcatgccaagagcactatgctaagttaaagaatatgcatgaaatataccttttttcacataacaataatagccaaattctaagaatgttcataatgagtaattgagtaagaacccacattaaacatctgttttttcattttctttttttttt

SEQ ID NO: 212943 - DNA, 611 bp, Cannabis indica
gaaataactgtcaagttttacaatagaaaataactgacttaaactaatacttgcaactgtacataaaccccacaaattccacctggtttatatacatttgcaagtaaagaaactaagctaaaaataacataggcaaaaccgttccatcaataaagttttccttcacaagtgaaggatcaacaatctccaatgttcaacaatttcagacacaacctgaatttctcactagtgactgccttggtgaacatatcagcagggttttcatgtgtgcaaatcttctttactttgaccaatttactagctataatgtctctaatgaagtgtagtttgatgtcagtgtgttttgatctctcatggtacatgggattcttcattaggtgaatggcactttggttgtcacaatgtatgaataaattttctgaattaattcccagttctgatgtcaaacccttcaaccaaatagcttctttcacagcctctgttgcagccatatactcggcttcagtggaggacaaagcaacaaccttttgtaggtttgctttccaactaacacagcccccaaatacagtgaaaacaaagcctgacagagacctcctagtatccaagttccc

SEQ ID NO: 212944 - DNA, 693 bp, Cannabis indica
attttttttattagaattatatgagtactgcaaatattatgggtgtttcattgtaaatattttttattaaattcataattaaattaaaatacataatttttttttcttgtatatcacaaaagtcatcaataagtgaatttatactaaattttttggcaatttctcattcaatatatattaacaaacaatcacgtaaaattcattttattttttggagaatgtatagtcttcactatattggtagttgaaaaagatcactttgtagtaactataaaaaatgaaagagtaagagataaaattatcattttatacataattgggaaaatctaaaatagtatatcttacaaaataaattaatattataagagaaaaaagtaaatatcttaaaaaaaaggaaaataaaataaatttttataaaattaaatatataaaagtaaatctaacatatcatatatatataattttggtttgactttgtcaaactagatgtccatgtactcaattatcaaaacaaattgaatcacttaagctagcaaaagaaaaaaaaatcaaataacatatacaaacttaatcgtatagaatatatctaggggggccatggcctctgtatgccatatcgtacgtccgcccctgccttcagcatacaaactttaaagtttttcactcaagtcacaaagaggtcaacgttggggg

SEQ ID NO: 212945 - DNA, 1141 bp, Cannabis indica
attgttggataaaatcgagctccaatgatcttgctggaaaatcaaaaacatgtagtctcaacatgttaaaaagtaggggtgggcaggatccaaaccaatctaagtacaccgaaccaatctaattcaatccagagttacagaaaattagaaatctaattataattggattggacgtgaatagttgaattttaattgtaatggattggattacactctcaaaatttaataaaaaatggaactaatttaattatttatttgtagataataaaaaaaatatttaaatatcattttctattaaagaaatccttactaaaaaccttaagaactcgagtatattgatattaagattttatgtatatttttaagttaatattaaaattttgagtatcaaattgaaatctttattttcacctgatgtttattgattttcaatggatcttattatacgtgattaaagaaatccctactgaaaaaccctaagaattcgcgatcattcatatttagtttttatgttgtttttttttttaatgtatatttttacgttaatattaaactttggatatcaaattaaattcaattcaaaccgatcgaatttaattttcaaaatctaactagaaataaaaaatattggattgcatcaaataccctacttaaaaattatcaagaaataaaaacaaattatatgttattaaatggcattgaattgaaaaaaagaaaaaagaaaattacttgttgcaagtgaaattttgaccaccattgcaagcacctttccatttgttgggaggtggaccaaaaccttcatcactaaaactctgagactcaggccaaattccagagtcaataacaccaattatagtgtcactctccacacttggatttcttctaacttttttgtcaaatcccatgaaatcccaagacattgttgtttgtttataaagtaatttatctgggaaaacagagattacttccttcatacctgccaaaaaccatgcttaattaattttgacacttcattgtcttattaattatgttcttttgttttaggctaattagtatttttgttgttgaacttaaattatgttttttaaaaaaaaactattagtcgttaaaaattcttgcctgaattattgagattgttgga

SEQ ID NO: 212946 - DNA, 861 bp, Cannabis indica
gtggttgtgccctagtatggaacattctgactcatctgttaagccttgtaaataggtgtatggacgcctagatacaagtcggtattatataatatgttatatgcttttcttactaagtctgtcgactcatagttatgcttccatgtgtaggtaaaggaaaggcaaaagctgaataggagtgagtctgagctaggatgaggttgtacatgacatgtcggcgcgacctggagtgttcggtctcggtacatctagggttgttattttgtagtcgttgtgcgacctgggtattgtattttgaatattttgtataaaagtttaaaaaccggatctcggtagttgtaaataattttgtaaagttataaagtttaatatttaatataaaagctttaatttgacatgatttttgagaaagttctttgattagcaaagatagcactgtaattgaaaaataaatgtagcgtgccttaatattagggtgttacaattttggtatcagagcaaccaggtttgtttaccgaagcttgccaagacatatgtacaatcttcatcagagaaagctcagctcacggttcggtaagccagtaattatttagtgttatatgtgattattaaagcatgttaggaagcatattagatatggttgtttattttaatgcgttgccttaaaatccataagagcggtattaagttttatgatcgctgtgtcacctacttagcttatgggttcacaggctaagtcctattaaatgaaagcctagagaaatacaagaaagggtaatatggttgagatccgaggtggtaaggaaaactgaattccttataatccctgtggtcgcggccgaggctgtggaagaatttagg

SEQ ID NO: 212947 - DNA, 695 bp, Cannabis indica
acacacacgtatacttagcaacttagttaatacctttgaatgtgatgaaaatatttatggaaatataagataaatactagtgtttctttatttaaatataattacaaaataagtttttccatttttttttataattatggacattgtacatatttaaaaccactcgtaaatttttaaaaaaatcttaaatattctacaatactaaaaataaagtttaaacaactcatgattaccacacatataagagaaaaaaatatgagtacaacaaaatattttaatctttttttatccaaattattttcatgattacgtaggttgtatttatttagagtcatctataaattcttacaacaatttgaattgtttacagtgctaaaaataaggttaaaaaaatttgttgcacacatgattttttttttttaatttgtttggtaaataattgtttgaattttattttttggcactataaattattcagaattttttaaaaaattacaagtagtacgagaaaactacaaagtacgcgatcatgaaaaaaaaatagactaaaaaactttcttagatgtcaaaacgaattttttagctagaggtgcactataaattttttcaaataaaaattaatagttggccccctagtaattaggtcctggctccgcccctgaacgcaagagcattagatagtcttaaaaaaaact

SEQ ID NO: 212948 - DNA, 530 bp, Cannabis indica
atctgagatatatctctgattttgatttttttttgtgtcgatttaaaacaagcgtttatagtattagcgatcttttaaaatgatttcttattccatccctctcttttaccgttagtcaagaatacttaatgtcaattgtttataaccgacgcctatactatctcattttgtgtcagtggcataagtgtccatcttacgaaccaatagaaatataatatttgattctaagaacagtcacatgatctcctttttttagtagtgcaaaatcaaggataagcatttccatcgaaaggagaagatccattattgttgtcaagaataaagattcattagccaaatggcaagaaaagttcaaggtagtagcattaagtttttcttatacattatcctctattctttgtgttctccaagataaatgtataaaatttgtacacttcattttaaggggcgtattaaaagttagagttttggtattagttagttttgttattccaattagtttcatatagatattactctattattattct

SEQ ID NO: 212949 - DNA, 546 bp, Cannabis indica
gagcgtactttgctaatccatggcagcttgattaacatgcttatgaacatgagtaatagtaactaaagaaaaaagacaaaaaacaacgaacatcatcaattaaatgactttctactgaattttattgaattttttcattttttttttcatttttattgtaatacgtggattgttacaatttttctccattatttaaatagtaagtacttttctttgcatattttttttttgaaaaattaacttatcattcagatattaattggagtttacaaaaatgatggaaaaaagtctatcaaatcaagtcttatctactctgaatgtatgcacaactaatgtatgagatatcatggaatatggatattgcaggaacattgttatgagaaagcaaagcataatgccaaattacaatcaatcttaaagggtttttatagaccaggcaacgaacatctactctaaactcgtatcaataaagtttgtttgaatgattgtaagagcccctacaaaaatattatagcaaaaataaaagtccaacaaactaaaatacac

SEQ ID NO: 212950 - DNA, 504 bp, Cannabis indica
ggatgagtatgtaattttgtttttaaactatatgtaggattagcattagaataaaggttcacatatgtacgtgttattctatttatttagggcagtttcacttacataggctcatttggtatgttgtattaggtcgtattgtattatattaaattagattatatatatcatatttttatataatactatgttaatttttaatttatactaaaatattatatatttaggtgtccataaaagtcaataccacttatagttttacataaaatagctataatttattttattttattactagttatgtgattatatatatatatatattaaataatttaatattaaaaaataaccaatccaatctatacttttgcggattagattagattggatccaaaaaataaaatccgcacttagtgcggatcggatgcactatgaacaaaatagtacggattaaattcaatgaacactcctatataaaatttaatactatacaatacaatgtaa

SEQ ID NO: 212951 - DNA, 539 bp, Cannabis indica
atattttaatgtgaaaaatagtaatttaaaatctaatacatattgcgatatgaatatatttcacaacttcattgatcaaatgcatattccatttttatttataaagaaaatataatttaaaacaaaattaaatatttctttacacattcatttttttaaagttattttttatttattttaatatattgttggagacataaaacaacaataatttaatttattttgttgttaaatgttagctatgtgcaaaaaaaaaaaactattttgtaataaatattaaataatttaatattaaaatgtaataaatacgaaataactaatccaatccacaactttacaaatgggaatgaattgaatttgatctattatgtagattggattagattcaaaatataaaattatcacataatgcaattagatatactatgagcaaaatagtgtgaattagattgtataaacatttctactagtagtttatatcacacacatgtgtgaacaaacacacataattttatctttgtatagatttaatcacacca

SEQ ID NO: 212952 - DNA, 923 bp, Cannabis indica
agattatatagcctacttaagctcttagacaatcaaatatgttaaacatagagaggggacatattttacaatttcatttgccttagcagaattagaagaagcaggaagaagagtttctgtcagctaaatataagttgttttgacaaaaaaagcagcccgaagaatgtagtccccaaatgagactatcctcttgattcaatcacaatctgaatttgaagaatctgatttacagtttcaaaatcaaaataataattaagctttttcgcatcccaaaagccaagagaactaataaaataatcttattagatgggataaaattgagttttgtaagagataaatctaaaattagagttgagtgtgtgtaattcagaagaatcacaaaatttacttattttttaactcattgaaaagggtaaatatcattttggactctgtattttgcaaaagttagcaattagactctctgttttgttaaatgacaaaatagatcttgtattttctaaattgtacaaataaaacctgaattgattttttgtcaaaataaaacttaataataatctaatatagatgtgacaaaattgattacattttctgtattggttagtgttagaaattgtttaaagttcattatattaaaaaataaaattattaaaaattaagctcagaattctatttttactatttcagtagagtccattttatcatttaacaaaataaatgatcaaattaataacttttacaaaacacatgtacttaaaagtgtcttaaatacactccaattctattagccccatcttcttaaatctttgttcttttttgtaactaaatatttgcaaatactccattcaaaaatatatatatatttgcagccataacaataaaattcatgtataattattgttgtatttttattttttattttt

SEQ ID NO: 212953 - DNA, 1159 bp, Cannabis indica
atttactactactctcgtacctatgtactacaagtgatgataatatatatatatatatatatatacatatgcatattgtgattctcttgaaaattaactaaatatcttacatataatgtgatttaatttaactaaggaaggattattactgggttcaaatagcccagttataataatattgtacaacttgcattaatatggccccccaaaaatgaagaagaataaatacaataataatttataaattcaaacacacaatgaattaattatgggagataataataataataataataataataataataataatattaagctcatagtacattagttatacatcgaaaaaaggctgcaaaagaaacaagagcattaacactagcctccccgtatttcccttttcttaccatattgaattgatgttataataacctctctctctccaaacccatctctctgaaaaggctacagctatgctctcgatctcatttttctaattttaatttatagaaaaaaaaaaacataatgttacattttttttagaaaaaaaaatagaaaaaaaaaaaccttactagttgtgtagaggatttggacctgtgtgaatcaatcttttttcatctccatttatcatatctgcagactcatcaggactactgggacttagattagaagcgtgaaacgacaccgtctctgttgtcgttgttgtggtcgtttctacaaaacgagcttttctcggcagaaaccggcttagtctgtcggcgtcggattttgctacgcataagcttaaatgagggaaaattaagatgacccagaagaagaaaactgcaacagctctagctcccgcaaaacgttgtcgttttccgctttcttttgtacaacaacaaccactactactactgctactattgctaatattgctattactactactgctacttgatctttgaccttctttagcttgcatttgggccaaactgctggaactataataataacagatatatgaaatgtatttctggtagtagtagtagttactattactatttactactttgaggcaggccaaaaagaagaccatgaaaaagctgtatgggggtttttttattaaccgataaggctgtatgtacagtgagtactgtaaaaatgggagaaaaaggaa

SEQ ID NO: 212954 - DNA, 963 bp, Cannabis indica
ggtatgatattttaaattatttcattctaaattatttcatttgtccttttctctaacttctataattttatgtatctaagttattttagctatcaataataatggaaaagcaaaaaaaaaaaaaaaaatgttaattgataactctattttgttggctatatgacctttggaattctaaggctagtattttgttattattagtggaaaaaatgtaaagtgataactttttacggaaaaaaaaaaaataagttgaccctaattatatattgtagaggtcaatagacttttcctttttatttgttttttttcttgagatttttttttattttaattatatataatacatatcaccttaggacttacatctacatatactattaaaagaaatattttgtggcttatcattctcaagttccttacttttattgttaattatttttatatattaatagctctatgatattttattttttttagctgtttttttttatatatgttatgtggatttatatttgttttgacagaaagatttcaagagaattggtgttatgggctcactcaataaacatgacatctcacaaagtttttatacttgaaaaaaactaagaatgatttttagaaagaggttgtttgaatttgaacataatacagtgacactatgtagcccatgatttatgtatcatcttaacattaacaatattaatttatacttattatatagttgacttttatattttttgaattatagcatgtaattgattttaattaaataaaattttatttaattgattgtagtaacaattcttatttatttagtgtaagttttaaaagatgaacttaaaaaaaaatcctataaatgttattttaaaaagaaaaaaaaaagattgctagctctctttaaatatgagtccaaaaaagtgattaggtggcatctctttttagtcttctattttctttaattta

SEQ ID NO: 212955 - DNA, 604 bp, Cannabis indica
tctaaaaatagataatatttgaaaaattctacgtacaatacacctccttaaaaataggtatattgatgcacccatatctatttcggtatttaaaaaattacttggtccaatttttttatggtcatatagtacttatttaagacatttgacaaaattttgataaattcgaaaaaacttaacacgtcaaaaacagtgttcaaagaatttattgctctcgtgacttttttattttatacgcgtgtaaaatagacagtttaaacaatgatttcgatattataaattattctaaattttaaaattttacaggatgtcttaaataagtataacgtacacgactattaaaaaaattagactaaaaaattcttatagatattgaaatagttaaaaattacattagtatacccattttgatggagtgtattatagaagcaccccataatattaatatttatatatatttataaaactaaacctactaacacgtagcacctttaaatttaacagaatattgttatgttcttaaaatattccgttagatataataaaacattattgtcctcaaaaatagaaaaaatacttttatttatttctcgagactatatat

SEQ ID NO: 212956 - DNA, 810 bp, Cannabis indica
attaactgtttatgattttgatgcgagatctgagaagtgagtgtcaaatatgctatagtagaatagaactgaatttcgatataggacgagagtacctatatggtttagatagcttatagggtttctgtgtttaatgcctgttgcatgttaaatttatcacgagagtagaaagtttgcatgtaattgaggtttatatatctgagaagactataaattaccttagtaaacctgctattgcataggaattaatattaggaaaataatcatattagaccatattcaataaaaacaattgaaatcgacaccctagtttattaactattaattttctcgaatcgttgcttccaactatttttcttatacttcattgttttttttttcctatcttttatttaatcaaatagaagtaaaagtttaattttaacgtacttaactacactccctgtgggatcgacctcactcctagtgagtctactacttgaaacgatacgtacacttgcgtgtgcaaaatatcgcaacactcgtctgttccggaggatctcttatgtaatgatcgggaggtctaacgttatttaattgaatgcataaatacgcttaattttcaaaaaaaaaaaaaccaaaagaatcaatgtgcgtttctgattcttttgatgtgaaaatgcttgttgggaaaattgtaaattttgatacctctaacattctagaagatttaaaaaatgaacttataagtaagctaaagtggaaaaaaaaaaaatacctctaagtgttggatgattaacatgtaaaagtaaccgatccaatttaatcaac

SEQ ID NO: 212957 - DNA, 561 bp, Cannabis indica
aagtagcaaaaaaaggagattaaaaagtgttgaaaagagatatatagagagtttatattagtaagtagttgtggggctttgttgccttgtttgtttaggttataaatgtttgtcattaattaagatttttccttcttgatacaaaaaaaaaaaagaaaacaaagaactataaaaatgaaatacaaaagattaaaggattagaagaaactatgtggatggctcctccttcttccttcttccttgtgcactccttttcttcttctttttacttcttcttcttcttcttctttttcttcttcatcactctaggtattttcaataatggtggctgccaagaattgtgtccctcttctcttttaagctagggtaaaattcccttttttacttttccaaaaatgccctccacatggtcccttaattcccacttagagagttttccaactaggtcagctctaaaccacttgtctttcgccacctcagcctcatatttgccacctcaattaatgaattgccacatcttttttctttttgtacattagtttcaacaattagccctgctac

SEQ ID NO: 212958 - DNA, 1846 bp, Cannabis indica
caataaagacatatgaaaagtctaacttaaatatcatcatctatataattttcttagaaattttaagaattaatatatgtatagagacaacagttgaacattggaccatgacatacatattcatttatattttgagaaaagttattgttgtgctgcatataggatcaagagtacagtagtaaacaacgaaacaatcatatcctagagctagatttattttattttacatacaaaggttttgatcgtgatattttatatatgatataggttttggtaatatgctacaatactgtctctgtttctattatgtatgctagtttatatatactagacttgagttcatgaatgaagagaaaaaacatatccttcgaaatctaattccatttaacagcttacttgattatttgtggtatttcctttttgttgcttgggggcatctttttgatctactatttttttagaaattagtttgtaacatttcttattttaatttaagattattgttgtgtacttactttttttttatatatttattacatattatttaagatttgtaaataatatatttattttggtatagaactttattaatggtcggtaaggattatatacactcactaattataagctaagcttattgtatgttggctcttgaagtagttttctatcttgtattaaagatgatcaagcaaggagttttcactatttctagtcaaatgtcaactaacttcttgtattggatgttggcagtatttttgaagttactcgttgatttaatttgattctataagtttgttatttatgtttgtagtagtgaataaataagtttataattttatgtagaatcattatgttttaaaattattttttttcttattgattttagttttattttaatttttttttaattcttttaagtgtctgtttagaaccgacactaaaggaaaaaaaataaatttgtacattttaagtgtcggttataaaacaacaccaaaactcaatggcgtcggtttaaaacagacaccaaaaattgactttttgtgactgtgaaataagtgtcggttttatgaactgacactaaaagtatatatgagtcagtttaaaaccaacaccaaaagtagattttgtagtagtgtcattctattaagttatgtcccattatttaaatgctgacgtgtctttgtaaattaacaatgttaccccttaaatttcgacaactattaaatcgtaccccgtcaaaataaaaataagaaagtttaatttttctttagtaaatcttaaaaaaaaaaattaatttagatcttaagaaaatttattttgaatcaataagaaaattaaaaagaaattaaaaattttaaactaattaaacgatttgaaaaaattatttagtttttttattaaaaaagtcatatagatataaaaaaatatattaaaaattcaattttttgtaaaaattaaattttatgggaacaagtttgagtataattttttttctctaaaaatctagatttgtttaagttaacataacatattttttagtttgattaaattatttattgaatttttaataattttggtttgattttttaaaatacttgtttataaataatataaaagtttaaaaatactattttaggaataatttaggttttttttaagtaaacttaatatttttatagatattttttaacaatttattaatttttttttttcagaattactagaatattataatttttaaaattaatttttctttataaaatatggtaaaattttatattggtcaaagttcaataagtaaaaatactaacttctaaatgtagaagaaacggaacctaacagaagg

SEQ ID NO: 212959 - DNA, 693 bp, Cannabis indica
attagaattgtgaatttttttaattatatgattggttagtcatattaacaaaaaaataataatattaagtattttggtggattttaattatgccgtccatttttgtttattatttttaatatataattaaataaactaatctctaattatagataactttttaaaccgataattaattacttaagatatttttatttttatcttttttggtagagaaatctaattctaatcctattataattaggaacataactatattatatatatcacctgccgtactagaaaaaaaagtaagaaagtgattagtagctataaccctaaaaatacaaattaaatatgaattcgagtaatacaatgaaactatttggctacgacgaagctatgcatggcttaacatttagagaagctgaagagttttacaacattgtaaaagaacgtttgcaacatttgcataacgcatctcgtcaagtgaagctacttaaccttcccaaagtcaaaaatcatcatcatgttaacaacaatcgttatggtgagatcgaagagattgaagttgaaatagagaaaaactttcataattttaaaaattttgagatactcgaaaccccgcctttagatcatcactttcttgatcaccagtcaacttctaccctattttgtttcggtgtctacaaaaataagtcactaaagaaaata

SEQ ID NO: 212960 - DNA, 839 bp, Cannabis indica
aatgtgtacaaatataccattgaaagagtgctaataatattgttagtttaattaataataaatgagaatatccatgtagtttttatttaatttttagagaaaaggtaataaattgtttttggcagatgcttgtaagtatgaggataagatttctgtattgactaaattgagaattatttttgtatattttgttttttttctaaaaaaaagtccaaactttttcaagttttcattcaatgattctcatgacctatcagtccataaattttgttccttaccaagacattggttattaattggtattatctccaacaccacaatcactaatatagagtgtgaagcaaaagcaccactatatatatttatatacatgtattgtcatcatacactatcctctgttaccattaccaacttgctaaaacaagtgtcaatcttttgaaaaagatgcacaaacatactactttaaaagaaaaaaaaaaaacctatttgatcactttaacaccttaagcttagattggttattctggctcaatatatataccaactgtagtaaattaaaaaatgaaaaaaaaaaaaaaaaaaagagtaaaaatctaaaaaacccttgaaaatacaaaagtggtaggtgcggtgtataatgtgaatattataaattgaagaaagagaaaggactactaataaggagaatagtacataatcctaaaaacctcgtctcgttccatgagagatatttttccctcattaaccaaaattgccctgacccaaacaaacccctcctctctctctctctcttggttttgaaaaataaaaatcactcttttcgttctctctctctctct

SEQ ID NO: 212961 - DNA, 680 bp, Cannabis indica
acttttgtttttcaattttaaaaacagaaaacaaaagtgtgttctgcaaagtttatttttatttttatttttttttattttatcaagtcaggtctagggccggggtcggattcgggttcgagtcagaggtcgggtttagcgccagggccatgggagggagattttggtccgggtctggtcggagtttaaaatattaattaagaaaaaaaattgtttaaaaaaatattaaaagtgactttttttatttttaaaattttgattctcaattaaaaaattaaaaagtgaaaaaagttttatagaatatgattttgaaaaattatttcacttttctaatttgaaaaacaaaaaattaattaaaaaaagtgttaccaaacgccaccataatgtccactaatattaaaaaaagataaataatcaaatcatagctgtattgtatgacatggtcctccaaaaaaaaatcatataaagtcactacacaactcctcttaagagatatgtgttcagtcaaaatactatctcaataaaaaagtatttgacaattttatttttcttccttttatttttatttcacaactagtttagaactctttttctaatttgaattcttattttaataaatattatctattaagtaaagtgtaacatattaactgagtttcataagtttttttatttacaaa

SEQ ID NO: 212962 - DNA, 624 bp, Cannabis indica
gtgggccggctttgactatgaatgggctggtttgttctagtaatgcaaaaggtgggccgaatcaatttgttgtgaataatatatctgatgggcctcagtctttaatttgtaaaaatccttcagctcacgtgggtaagtgggggagcacgaaccttgttagtgacaacccatctcctcgtgggcctgttcaagttgaacggcagaatgttgggcaacctgggcaaccgttcaccttgcttccttctaccgctcctgaggatgcttgtgtagcgaaaattctttctgatgaagacaaggctctatctcaatttttccaagcacaagaaaatttattgcatgatcttaaacactttgggaagttagacttgtatgagattcgcaagattggaggagatattggcgtcccgtcttcatcggacgtaaatgagaggactacgccctttaagaaaagaaaatttgaagcctctgcctctctttgttcaaggccgcataaaattcactgtaactttccaggtgtcattcgtgatttcccttgggacactaaaaagcatgagaatgagtctaaagtggtgtcggatgcgccttctgagaattcttctacttctctgagccggtccggaatta

SEQ ID NO: 212963 - DNA, 557 bp, Cannabis indica
ggattggttgatgattggcccattaatttgtacaacccaattccaaccctattaaagtggattggtatttttctaaactaatgaattagcatgtttaataagttatcattttgattattttatgtgtatatatatatattatttttttttaattttaaaaattaattagttatagtataatataatgtaattcaattaataaaattataaattgagtgttagaagagtaattttttttattattaggacattaatgagcttagtcactgtatttataagctcatgatgttaaccacgtgaggctagctcaagttcccggtaggggggtgtgtgtgagtgttggagatcctgagttcgagtctaaagtaaaacatgattgtaataaatagaaacgtttaaaaaaaaaaaaaaaaaaaaaaaaaaaactcatgatacctatttatttttttattttaattaatgtgcacatcacatggaattggctgttgaaaaagcaatgatataaaactcattgtcaaagttgttcttttttaatttgcttatgtatttcaattaca

SEQ ID NO: 212964 - DNA, 794 bp, Cannabis indica
aaaatttattatattaatgtacataattaccaatagctcacatatatataacaatgacataatatacatcattttatatatatatatatataaaaaaaataaatactatacatttcttagtcaaaatcaaattaaccaacttagaagaagagtgtgaagaataaaaaaaaagccctagctaaagccaaggcaaatgaaaccctaatcgtgaggtatgccctaatatattccaagaaactcataccatctttctcaatacataattacatatattatctctctcatgtgacaattatgtttaattttatattatttttttgttgttaccctactcccacaacaaacccaccatttctttctcgaaatccaaatcaccattattaccttattttaacttcaccttccccactgtaaaaaaaattaaaagtaaaaaattaaaaaattgtactaattatcttcaaaaatggttccaatcacaacaacacaaacaaccatatataagcttcattacaaattttctctattcccacgccacctttaaacctctctatattattattataattaattaattaaaataaaataaactatgaactctgcccaagcccacgttttgaagtatcattaaattagataaataaaattaaaaaattataattttttttttttaaaaaaagaacattgaaattgttttgcttactccaatttatttcccttttacctttcacattctcctaagctctaattttatcatcaaagtcttccctttcccaaggcaaagtctctctctctct

SEQ ID NO: 212965 - DNA, 533 bp, Cannabis indica
aaaaaaaacaaaaaacaaagaaaccactattctaaacaatattataaatcatcgacctgactaataacaaagaattaaagaaaatcatttacccacttattttgttgaccatgaatgagtgggtaagagagaaagaaagaaaatggatagtgtagagagaaagagaaaaggaagaaaagatgaatttttgttatgtgatgggtaatttaggatcaacgaaacatgaacactaatttaaaatgcgttcagctttgggtttaatttttttttttttgtcctaatataatcatgaaaaataatttccatacaaaagatatgaaaggcatacacaattttacttttgttttagtagaaaaaaaaaaaaagaataatgattaattgtgtttgtgcgtgaggtgaaaagataggttggatctgaatcattggtatcaatgcacatgtctttttatgttgtgagtgcaaaaccattcaattatcttcgtcactatgattaatttgattactcatgaccgaataatgcaacaagatattga

SEQ ID NO: 212966 - DNA, 759 bp, Cannabis indica
tggtggggacggaggtgaccatcgaggaggagaaggaggaggtggaggcgaaggcagatattgttgcgaattagcacaataagtttcgctattcgcaaaccaataataaggcaatggatcaagagcacaattagttgggactgcatttgtgattacggaataacaagatgaattcattggacgtttcaaaatattaaaattagatatttcgaatgcacatggtgctacattttgcaaaatgtttaaagcaaaatctataaccatcccaaaaacggaatccctcactcaagctagtacaaattaatgaaatggaaaacaagaaggaataaatataagtaatttttttcatctttgccatggaaacgatatttagaatattacaaaaatagttattagcttttaaaaataatttttagtgttattttatcataattttttttagtgttagttggttgagttgcatcatattatctataataattatttattttcaattatcatataagtctttaattttttttttatttttcattttcaaaacaataatgattaaagttggaactaagagatgatattttcttaagttaaaaataaatttaattgtttggttacataaataattgcatcgagtattcgataaaattataaattatgttctttaccaaaatcatataaagttatggtttgtaactgtttttttcaataaaatactacatgctaaataagaagatatataatgaaaaaccgagtttttacaaa

SEQ ID NO: 212967 - DNA, 614 bp, Cannabis indica
gattatctttaagtttggagttattttgagaaagaaatgagatttggtgtgtttctgtatcaaaaaacggcagaccgttttaccgtttttgctggcagtgacctagaaaaatggtttatatcaaaccacacaggtactctgccctacatcaaaatttgttcctatttcactataacataattgatactcacttctcagatttcatatcaaaatcataaacagttaattgatgattagagaattaaaagaaataaatacgaatgaaatagaacacatagaaaattggaaagaatcagatcatattaaaaccataaatagatgtcaaacaatattcatcaataccctaataactatctagctactcatagtcattgtgaacaattgataacaactaattaagaacattaaaataaagtaaaagaaagaactcgtggaaaacaataatgtttaaagtctccagagccgccttctgcctcaaatttttgtactcacaaagttgtctgctaattaagagtttctgagttttttgagctctgaaaaatccctaaaaacattaataataatgtgtttatataggctaacaaagctacataaaagatactaaaaagatttaa

SEQ ID NO: 212968 - DNA, 513 bp, Cannabis indica
taaaaactaccattaaacattatatatcctgaatcaatatttggagacttttcttttgagaaaatttcactttaagtttttttcgtttttctaaaagagtaggggtggtaaagagtggtgtacataactctagcgaaagaaaaaaagttttttttagatgagtctggatcatttagtgtaaacggtggcgcaccaagatataactgcatagaaagaaattttttttctcattcccacatcaacgtcttcttctgtgaggggttcaagggcagtcgtctgagagtgattcgattcggctcaccgacgtcctctgtctcagattttttgttttcatttattcgattccaacatatcatcacaaacttaataaaaatatttttttatggggttagtttaattccaataatatttttttatgtaaatatttaataaacatatataaatataaataaaatttgtaaatgtatttgtatatatttttttaatttcgtattaaattttagtaaacatatt

SEQ ID NO: 212969 - DNA, 807 bp, Cannabis indica
tattacactaggtcccaaaaacataattttggcataatttatggatcaagatttacctaaaagattaaaaataaataaatacactatttttatactatttttaaaagtaaaaatttacagtttttttttatctttagttaccacttaaattttgataaataactaaatagtatggcttgttctttagacacattacatgttattttataatagtatgccttgtttattatacttaattcttttttatctttttatatattaacaagttcatatcttgtgactttcaagaaaaattaaatgattttttttaatattagagaaaaataaaataaataaattaataaagataaagaaatgtttttagtgtggactgtcttcatctgaacctgactgaagtggtttgtcttgtttagaggaatggattataatattatagatcccctcagattttggatcaacacacattgaaatgctctttttcatatgaatttatttatatttatatatatttactttatttatttatttatttttgcttattttctaagttgctattaattataaagtcttgatttttgtttcccattttcaaaatatatttttgtttgttagtttttagttttataaacaccttttacgtcactcaataggaaattactgtctcatactctgagattttccatattttatatcattaattatattttcttcaaataaataaataaatattctttcatgaaatatgtttaattttgtgttaaggtgttaaatttttctaccatgagattgttgtaattttttaaggaa

SEQ ID NO: 212970 - DNA, 223 bp, Cannabis indica
acatatgatttcatatgggaaataaaattgtctagtgattaactatgtattctttttcaaattaaaaaaaaaaaaaatctatatatgtatggttttactttatttataaattaggtatgtttttatttttaattactattaatttattcatagctgaactatttatatattcaaaaccagaagtgcattcatctaattattaaataaaatattctttatttgt

SEQ ID NO: 212971 - DNA, 640 bp, Cannabis indica
ggcttcaggtattttcacaagctactctctctaatttttagacttctctagttcggatcatgcggccattttccttgaaccgtttcttcctactgtttttgctcctcaccatcgttttcgttttgaaaacacctggttgaaagagccgctttgttctgaaattataaaagaatgctgggaacttggtcatacttatagtttgagtggcaaattaagcttatgtgccgagaagcttaaggtttagggcaaagagattacggggtcccttaatcatagaattaaagagtataaaaaagagttgaagaatctgcagaataaaagggatgctagttcggtgcaaggctacaaggaggtgaaaaaaaaaagctttttaaagctcttgatcaaagggagagttattggaagcagagtgcgaaacaattttggttacgggaaggcgaccaaaatagtagttacttccacaaggctgctagtagccgaaagaaaaataatcaaattgagcaattaaaagatgctcaaggaaactaggtaacctgggagtcgagtctaggagaagttatgcaagactatttccataatttatttacttcggctaatacaaactatatggaagtggtagattgtgttcatccttgtgttt

SEQ ID NO: 212972 - DNA, 577 bp, Cannabis indica
aaatctaccacccaccctttcaagctctccctctctttgaggtttcaccctctcgatttaaaaaggtaattataaaagtataaatgaaaaaaaattccaaacaaatttctcaatcgtagaaaaaaaaaagttttatttatttttagtatattttagatttaaaaataggattaaaataattttgtttttaaatatatataataatattataaaattaataaaaaatattttattatgtaactgaaatattttgttaagtaattaggatattctattaaaattaaaacaaaaaactaaaaaaatctgtttaactaagaatttcattacataaacacattttatatagaataaatttatatagcatcttaaaaaatctaagcacatttactcattcaccaccctttcaagctctttctgctattgttatttcagattagaaattttatatatataatatttcggatgggctgtgaggttggtgggtggtagcggtttggtttccttggcagcaaattagaagaagaagaatcaagagggaaaaaagaaaatataaaggaaagaaagaaaaaaaaaaaat

SEQ ID NO: 212973 - DNA, 594 bp, Cannabis indica
  modified_base (16)..(16): a, c, t, g, unknown or other
atatatatttttttanatttaggaagaaagaatcgaacttggaactcctcttgcctttgtgaggagaagtatggaacatgtttatgtcctaatttatattttttttatcatgttaaagttatttatcatatattatatataccatactaactagtttaatataataaagatatatatagggtaatattatagtaggaccgagcaaaagtttactacctgtaggttttttaccgttgattttagatcttgtggttattataacgtaaggtatatacttttactataagactacttgtatacaattaaaactttatacatattataataatatttaataatatatttatttgaaaaaataaaataagattaataattaaaaaatttattaattttttattttttaattattattttttaaaattaatttaaattatttttatatagatatttattttcaaaaattcttctaatgtaggatcgcttgaatgattttagatgctctttaattagaaccgtaccaacttgcttctcctaagctcaatttttttgccagaaaaaataatatctaactgaattaattaattttttttataa

SEQ ID NO: 212974 - DNA, 638 bp, Cannabis indica
gagcgaacaaggtctcactgccaggggaatccccaacagcatctcaatctaagacttgtctcattgcattattggtgttgtttttgttgtcattttatcttttcatttccttcctttcctgtaattgtgtgacaaagtgtcttgaatttgtgttgtagtattgtatttattcttatcttttcttggatagagtaagtaattgttggtatcaacaataataaggcttgtgctattgcagcactaaattccttgcaccatatatggtgcttatttgtacgacaatattactacaataccaattaataaagcttattttttacactatagaaggtatagtgcttgtgtccctcgaaatataacttttacggtaacgtggtttttttattatattttattcaattttatcatacctttctttttgaaaaaaatgatgatgatgcaagttgaataataattaataaaatgatgcaagttaaatacctttctttcttttttttttttttttttttttttaatttaaatgaataaaaaactaaaactagaaattattataaaaaaaaaattcttttattttattattataaaggtattattaacaagtcttatactttaaagaacacaatttgatagtataaaaa

SEQ ID NO: 212975 - DNA, 536 bp, Cannabis indica
gaagaattggcctgctaagaaattaaagagatactatattaaatcagaagtgtttggaggagaaggccaagagtgttggatcagcgtagatgaggtggaagatgtgtgtgagctccataagattgaaaatactgttatgtctctttggtgcaggtataatagttaataactaagttaatatctaagctaaaaattatatttacaactatttattaataatctattttaatttagttatttgcaagaacacacacttaatcttggtgggttgacgaatacatacgcatttaataatcctgcttcagtagcaagtgaagttggtaaactcgaacaacgttcagagaatctatgtcagcgattaatgggtatgcaacctgaacacactacaagaaagcctagttttaccggcgcaattggtcaattgcgccagcaaaagttgtcagcataaatgaaatgctgaacttcatattggattcagcaataacttttaccggcacaatgaaatgcgccggcaaaagataaacaatgaaccgcca

SEQ ID NO: 212976 - DNA, 767 bp, Cannabis indica
gaatgaaaataaataaataaatagagtggcaaatcagagatctcgagccagagatgtgcgcaaaagcttgcttctctctcttgcagttgcagagacatttccaggtcagtcgaccctttctctctgtcatttttcttctccaccggctttaatggcgaaccaccgtggatcctgtcgaagaacaacgttttccttgcacgtatagaaacgactaagaaccatcgagctgatcccactcgcccctgcgattctcttccttcccgttagtgatcactgccatgaagagagccatcacttaggaagattccagatcaggaagaagaagacgacgaagaaggaagaatgagatctgataattatatgtaattcatcaagtgggccaataacagatccacacgtggcatataaaccaaattctgttatatttaagagagtggtggtaataacggaaaggtatagaatttaatccgtaaaaaaaatatatttataaaatatctaaacttaattgatgacatttgtttgtttataaaataaaagaaacaacatagaaaagcatgcgtaacattgaaatcaaacatagaaataagcacataaacaagacagtaattaacgctgtcactagttgcttcctatgatattatcgataaattttcgaatagcatcaaatgagaatccacctttctcaacagatttcctggcaatatcactcatctctttcaccttttttctcatcaccacattatgatcaccctccataagctttttta

SEQ ID NO: 212977 - DNA, 505 bp, Cannabis indica
ttatataaaataaataaaaaagagtatttagtgatatattaataaaaaaaatatgatgtctttcttctataaattatattatttttatttttcccacatattatatttgtatccctataaattatattttcgttttattcccctatatttttttttttttatttttatcccccctaaaatttatatatttttttaaaaattatatttttcactaatactttgggtaaaaaaataaaaaaaaatcacccccactaaaatatcaatctaacttatggtcatagatatagtttcgtagttttatacttctcgatctccctccctaatataaaaataacaaagattggattggctacaccagtaaaaatgtgcatatgtacatttgaaaaatttatattttaaaaacacgttaaaattcaaaataacactttattttcaatcatagttgtaagctatatattttttaaatgggtatatacacatcttaaacatgtacatctcaatataa

SEQ ID NO: 212978 - DNA, 932 bp, Cannabis indica
tggtagcatactcgatcaaacgtattattttcttgcccactatagatcgtcaaaaatttaacataggtatttatttgcaactaaaaattaaacttaaatattttgtaccacaaattagtcttaaattttactttacccttgaaattaaggaacatatgttgattttttattttttattttaatgctaactatataaaaaattgttgcattacaaaataatttcccttttataagaaaataattaataattaataaaataaaatatttataattaataaaataaagtactagtaccattgtcttcatgatgtcatatgaattatttggctgactaattatttgtaagacactaaagagaatattttatatatttattaattcactacttgaaatcgaatttgaagaataattctctagttctctttattagggtaattttacaagaaaaaatggatattaaaggaggctattaatttggtcactatctagttgtatagaccctcacacacattataatttacatcttcaataggtaaatgcaaaaataactaattccaaatggtaaaaaaaaacagtattagtaggtgaaactctgtacgataataggataaggccagtactaataaaattagaaattgatccactgatctgtaaaaaaaatttcacaacactaaacagtatttattattattttttttattatttaatattttatttatatactaataattttttcttttataatttcaggatgagcgtttggaacttaaagcacacgtctagttcgcctaccttcaaagtcggtctcaagaagataaacattagatatagaatatatgtatttataaacaaaatattagactatgttattttacaaactaaaaaataacaaaacaaaagtgacatcttaaattacatcttaaaacagatgc

SEQ ID NO: 212979 - DNA, 635 bp, Cannabis indica
tcgagggcccggccctgcatatacctggaaactcgaaaaactcgaacatgatcgaacccgccggatgtgcagccctacaattaaaaaggaaaaaaaaattaagtacttaaaaattacaaatacaataatttagataatatcaacgcaaatctttcttttttttttttctttttaaggtaagaacatatgaaagaattttctcaacatagaaaagtaataagtttcttaacatgaaatacttgtgcttatatatttcgtttcttgcagcataagagataactttgtcatgtaataaaataattactatataagtcatattcatgatgcatctagacataataaccacacacttttccctctctattctattttttaaccttaaaaaaataaattatatagtctactattttctagaaaagtgagagattaatcttcatcttcatcttcttactttaatttttttcttttatactactgaatattttacgaaagtaggtggattaatcatgttctaaaaattaagtctgttaagcagaaaattttggagttctttttcttttcttttttttttttttggggtatatatttttatctggtcatgtctaactaaaaaaacataagattctaactaaatt

SEQ ID NO: 212980 - DNA, 509 bp, Cannabis indica
atttattttaaattgaaaatttatgcttaagattggaaaataaatttatttattttcagagctacctaagttaataaatttcattaatatagattaaaatttatactttggatataaaattaattttataattattttattcctaagttattaattttaataaatataataatataaattattaaaataaataaaaaaaaactactttcttcaaaatgttgagctttattttataagacattcgatctccattgttggtcttgtaatgttgttgtttttcatggtatccatcccaatagatggtcatccattagacaatttaacaccgtaatctcgaaagataaatattttttataaattttatattcttagtaacgctcaccccaatagtgactgcttagaatatggtttacaaatataaaaaaatactagtagctcataaaataagattaaccttacatccagtccattactggagaacgttagattcttattttgatcaaatgaaa

SEQ ID NO: 212981 - DNA, 549 bp, Cannabis indica
agtctggccttgtacctgcttaatgatccatctttattcagtttcactctgaacaaccatttgcaaccaatgggaaccctgtcaacaggtctaggaacaacaacccaagtgttattctttttaagagcaacatactcagaattcatggcattattccaatgaggttcaagcatggcagctttgactgttttgggttcacaaacagccaataatgccttaggttttctgatgccagacttaagccgagtttgcattgggtgggttgaagtaacaggtgctgttgtggtattgagagaagtagttggtacagatggagcacctgaagtgctggtagttggttcatttggtgtactgctaagagtacatggtgttggtatagagacactattgtttggtggttgggagacagaatttagagtgcgagaagtgtcagatgacactggctgagtagcagatgcagtagcacctgagtttatgggagagatattgttgtaagttggaggaatgatgggacagggtgtttgaataggtgtagtaggagatttttct

SEQ ID NO: 212982 - DNA, 978 bp, Cannabis indica
tttgagtacaacgagttcgagcgagtccttggttgcacgatgagcctattgtgcagcggcagtggagtgttggaagaagcttttaaatttatggagaaggacggagacgatggctgagccatcaaaacttgaagagctatatggagattacggagttttcgactggagatgacgaaatcaaggacatgattgctttgggcagagtcgtgcaacggcgggatccgagatggtcgtggcggtggcggtggcggtggcggtggcggagttggttgaagaggaggagttcacgtgagcctatatgactgagatttacttagctgtctcgtgagatcggcaatgactaacggagacaacgggagatgagggcaaaattggagatcggtcaagccaagtttcacggataagtattaattttaattaatgtttatataattaaattaagatttaaattaattttacagattgtttttagtgttttatttacttttctgttatttgtattttattatttattatgtagtttataccttatataaaaagtttaagagcattttattttattttaaaaaaaaaaagcattttatttacatttaaaagtatttatttttttttgtttattctttcctcttttgtagcttttatcaattaaatatttttgactttccttttaattttaaaattttcattaatgttttgaaatcacaaattttgtgattgacgtttattaatatttattgactttttaatttattaggtgttttactcattaactttttaataatatacattatcatattaatttattgtctttcattttattttattttgtattaatttataataaattttattatttattatattatttagtttagataattaatttttaattgttaataattattacataatcagcttgtattataaataataacccactatttcgctcatttaattttttgatgttttgatgttttt

SEQ ID NO: 212983 - DNA, 550 bp, Cannabis indica
actcatgttttccttctaagtcagctaagtgaattattttcttttcgcgcttctgactgcctcattgtaatattttgcattgaacagttcctggaacttttcccaagtcattgttgtaacatcatgagttagggataccatatcccaccataccagagcatcttcttggaattggaatgtagcacaagccactctatcattgccggtgatgcccataaagttcaaaattttggtaatcactgttagccactgctcggctttcataacatcgggacctcccaggaaaactggaggtgcctgcttacgacacctttcatacaggggttccattcaatttactatagcgactggtcctgcctgcacaacaggagcaggagcaccctactgtctcaaatgccagatctcttcatcttgttcattaatcctggcttgcatttcagcaaacttgttttcccaagggcagcctgtagcgggttaacatcgccccgaccgcgtgccctgcctctaggacctctacctcgtccatgaatattaaggggaatctgaactc

SEQ ID NO: 212984 - DNA, 1198 bp, Cannabis indica
tgtcgagctcaactcacggttccttaagctttacttttggcaaactcttttaaggtatattgcatatatgattaaatggatgttttaaaaccctaaatgcgctcttgaaaatattttgaccactgtctaacctacatgccttgtgggttcgcaggctaggtcctaagtaatggacgcccagcgaaacgctagaaggcagggtgaaatggttgagaccggaggtggtcggggtggtagaaatccccaaaacccccgtggacgcagtagaggctgccgtcgtgtcccgagaggtggtcaagagtatccacctcaggctccggttgattgggagcaaaggttttgctgagatgcaagccagaattgagcaacaagaagatgagattcgaagactcgggcagcgggatgctcctgctgagcttcccccgcaaccgcccgctgcggttgttgcagctcctgcggtactagcagagcagcatgttactggtaaccgtatggagcctttatatgagaggtttgttgggttttgtgaccccaaataaaacccatttcaatataatcagatttactgattaataaagatcagaaaaaacattttatgtttcaatataatcttaattatatgttcgaaagtttattccctgatttgtcagttcactggatttagactgacatgataatcagcgataggtattcttacaccttggataagtgttatgtcctttccagggcattggcaaagtttaccagtatcggatgtatggagtatacatcggaagggaccgatattgaactttgattagatatattaaaatttaccgtaatatctattcaattcaatatcacctgttgatcctagatcaaatgatcttaatcctgatatggttaggttcgatctcaagagtattatacatgttctttgatttgttagttaagcctacttttgggtcagggtgatacgtacattttgggaacatgatagtataattgagtgggagcgctaacataaatatggagtctataacttctataggaatttagaagtgaaacgatgatatccttcgagcttggctaaacagagataaatggtggagatctcatttcacttcgctgaaatatcatttatacggagctaagtgttttaaggataaaatacattgaaggtgtaacggtaacttagtgcctattcaatgtagatcat

SEQ ID NO: 212985 - DNA, 571 bp, Cannabis indica
tcctgacctatttgccatttaccttaacctttacaccaagtttactattatgtttataaatactatcttttaatataaatatatgttgtaactaattaaaatacatatacatttttttcctgattttttttaagggggcgactgctcctcgctacaatgtgggtccgcccctaggtatgacccatgtttttttttaaaaaatatataaaatttgtgggcaacttataaggcaaggactataaggtgtcggcaacgtgtttaattgtcaagcttataggcctttgttagaatgtgagaattaatgtggttctgaaagtagggtttgatgatcatgtgcactaaaatatatattatagaatattttatctcaaaattaattagtaaattcaaatatttatattaatatgaacttttcacatattattaatgtgatgacgagactacctaacaacccctaaaccttaagtgagattaaaaaaaattcactctaaaactgtttcttcttccataattttttttttaaaaaaaataaagctaattggttgaaaaataaaagtgagagtcaagcaaa

SEQ ID NO: 212986 - DNA, 741 bp, Cannabis indica
tatatatatatatatatatataagagagttgtatatgcacgagagttgatacagtcaaataatctcatttcacaaaatttctattttaccatatcttcaattatctcatgtcactcacgtaaggaaaaacttaaaataaatttcatcacaagaaaaatccataacaatatgtatatatattttatatttaaaacaaaaaattctaaaaaagaggaagaaaaaagtgaagagaatagaaataaataaaaaaaaaaaagacaggttaagctgaaaccgtgtcaattgtttatttaatttattttgttgcattgggttagaaatgaaatggtctaattcctcttacgttctctcttttttttatctctgtgtgtgtgtgtgtgtgaaatcagaatatgatatcttctctggcagtaataaaagcatgaaatgtccgtgcctcctccaatacccacattgactggtcttttttctgtgtcttggaaaagcttttccttttttcttaattttacaataataataataataataattataataatatatagtcagaagaagtcaaggaccttgatcaagtttttgaaaagctctatccagagaaagaggcagctttaaatagttgaaagttattatattatatagttcaactggagtctctcctcctgtcctgtcctgatcttctgtctacctacactacagctaacaccaagcaaccaaagcagccaccttctctctttctctctc

SEQ ID NO: 212987 - DNA, 1159 bp, Cannabis indica
ttttttttttttcctttctggttggtttgggtttgtctatagatataatattatttttgttaacattataatggctttgtgatgcaggttagattacgaggtggccgagctgacatgggaaaacggccaaataaccatgcacgggttggggccaccgcgagtgccgaacaagaacataggtacgaattggccagagaagccacgcgccggcggcacactcgagtccatagtcaatcaagccacacgaccctcaaccctatcactaccttacaagccccctggtatgcctaccgccgctgccagagaggagttggttccctggatgaagggccatcaagggtcggcgccacctgcagccgcccaggacaataccgcaaccatggacgcacaagtcccttgctctgacccagtcaaatctcgtaacaacgatcggattaaagatagcgtagtggtaccggggttcggaacttgccatggccagcgaggtattgtatcgtatactcaggtagcatcgtgcagtggcgccgttagtactcaagaggagattaataataagaccaccggaggctttgtagttcctgatcagaaacgagaaagcaggacggtcgtgcagacgacggcgcgtgagtgcccaggagaccaaagtatgagtggaaccagcgcaacgtttgggactgggaaccagccacttagacttgactcctgtgatagggatgtgggtttgggctacccttctacgtcgatggggtcgccggagcatgtcagctctgacaaacgttctagaaagagaaccactgcagatgatcacaactcgttttgtcatagtagatcacaggcaagtccctaactcaattttgttactattattatcaactatatatatctatttactcatcattactttttgggtaactgtaactgcgaccatgatgatggttacatttttgtaattatattatgtttataatattttaaaattatattttaaatttaaattaattataattagccgttttttgtttttatattttaaaattgtgtgtttttttttttacacattttttactgaattttcatatacaagtttttttttttttttaaaagaattaatggaacaatttaaattataattaaataaaaattattggaacaacccaaa

SEQ ID NO: 212988 - DNA, 643 bp, Cannabis indica
aaaccatcaaacacaacatagctgcctgacaaacctgttctgcatcggaagtgtcctgcaaaacctcaaactaggtgtcaaaggaggaagatgaagttgtgtttagaggcgtaccaaaacaaaccaacaagatttggcaagaccacaagtgagcagtgcatggagtacgatttcagcatgggaattgcacatgagacatatagctgagatttgcacatgttttgtaacaaggttaacacatgtgggaagagatccagagatggcatgccacaagaaatttgtcactttgggtggaatcttcaagtgccataatttacgccaaaaactagagttttttgtgttgggtttttgtgccctaactaaaactctttttcaatgtaatcttgaacattcatttatcaataaagaaatagaattattttattacttatttaatatattgcttggttcatatgtttatttcatgatcatttttttgatttataaattcacttaaatccttatcacattattgttcatgattactgtgttgtctacacagtggaaagtaataaagattatgtgattaaacattactcccacaatttattagtacacaagatttctactaatatgataatcaacaaagtagtttacttacact

SEQ ID NO: 212989 - DNA, 1070 bp, Cannabis indica
agtgcctaacaccctcctacgtgtcaatatcgctattggtgcaattaagtatcgggtcccatatagtttaatataataatttttatggagtatcgctaaccaattgcaaggcgacacatctaaaaggtgctaggcaccactggtgcccaatagcaatgctctatcaaataacaatgagttaagatgtcccttagcattatttggtagctacaaattcctatactacatatatttgtggtgacacgtaagatgaaaattggaaaaataataagtgggtaatatacctcctcactctattctcatttcctatttatgccctcttcggatttttcttgctgtgtcccacttaattactaatgagttcagttttcgagaatttctattgggtataaaaacttgttaggtacttattaaaattaaaattaataataatataaataaaatatataatataatgtaattcaaaataaaaataaaatgaaaattttaactttaaaataaataaatattattctacccattaaataactttattacactgtaaactaaaaaaataataatcatttataagtatagttaataatttaatatgtaataattaaaaattatctttaaaaactatatatttaaatcgaatatgtgagtagtaatattccttctattctaaactcactttgagtatataaaaaggataatttcacaaatacacaaaaataataaaaaaattataaaaatatagtttcacagaattttaaatattttacgaatttttttaattttatttacagaaaatacagattttttatgttgtatttatgttaatttattgttatatatatgtcattttgttttgatgttatttaaatgttatttttatattacttttatgttagttttttttttaattatcttttgtgttgtttttacaaaaactgaaaaatataaaaaaattcattaaacatataaatataatttttttcaaaaaaaaaataaagtaattatccctctataaatataattatccatttaggaaggatacccatcgccagagtcaaatttccataacacaa

SEQ ID NO: 212990 - DNA, 711 bp, Cannabis indica
ttctgtaaactctcctaaaacttggaattaaatttgagatcacgatctgaaacaattgactttggggcaccatggagtctcactatttccttaatgtacaatttggcatactgttccacagtgtaagtcactcgcacaggtaaaaagtgcgttgatttcgtgaatctatccactattacccatatggaatcatcaacccagttgtcctaggcaaccccactacgaagtccatagctatgtcttcccatttccatttaggtattctcaaggactgaagtaaacctgccagcctttgatgttcagccttcacctgctgacaagttaaacactttgaaacgtattcaataatatcactcttcattcccggccaccaatatattgccttggtgttatgatacatctttgttgtccccaggtttaaggaatacagagtagtatggaactcctcaaggatttccttcctaatctggtcatctgtcggaataccaattctatccttatatcttagtagtccacttggagccacagtgaaatcctttttagcaccaatctcaactttctttctgagttcaatcaattcgggatcattctgttggccaatctttattcttcccaataaatcagaccgcaatgtaatatttgccaacttcccgactacaaactcaatctcagctttggccatatcctgagccaatcttggagagatttcct

SEQ ID NO: 212991 - DNA, 952 bp, Cannabis indica
tcatctgccaatggacattctcagcatagcgcacattctatcacgaacaacaagaggagtattggaactgaagaatattgaacacttggtaaaattcacctgctgtccaatagcagcttcaaacaattgaagaaggcgcatgacattagaagcttccctttcatttgcacggcaataaacatagctatcatcagcaaatagcaaatgtgatattacaggtgccccattcgcaaccttacaccccttcaagagaccatcaatttcaaacttttttatgagataagtgaacccctcggcacaaatgagaaaaaggtaaggggataaaggatctccttgacgaataccccttccaagaaccaaagaatctgacacatgtctgccatgaacaattttgtacttcactgaaatgaccgtagccaaacaaggtccacaaaacgagtggcgaagcccattttttccatcatagctctaagaaaaccccattcaactctatcgtaagctttgctaagatctaatttcaaagccaaatatccctcattacccttgcgttttctcttcagataatgcattacttcaaaagctatgataatattatctgagattaaccgcccaggaataaatgcagattgagttggagaaattacatttggcaaaactactctaagacgattcgcaattaccttagaaataattttgtagaggacattacacaaagatatacgccatagatcactcatggaaataggttgttttttcttcggtataagcacaatatttgtatcagtaagcgcatcaggtaaaatagcggtatcaaagaaatctctaacctgcttaaccgcatcatccttcacaacattgcaatatttctaaaagaaaccaggcgtcataccatcaggtcctagagatttgtccggttgcatatgaattaaagcacgcctcacttcttcctcag

SEQ ID NO: 212992 - DNA, 540 bp, Cannabis indica
tcctactttgagacttatgatgtcttaaacaaccttgttcaacaaccagcatcctatggtactttatattacatccttgtttccctatctcaaactttgcttttatgcaagtttattggatcttaatacacttttatgttggcttctctttgcaaaatcctattcttcaattagaaaactgggcccattttctatttttggaagtacatggtgaagtaggctctctattttaggcatccctgtcacgggttgccatcttttatcactaataataatgtgatgtgtgtatgtgactgacacagacaaaaatttcatcttatttcaggatttacagaagttaaatctgcttgctgtggtcttgggaaattcaggtccgaagcaccttgcctgccaatatcaaaatattgctccaacagaagagaccatgtcttttgggatctataccatccaacagaagcgacacatagcatcttatcagattatatctttgatggtccgccaaaatatatatttccactgagcgtcaagcagttagttgct

SEQ ID NO: 212993 - DNA, 900 bp, Cannabis indica
ctagttttctaactttgtcagataattgaaaattgagaacctccttctattgatttcgaaatacatctccctctctctctctctctctcttcatcaattttgaaccctagtgaagagtacatgcccacttaatcatagtgtggaagattgtaaagaattccaacacctgaaggagatccagcttcagatcttgttattactctgctacagcacgaaacaagagttagaaatcttaattgaaggagccataatattatgctgtcaccaatgtaaggttttttagaactatatatgtgtttattttattgttttaggaaattcatgtttagattgttagattatagaatataatctagcatacttgtttgtaaatctagatcctgataaaataagttctaacaattggtatcagagccatggtaatgatttactttaatgaaatatgggtttaaaatgataaatgtataatttagatgtgattcatgttgatctatgtgtttatttgatgattgattgatgtttacgaaatttttatgaaaaataatttgatttacaatctggaattgttttaatttgatagtatagaaaaaattaagcaatttactttttacaaaactaaattttgatataattgaattacttatgaatttttgaaaatttggaaaaaaaatcgagatgaaaaacatcccctacgtgtgcgcacaccatgaggaactcggtcagacacgctttcggataaatcatgtccgagtttccttggtcatgccctatccgaacccctctccttgcacgtggaaatgctgcatgtagcattattttttagccaagccttagtcatcccccatgcatgcatattgtccgagccaaatgcaaaaaatttccattttttcattttttcat

SEQ ID NO: 212994 - DNA, 541 bp, Cannabis indica
tacaaaatgtaattggcaatctataacaattcatagcatatgtgagtattgattggacaaccgccttcaagagcacttcttttcctcctacagaaaaaagtttttcattccaagcatgtagtttttgccaaattctttctttgacatcactgaacatttcttttttgtcccgacttgcataagcaggaaggccaagataacgttcatggcattcagctattggcattcccagaatatgatggaataaatcttttgcagcttgtgttgtgtttggagaaaaagacatgaccgatttattgttgttcaatagttggtcagaagctcgatggtagatgtcaagtattcttttaagagcgctggctgaactttgagtggcttcacaaaataataagctatcatccgcaaaaaggaggtgagagattgaaggtgaatgtcgtgttaatcggagtcctttcaaattgcccaaagattcttcatactgtaataatcttgacaatccctctgaacaaatcaggaaaaggtaaggggagagtgggtctcc

SEQ ID NO: 212995 - DNA, 651 bp, Cannabis indica
tgtcctcaactgaccgacactataaatagtaaaaaattgagccttatataacaacatgttacttgctacttgctaattagttttgatatggaatcccataattagaaaagaaaaaagaaaaaaggaacgaaaaattacttggattcttgttatattaataatggggaatttcattaaattttgattcagctttcaattggagtggagtacacaacgtggctcaagtatcaacagaagccgattacgataattgcaacacagctgcagccagagtactaagcaccacaagcccattcgagttcactctcaacaccactggtgaccactacttcctctgcactgttggaactcattgccgaagtggccagaagcttaaggtcgacgtagatacatcaactaccacaccaactacacctgctactcctacaactcctggatcaccgactaatggtaccactacttcttctcctactacccccaccacttctacacccgccaattcctcgccttcattcgcacccctcggagctttatctgcagccatgtttgccctagtgctctcctccttcatgtagattaaagagtagtagtgaagtgatcgatagtagcaagcatggtatatctctttgcttgtggttttttttttttttt

SEQ ID NO: 212996 - DNA, 368 bp, Cannabis indica
ataaattagctacacttccaggttgtgaccaatgagcactctattcaaagttggtactaatttgttcatgaagaaagcaaatagggaaatttttgttgctttgaaggagcctaaatatcaaattgattggttaaaagaacatgagttgaacttctaaatcacatgttatttcttttttacttgtaatattgaggtttgtttagttcattttatattatttcttgaacaacttggtttatttgatttcttgaataatattatttgttttatttcaaaaatatttgaattacatatttacatgtttattctatacagaatggataataaatcatatactgaacagaggaatgaagaatgtatacaacaag

SEQ ID NO: 212997 - DNA, 555 bp, Cannabis indica
tccaacccatctcaaactatccaaaaaacctaatcaatacataataaacataacccaactgaaaagtgcaatacccatgctttgaaatgaattcaaccatttttgagcaaacttttgtgttccaaaactcaagcttgctcaacactaagcacaaccaccaaaacctctcacaaatagaagcaatgaatcatagttaaacttctaaatcagttttcaaactccccataacccaacatatttgaaaatctaataacttgctgaaaactaacctaatctctacaaaaactaagggagaaggagaagcaaaccttaccttgaatcctttttgtcaaaaccctctaattcccttgccgatctagcttggaaaggatgaagaattggtctaaaaatttggttttccttggggttccttatggccaaatgtaagagagagaatgctgaagaaacttgatttatttttagcttatgtttatctagaaattccactaataaggtaaaggtcaaatgaaaattgtttcctctacttcactaaaaagtaacctctccatctagggg

SEQ ID NO: 212998 - DNA, 1020 bp, Cannabis indica
  modified_base (290)..(290): a, c, t, g, unknown or other
aactcagcatatgacgtattccaagtactaatatgaaccaagttaatctaattaattaacactacaaattgctaatttgaaacaacttctaaaataatgttatttaattattaacagttccatcatgggttggtgccaccttctgctgatccacatggtcattggaaccgttgcaaacttaatcctgctgcatgtgatgctaaccagacagccatattgcaaggtcattatatatttgttaataatgaatttcttaaaatggagctaccttcacattattaattaattanagttttgtaaggattagttctgtcatttttcttaaatttgtagttttttttatttttttttggctgtagatttcaggcatgatatgattgtaactctaaattattcattcacccaaaaactcaagaagagatggggatgtttattaattcatgtttcgctcattgccaaagtgagtctcaagatacttggtttgctgttgattccccaacagtacacaataaggtatcggaaatctctctctctctcttacaaaaagaaaaaaaaatattaatttttttctcaactacctttcttttcacttcaaaataaagtagttaattctattaaaatatattttaacactttaaaatataattaaataaaaaaataaataaaaattaattcactttcatttcattcttttttattacctcaaactaaaagtagctaaataatttcttaagaaaaaaagcattgttataaataggggtgggcatccgatccaatccaacctttttttcctcatccgatccaatccaattagtaattggatttggaaaatcatcatccgatccaatccaattagacctcaaaatccaatccaatccaatccaattactaattggattggatcggttttttaattggatatccaattacacacctaaatttcaatattagcttaaaaatataaagaaaaatacgtaaaaaactaagtatcactttttatttaagtttaatacttcataa

SEQ ID NO: 212999 - DNA, 710 bp, Cannabis indica
actttctcttgtgagaattgtttcggtttgtcaccatagagatacttcttgctcttccctttttcatgttctcttcttctttggcaagaatagcagtcatctcctcaatggtccactgctccttttgagcattatagtttgatctgattgaatcaaactgagaaggaatggtttccatcacaaacaacaccatgtaatcctaaccaagatccaatcccatacccttaagctttaacacccatgagcttgtcgatgtgagctctaatatcacccctatcagcataattagtgtgatagaacaaagttgagcattcatttttctcattctttgagaaaatcttatacttttccttaatggtagcaagaaaatcctttgcattttcaatatgaggaatactatcataaatggatttatccatgtgatacctcataagcatcaaacaacactgattggaatgctcccaatcctcataggattgcttatccttttcagtggcatcatcagcgtttttaattaggcggtgcatccattctcaaggccaaattcactctcataagagtcaaatttaacatgagagattctacccactatttgtggttggttccattcagtgtcaacatagcagaggctctcactacaacatttaactccattagcggcggaccactctgacgctaataccccacaaatcggctgctatagggtatta

SEQ ID NO: 213000 - DNA, 1244 bp, Cannabis indica
taatgtttggttggaattaagaactaaaatagaacgcgaagaaaataacttttatttattttttgtttttatttattagaatattatttttattctagttatatttttattcttaatatttattacctatgtctgagttggatagagtaaaattaaagggaatagactaaaaaacaagtacatataaatatataggataattagtaattttttctctcgatctttgacacgtactaaatcatgtcacttgaatttttttggccgttaaaagttctccctaaactattaagattgttagatttaaggacttttgtctaattttagtaaaaaatttctaacatggatgaaagtttaggggccataatttagtacatatcaaagtttgaggggcatgatttggtagatattaaagtctggggagcttagtacataaaccatcgctgaaacagtataattgaatgaaattagacaaaagtctttaaatctaacaatctcaatagttcagggaatttttaacggcgaaaaaaattgggtacataatttggtatttgtcaaagttccggcgaaaaattactaattagttatatatatatatatagatatgtggtttcgataattgtttttgtggacgtggctgcttgagtggtcagttgcattatagtgtagtttgaggtacggctgttcttgctctggtgtcttaataaaagcaagagctaataaagtgaattattttggttgtttccttagaaaatcaaatacaagaaaaacaacaaactgatgttgtagaacaaaaatgtttgatgtatttatgtattacatgaaactttacattatttttctttctagaacaaaaaataatgaaaggtgaaagagtttagagactagacaatggctccacccttgacgaattcagtaagagccaaggcaaccaagcccaacatggcaacccttccattcaagagctcagcatcagaagtcataaccccaccggacttggactccacactcacccctttgaaaagggaaccaatgaagccagtgtcagaactatgcttgttcccacgaaccaagacactccaccgttgcttatctgagaaaacacatcctgacccttcgatagctccactaccatagccccccacgaacccaaccatagcgagtctaccgttaattctctctggtgctggcccactgaatgccaacacgtctgtgaatcttgtactcatcttctgtcaatcaatgaa

SEQ ID NO: 213001 - DNA, 935 bp, Cannabis indica
attttttcatatagatttgacttttgtaagctagaaaagcatgctaagtaatctagaagagaagacattgggtaaaatccattatgtcatacaaacctatggtaaatgtgagaataaggacaaataggattgttagattgaactttcaatacatggatcatgatacaagggtttgacaaggataaaattccaaacattgtactttaaaccaggtgaaccaccgacctctccatcattcttactttttagcctatactgataaatatttgaatttttttgaaatttaaaatgaagttacaatttttcagaatttttaccgttaaactaataacatttgatttttttttttgaaatatatatatatatatatatatatatataaaactcataaataatttggcttcgtatgccgttatattttatttaataataattaaatcatataagtatattaaacttcaaaatttgtaccttttttttattataaatattttaataatataagtaactatttattgaaattttattttttcaatcttaataataataaaaaaaattaaggaaaattctacaatgcaccccctaaaatggatacatttatgcactcttatctgttttagcacccgaaataattttttagtcaatttttttggatttattattagtgatcgaggaataaaagctaatccagagaaaattcaagccctcttggatatgaagtcgccaaaaaaattaaaggaagtacaaagtctaacaggtcagatagccgcacttagttgattcatattaaactcaacacacaagtgtgttcccttcttcaacatcctctgaggtaacaagaagtttgaatagagagaggaatgtgaaaacactttcaagaactaaaaagtaactcgtaatgcctccatactctcaaaatctttggatggagaaga

SEQ ID NO: 213002 - DNA, 711 bp, Cannabis indica
ttttttgtacatcaatggaggtttcctgttttttttttttccttttcgtttttgattttggattttcgggattcagctggtttcctaggagttctacattttgaattgaatttgattttgctggtttttggaagaaaaatggttgagattgggttgttggggttggacggctgggtcacgaagaatggtgcggctggtcacgaagaagatggagtttccctttccgttttctcagccggtatttttgtaattaccaactttttaatttccatttttgtttatttccttttttggggtcataaatgtaaatttcatctatttttagtctataatagaaaaaatctcttaatttaaaatcaattagaaataagtgaaataattattttttttataacatttgttttgttaaattttttatttttattacatgttttgcgagatggtagagacatgtcaaatatgatttatttattctccttattccaacaaattgaagtggaggtaggaaaattcaaacattttgcttgaaaatagaatattaatttccactttaaaattgtttagtatatcatattatatcgtataatatttaaattgtctatattatatttttatataatattagtactatatatacacgtatactatacatcataatattatacaaaaatactatatacaatacaacttaatataatattatataataca

SEQ ID NO: 213003 - DNA, 570 bp, Cannabis indica
agagaaaataaatgaaaaagaaagtgtggatttttgatggcatggaaggtgcggtgagctgtcgtcttctattttgctactctttctctcactaaaaacgatcactttcctaattattgaagaatgttgtgtcttttttgtaaaacttctatttttggtccccacttccctaaaaataaaataaaaagcaaagcaatatttttggataagtcacgttttatttatgaaaattaaaaaacaaatcatcaacttaagtttgaagtcgaactaaattaggggaaaatcataataaataaccctaaatcatacatgtttttattttaaaaatttgtataaaaataaccctacctattatttatattgtctttttcacataaaaaatcaatattttttttttatattatttttcagaataagaagcaaattacttaaaatttatggcatatctatattaattttgttaaaatcttttttatttgaaagttatgtcgatttttttaatttttttgagttgttgtgggttgttagtatataatttttttttacatgtgttaacgcagatttcgttaa

SEQ ID NO: 213004 - DNA, 711 bp, Cannabis indica
atttcccgactgtttttaacaaatgggtatagtattaaagatcgatgcttattcaaccgtcgcataacttggtagaataggactcggtaggaaaatgtcggtaaaagattttttcaacactgaaaaaccgttggcaatactaagcagaattatcgacggctttccaccgtcggctatactattattgtcgatagttttttttttcgacattacattacagaatagagaaaagatgcaaatttttgccattttttccctacattgcttatacatttcagataaattaacgatgatttgtgatttcaatgactatgagatgcaaccttgaataatatgggaatgattttcatccatgttatctacctgccgatttaaaaaataaattttaaattatttacagtatatggagaattatcaagaaatatatatataaaaaaagtacacaacaaaatctttagttgcctctctttgctgagccacaccaaaaagaaatataaaaaaggttcaaatgttaaaatcatgattatatacacaaagaacatttaaaagatatatatatatatatataaaggacctgataaaatcattgtgaactcgtcttctcgttgtggtggaccatcgtcgacgagtggaaggggacgtacgagaagaagcgaaacaagagagatatatatatataatatagagagagagagagagagagatgagtga

SEQ ID NO: 213005 - DNA, 724 bp, Cannabis indica
tttatgaaaatgaaaaaaaaaaagtaaggccttttttttagattggtaacatttttccaaagtgtttctccaatagtgatacaaatgtgtcaaattaggcaaatggtaaaatttttgtcaatattagtcaaatttatatcacgataaatatcatatgtataagaaaattaaagacacacacaataaaatattataattttatttttaacactataaactagttaaaatgtacacataactttaaataattacaaacaaaacccaacagaatcaccctatatattttttttaataatattatattatattattttgttttatttttttttatcgtacgtatatagattttttttgttgtatggtatataatttttgttgtctatagtatatcatttatttaagatgatgttttatttttattttattatatataatttttttggtatattaagttatattgggttgagaaaaaaaagaaaagaaaacacatacattatctttagttgctaaccccaatacatatctgtgatatatcattaaaaagttatatataatattatcacatctatcaataaaatataacatttattcatatttatttcattcatgatcaattaatgaccaaacagtagtagtaggtttgaattttccccctataaatagatcaaaaaaatcaataagaacatatatacaagtacaaaagatatttatatacatatataat

SEQ ID NO: 213006 - DNA, 674 bp, Cannabis indica
gtgcctaatgttagttcatatcccgacagtaatgaggttagatcatcagtcaaatccatgtttaccaaagattttgaacctgtgcctaatgtcagttcatatcctgacaacaatgaggttaaatcattatttaccaaagattttgaacctgtgcctaatgttagttcatatcctgacaacaatgaggctaaatcatcggtaaaatcattatttaccaaagattttgaacctgtgcctaatgttagttcatatcctgatagcaacgaggctaaatcatcagtaaaatcattatttaccaaagattttgaacctgtgcctaatgttagttcatatcctgatagcaacgaggttaaatcatcagtaaaatcattgtttaccaaagattttgaacctgtgcctaatgttagttcatatcctgacaacaacgaggttaaatcatcagtaaaatcattatttaccaaagattttgaacctaaacctcatgttactgcttatcctaatgaagaaattgaatcaccaataaaaacttcatttagtaaagactttgagccaaaaagaggtgacgttacagcttaccatgagaatacttatgtgaatcaaaaattatttgcagaagattttgaacctaccccacacgttacagcttacagcgagtgaaaggcatctttgatctt

SEQ ID NO: 213007 - DNA, 360 bp, Cannabis indica
ttaataaaatatgaccaattaaaatataattatattttctgggatattacaacctacttcactacagatgaatatctaagatattcaaactccactaaataaagattttttaagttttagtgattatatttttctccaaaaagatagttatttgtgcgctcttcaatcaacataaagaacccgatacctataaaatatttaaaatattaaattgaaagcttactcaaacaacatcacactaatagctaaaaataattgaagttaaccatgcgaaacacttcaattttttctaatattgttaaatattgaaagaaaaaataaatagattaccaagtctaatatagcacctcaaaatttttc

SEQ ID NO: 213008 - DNA, 601 bp, Cannabis indica
tctttcaaatgcctcgcctgtaccatcataattcctcctactgctttgcctcctcggtgtgaatcgaagaaagcttcagtcaagaaagcttcttcttctactcctttttagcaagagaacacccaaaaccctagctcgaaaatctatgaggcacacccaattgcctaagaattctaggtctggttcgaagtcttcttctccttctactaagggttctctttcttgtggtctcagtcaccacatgttgttactagtgtggcttctgcagcatcaaccctaaaaggtccttcatatcaaacccgtgcttagcaagcctttcttgaaaaggaagcacgaaccaaaaggcgtcatgacaggcctatttattctactaaaaagctcaagctcaatactcctttggcctcctcgagtgatgatgaagaagaagatcccatggaagtgtcttttgaggaattcgattttaaaactgagactttttcatatgaaaaagaaatttctatagaagatgatgttgtctcttctgaaagtgagggagtcctatctaaagttgaggaagaacttgttgatctggaacataatcctttattgccaaaatctacag

SEQ ID NO: 213009 - DNA, 637 bp, Cannabis indica
ttcttcttctttctttttcctttttgtttatgtgcattttttattcttttttcttttaagaaaatctgaaaaagatctacagagcccatgatttttggtacaccaaccctagaatcagcctccatggttgtccaaagagatcttatttctttaggtattagggtcttctagtttacaagttggtttttgggggtatctcatggttttcgaataggagttttcatttgtgggttttgattaatttttagattagagattgaggtgtactggtccatatgatgtgaaacaagtattccccaaaggttctattgaggtcgaggacccaaccgatgaaagaattttttgagtcaatggttagagaatgaaacattacattgagagtgtgagccttgttgaagaggtcgatcttgaggacccagattatacaccctgaatatttatttttcctatttatataatataatatagtattttattttatttttgttatgtgtttttgcatttttcttttctatgtttgttttgggttactattatcatgtcatctccactctccctccgtgtatattatcgtcatcacgtgtactcttttccctatcttctttattttatattgacattgaggacactgtttaat

SEQ ID NO: 213010 - DNA, 1298 bp, Cannabis indica
ttttgttttttttttttgtctatatcaaatgtgtttttaaagatttttttatttaatatatattagaagttaatatattcattgacaatcctattcctatatagtttttatttcttttcaaaaaatttagtagtattgtttatttgtttgatttacaacaaacttattagatagatatataattacaactacgagtgagataagatgatgatactactactaagatatagtggtgacaataatttttaaatcatatgataagttttttttatagatttatcaattattttttctatagatctctattttatgtgagaattttttaattgctaatattttcttaactataattattttgaacgcagtggtgactaaaagtgacatacagtgatgacatcaattttaaaatcatctcataagttttttttcttaaattaattatcaattgcattttttatcaaatgcgatacggtgatgatctgttttctaatttttttttctttcactatgatatttttttttaaatcaaattcattttcactatgatgtttgtagatatctttttgactaaataattattaaatattaaataaattaataaaaaatatctaaatcatgtactatttaaatttaaatttgattagatttaatctatatctattttttttattattaattaataattaatggactttatttagtatatttggttagttaatttattattttattttatataaagagcaagcttattttaaagtgactaataacggctacagataaaaatatagcgattatagtcagggtcgatcctatgctaatttaggaccttaggcaaattaaaattgggggcagtaaaacataaggttgttgggatttaaatttgaacctcttagtgttaaactaatcaaattaccactatgctacaacacatatataatatctttatatattaaaagtgcatatctaacggcatttttggtttaacagaatatacttaaaagtaaaagaatattctgttaaatttaacgattagtttgattaacaaataaacccaataattaaacccaaaaattaaataatcttttaaatattaataatcttttttaaatttaaaaaaaatcatcttagccacatatctctctaacaaacctatcttgggagaatattaataatttttttttatttattttttaaaaaagaaaaatctttatatattaaagttaacctcacgttatctaatgttttctctggataagcataggaagcagaaataccacttctatctttgtgtgatt

SEQ ID NO: 213011 - DNA, 583 bp, Cannabis indica
ttataatccttctttctttcttgcatacaaagtaacacgtaattctagttatattaattgtacataaaacttcttaagataccttgcattctagcctcttgttatctcggctccatccatagtagctaatttgtatgctcctttcccgtcgatcccactatgcggtacgggccttcacagttgatagataactttcctgcccgggattcctcagtattctggaagaattttttgaggactaattcccctaggagaaatttcctgagcttaacttttttgttatattgtcttgccactactgagtaatggttctgcattcgagataaggtgcattccctttttccttctacgtcatcggctgcctgcaatagcaggaaagtgttctcttcgttgcttaacttggttcgtgaagtgggcacttgtatttccatgatgactgcctccattccatatactaataaatatggggtttccctggtgctagtgtggggcgtcgtccgattggcccataatactccaggcagctctttggcccatctccccttaggtttctcaagtcatttcttgatgttgtttatgatga

SEQ ID NO: 213012 - DNA, 626 bp, Cannabis indica
ttttgcttttggaattttgagggttataatttttgatgttggattatatggtgtggtatgaataaattaaggggcaatttaattatttgaaatcaaagacattaattgttaagtcatctgaatatttatatatatgtatgtataaatagttagatttcatgtcttcttgtgttgtgaatgagaaaaatataattagtacaatattttgaaatttattcattatttatgtattcttatatgtgtgtgtatgtgtttgtgtgtgtagagagaatatattgatataagaaatatgaaatgctatcatatgtagtttttagaactatcatttttcaagaaaagtacttttgtattttggccataaattttcactccgatgtctgttttagacgttttatatactgtttcgaagcttgtgatgagctctacaatatagtgtatgccttagagaaaaaatataagttttattttagtgtatttataccacgagaattggtagaaaatcctagattatcttacacgagtattaagtagtattttgagataaacacttattggtttaccattgtcatgacatagggcccgggattattgatcgttctccaagcaggtcgaccaacatacctgaa

SEQ ID NO: 213013 - DNA, 569 bp, Cannabis indica
agagcattgaaatagcttaaaaaatcatgttaaattgtatcattcaaatcaatattgagtgagtgatggatgttttactgaaggcagttcatgacgtagcgcccaggttgacatccagtgcccaagttgacatcccagcacccaagttgacatatgacgtcgacctagatgctgggtaagtagaaaaacatccaagggatgtaatttaagatgcctaagtggtattttaacaacacttagtctatttctgtattctggtgaagtcggtcaccagttctcagagatgttgttgttcttcagaattgagagacacgaactcttcattttcgagtgagttttccatgttggaaatgagaattgtgaagttgtgaatttcacttctctaacttcatggatcttaattattgtgaaaaactagacaaacaactgaaatagaattagaatcagataagtagaacccaactcaccaggccaactatcaacctgggtgttgggtgctcatttcagagcttctggtttgtcgttttgttacttctaaggttcataaacttgaggaatcagatttggta

SEQ ID NO: 213014 - DNA, 812 bp, Cannabis indica
cctaacactccaacaagaggtacgctgcttctgaatgatgggaccacctaacactcaataactacaacttggcacgagaccacctcctacaagatgtcacttgtagacgtacaacatcttacatgtccctttgggacaagtagggtttcagcttgtaattagagtcaatagatctcccctataaatactccatttttaggccttaaaggtggggagagagagagagagagagagtacgagctatagtaaaggtggtagttatgctatattatatatagggtttaatattagggtcgagatatatgggttgggatgtttatttgtttttatatttttagcatcggtttataatagcattaatgcttagcgtctgttataaattgaccctaatgagtgcttattagcaacaattttacactcaatttcaatagcatcagttctcgtaaaaaattacattttgatcgatgagaatatttttttgtaattgtgagtggtggttaagcgaataaaatgaattggggatcaattggagaaaatcgaataatattttaggattaacaccatatttttgtgttttgtaaaaattattggttgttgcatctgtttttgtaaaaatataaattagatttcatattttacaaaatggtatcatgagcttaatttttttataatttttttttaatataaccaactttaaagacaatttttagtacgaataaataagaatatatatacttaattttgttataacaactctagatcggattattataaatttttattttgtacaaaaaaatcagtttagagtatca

SEQ ID NO: 213015 - DNA, 887 bp, Cannabis indica
cttttataagtgggttgcccaatgcaccctcaccctctacccatgtctaacatataatttacattaatctaatggtataataaggacatcatctataaaaataagtatattttaaaaaatatagaaataaaggtaaaaattaaaaatgggtatacaatgtaattttctctcttttttatctattaatgtaacatactctcatattatatttcattaaaatgtatcaacttttatgagtaggttgttcaatatatccttactctctacttaagtctagcacataatttaaggtatatcttaaaatcatgaaaataggagagttctatttacaccccataaaatgataaattcatcacattattaaaaaaatatatacttaaataatttttaaaaattactcttaatattttttctaaaaaaaatttcctcacattattttatgttaatttcaatagttattttgattttattttcataatttttttctaactcatgtatatatatatatatatttatttatttctaagaaaatttcatataattttttattttaatttttttgccataatatttaaaatataatttatttttatttgatgggtatatatttttaagaatatgaattggaagaaaaacttaaaaaatttaagtataatttaaaatataaattttatataaaataaaaattattaaaatagggtgtctttagaaatttctgggatgtaaataaaatttctcataaaataaaggtaaaaattaaaacaatgtagtaaaataggtatacaatgtaatttcatctgaaacatgtctttctctctttccttttcatttctttttttttaaaaaaacaaaaaattatgttctcaatagaaagaaacatatgcaaa

SEQ ID NO: 213016 - DNA, 714 bp, Cannabis indica
attacagaatttgattcttttccattctaatattacccacaacttataatcaaatgcattagggtttgttttgttgggtaataaaataaaaaaaaaaaaattaatttttacttttttaattttagtttttagagtagttagaatatgtacaacattgaatattattaatagccactaataatgtccaataccactacacaaagtgacacttttaagccaatgatacaaattttataataattattaaattaaaatatatcatgtcatacttaatttgctatagcatttatcttagcattttattatttgcttttcaaattactgtcacagattgtttaaatataaacaaagaaaataaatttcaattacacacataataatattaatcatattaccaaaattttattattaagttaagaattacgagttttatatgaatcactcacacaagtttactttttttaaagatttcaattattacacacttaaagcatctctactctctattttttttaactaaaatagagagtatttttattattattattattattattatacttcctattttaatttatatttataatttaaatttgttaatataaattaattttataaaataataaaaaaataataatagtacttttagttaaaatactattaaacaatattagcgaaaaaattaagaagctccttatttattctctattatat

SEQ ID NO: 213017 - DNA, 936 bp, Cannabis indica
aagtggacgattcaaaatgtgttagagagatgaagaagagatatatggattttatggttatgacaagatctaattctaaatgcatcattaagaaaatccttccaacaattgcaacttagtgagttgatcttactaactctatcactgagttgttacagggtttacctccgagttgtatggatatatcccgagagtatcaagcattgattctgattaatgagccctaggccatacacattgattcattcattctttggccgactcttaaagttgatgtctctcgatccccgagagtaagtgtttactaatctcaaaaatcaactctgtcaaattttggggttaacacttgcccctcccaatctacaaggattcttttgagtgttcttgttgactgagtgaattgggcttttgctaggttggagtgcgagccttaacttctccatgtttcttaaggatgttcctactatacatagggtgccttccttgcttgagcccctcagagtagtgaaaaattcttcttactttgtctaacaagtctcaagtttgaacctcatctaacccttttgtctcttttttctttttggtggtcaagtgacctaagtcgctcttggggccgagtgactctagtcactgggagcctgagtgactttgagtcgctcttggggccgagtgactctagtcactgcgagcctgagcgactttgagtccctcttggggccgagtgactctagtcactgggaggctgagtgattttgagtcgctcttggtgctgagtgactggtcactagaagggagtgactttgagtcgctcttggggccaagtgactctattcaccgcaaggccgagtgactttgagttttgtctctacgaggtcgagtgactttgagttgctatttgggccgagtgacaattttggtcgagtgactctaagggtt

SEQ ID NO: 213018 - DNA, 683 bp, Cannabis indica
caagtagcttatatctagctgctacttatgggttgagggacagatttggacagagaagaatcaaagatattggtcccttcttacttggttttggctagctaaagaaaagaaggagaaagagagtgatgagggtttgtttttctttactgttttcctttgattaatacttatcttatatttatatatatatatatatatcatcaatattttaaaaaaaaaaagattaataataataataaaagaatttaacaaaaaaaatattttactattttttagccactacgaaatttttaatcctaaggtatttggtcaaccccgagtactcaaaaataccctgataatctaaaattaactttccataataatcttattaaaaccactaactaaactaattgtgacattattggcctctgatcgggtctccaagattgtcaaacttgaaaacatttttatgtcacaaataattcatattatacccacatattctaaataaatttttgtaattaacaaattatgcttatttatctacttatgaaaaaatttataatttacactgaatgagattagtaggatcataatctcacccatactctctaattacccataatatataataaaccttaattatccttaattaggtttccatgatattacaactatcccctccttatagaaatttcatc

SEQ ID NO: 213019 - DNA, 576 bp, Cannabis indica
tgattgactggccctccttggggggctgcaagcttgaatgtgccagggtctggctggccatactctaagagagtgtatggtggaggtcagccagacttgtgttgtgttgtaggccttggctagccactcctaagtagggatgttgaatctggtcgaccaagcctatactgggtagctatccatgtcggtctgccctgtgccaggcaaggcttagtcgcccatgactccccggttggttgatgtttctagtgtgttgaaaggaggtagatcacaccagttgttggagttaggtagacctagatacctgaagtgattagtctcacttctcaaattgttattttgggtgtttccacctattcacagtcctagttggttgaagattggcctttgggtggctcactcccctcaaggagggaatgcagtcccatggctagcctaaggtgcaccaataggtggctggccaaccaaaggttggtcgatggggctgttattgagcctgagatccctggtcggccccctagattgctagttgctgagatatggctattcttgccattagaccttcgtggcaaggcc

SEQ ID NO: 213020 - DNA, 332 bp, Cannabis indica
ggttagtttgacttttctcttttggcttcacagtgttcttgtcttttgaatattctcatgtagaatttgattagaaccttctgatttgggaattggtgtacagggcgtcccattattgtggatttctcgccagtgacagacttccgtgaagccacttgcaggcaatatgaggagaatacatgcaaccgaggtggatattgcaactttatgcacttgaagaggattagtaggtaataatcccattttttccacttattctagattttattgcactaatcaaattaatatattcattccttgaatgatcttctaatccagggagttgcgacgcg

SEQ ID NO: 213021 - DNA, 708 bp, Cannabis indica
tcctatggtatcttcatcattcggtttcattttatagagtatagagatcaagtcattaatgggggttatgtcttttttaaccgaaggccagttatcatgaaaccttgggatcctaatgtcaactttaagaaagaggatgtgaaatgtgttccaatatgggtgcaactagaggacttagaactgaagtattggggccaaaagtcactctttaagattgttgggcaattaggaaaacctctcatggaagattctattactagggaaagggaaagattgaattatcctagggtattagttgaggttatcatggaccaacaactaccagatatattagaattcgaaaatgaatatgggatgaatacatcggtgggggtcaagtatgaatggaagcctataagatgctctcattgttccggaattggtcacttagctgctgaatgtaaaagagctgcaccggccaagcaacatggattgttaaaaaggataataggaagaccacaaacattgatgatgatggttttattagagtatcaaaagggaagaagattgataagcctgaacaaacttaggagttcccagcagtatcaacaagcaacccttttcaagctctcagtttggaaaaagagatgggaaataggggggaaattgaaatgagcatactacaagccgatagggagatcatggatgacacaagagggggggggagga

SEQ ID NO: 213022 - DNA, 1107 bp, Cannabis indica
ttgcggtatggagttggttcgggtgcaattaggctttgctggatggttttacggtggatgcaaggggtaagtggaggtttagcgcttctttggtcggaagatttcaaagttgagatcaagtttatacgatctctcacattgatgcattggtggaaaatgacttggggttcgtgtggcgattcacgggtttctatggaagcccggatcccagaggaaggatggaatcttggaagttactgagtagactaaaaaatatgttcaccaatgcttggatttgtggcggcgattttaacgaagtcattagccagaaagaaaaaaagggtggaggtccaaagccggattatcttatgaaaaactttcgatctgccatttcggattgcaaacttaaggaaatttcttcgggtggaaactcttttacttggtgcaatggtcgtgcttctaatctaatctttgaaaagctggacagggtgttatgcaattcggcatggctggacagatttaaatctaacaaagttactcttctaaaatggtggaattctgaccatagaccggtactgttggaagctcattacaacaataggaggggtcagtttcaaagaacttgggggtcgagattccacttcgagcaggcgtgggcggataatgatgattgtactaagagtggaacttgacacaaaaaaaagttaactttgctagatccaaggaattaaaagaaaagattgattggctatccaattcgcctaatttaacagattggttagctcgtcaaaaattggaaaaggacctcaattggtggaagaaaaaagggagatgtattggaaataaagaagccgtgcactttggttgagacatggagatcgaaacacaaaatttttccactttaaagcgttagctaggaggaaaaagaacaccattttgggattgtatgacagccaaggacgatggcgcacctctgaaaaaagacttggctgatattgccatcagctattttcaacacctattctcgcaatccaatgggggaaccgagataaaagaagaacttagaggatgtgttccttgccgaatcagtacagcagagaaccttgcattactagaacctttttcaag

SEQ ID NO: 213023 - DNA, 786 bp, Cannabis indica
ctattgtgcctaatagcaatacacaaacatactagtattatactattaggcaccttcaaaatatatcaatgtgacgcgttgtggtgcttgacacattaaagtgcatattctctgtaaatatattatatgagttgatgttttgaacaaaccttagcaacagtgtttcgagctttgttccaatttatttgatgataagggtctgtatagagttcttgccttaatgattgaaccaacccagtgattggtccaacaaatctttttccatataagaatgacataggcatgtacaccaaccgagctaacgcgcccattttccctacaaaagtagaaatactaaagctttattaatttcaaccacactattaattagttttattttgaaaacaaaaaaaaatatatattgtataatatagtagaatatcacattaaaaaagaaaaaaaaacaaaaacgcttcaaagattttaatatgtaattaattaattaagaggtaattattcttatttacaggtacacttagtacttaatattaaacttagaatacatgtttattgtgtgaaatccaggctgaatccgtggaacatctttactttaattgttttttctaacaagacttatttataggagattaaaaagtggattggttggagatgcatgggctcggatttgagcactattctgagatggattgatagagcgaaaatttctaaatttcgaaggcaagtttatgcagtttctatagctgccttggtgtgtcacatatggatgattcgaaataaagcccttgg

SEQ ID NO: 213024 - DNA, 903 bp, Cannabis indica
aaaaaaaaagagagagaaattaaaagtccccaaaaacgtcactttgatcagattagtcctcaaggcaatagtcctcaaggtcacacttttcatttgtctgttattcctaattttaactgactcgtttttttttttttttacattgtcacgtgtcaaaatattattggtccaaattattattttaattttaaaaataaaaataaataaataaataaattatttaaaaatgatttttttccttttctttttctttcttttcttcttctttgccttcttcttcgtctgtcttcttcatctccactgtaaaaacgattcacccccaacctgctcccatcttgtcaaccaaccaccaaaactcaccacccaccctcttgatctctcagccgcaccatctcaatcttaaacatccatctccttcgctgaaaaccactccgagccaccacctgcacctcaaccattcccaagcacccaagcccagaaattctctctccacctacgtctcatccctctccccttcagcctacaacaaaaattatgccgtctctccccttcggcctaaaccctaaatcccaaatttcaccctttcctcttccgtcgactacactcgagatgccaccaccacctagatttcttgagagagagaagtgaggttgtcgtatattgaagaaaagaattagggagcgtttggtataaggtgttcaaaataatttgattatacgacatattatgaaggagaatacgattataggaaaatgtgtaaactgtgtttggttgtgtagggtaatatgtaatcatattcatattaattaaattatattgtttggttgagtacatgaatcttatatattattttaaaaattaaaataatttttttattatatttgtttaatgttaattatatac

SEQ ID NO: 213025 - DNA, 953 bp, Cannabis indica
caattaaaatgtaaagaaaataagaatttaaaagtcttaatatatataatacaattatatttcaaaacttaaaagatcaaatgtatattctattgttatatataatttttttaaaatacaattcaaaacaaattaaacattttttatacatacaatttttttttcatcatttgaatttgttatttgttatttaatttattttaatttattgttagagacataaaataacaataatttattttattttattgttagttatgtgaaaaaaaataattttcttcataaatattaaataatttaatataaaaaagtaaccaattcaaaataatcgatctaatccgcacttttacatattggattggatttgagctattgcgtggattgaattggatctaaaatttaaaacctgcacttagtgcaaatttaatgtactatgagcaaaatagtatgaattgaattggatgaacatccctacatatataaaacaactagatttaacttatattaaaagagtaataataaaaattatcccttccgaaagtcaaaaaaaaaaaaaaggtacattgagagaaatcactttagcgagaaaaaaaaaagtgtaaatttgtaattcattatgcaaagatgagatgctcaatcacaacaagaagttcttcaggcaaaagaaaagcccttcaagctaactgctccctgcagggaactgatactgtattttcatcaagaactgcatatgttttcagattacacaagaaacccaaactttattacaggactacggtctagaattaaataaataaaaaaaaaaacgtaaaacctgaaattgccaccatcttagcaaaaaagaaagaaacaagttaacattaatttataaacattgcgaggcaagagacttcattgaggaaggtggaggaaaagtagtatgtacaactctactcgggaatcacagctgctgg

SEQ ID NO: 213026 - DNA, 1009 bp, Cannabis indica
gctcggtggtcctcggcaatggcatcgcatctggtacctgcatccattccagagagagagaagaagggtatcgagaaaatgaaaaagaaataataggaaaaaaattatgatttttgttattttaattttttaaaattaattatttaaaatttgaataaaaactctaaattgctaacggtatcatgattttgggagttttgccgcaattaacccaaccaactttaaaatatttctaaattaaaactacgctacatcagatgctctacactctgttatttttttctttaaaattcactattcatattctatatttataaaatgttatttattactctaaacatattttattatttatttgagatttttattattctttttatatagtaatatatgtaaatattaatattatatatttgaataataaaatttgaaaaaaaaaagtgaaatttttattgatatgttttaaagaagatggtgtatggtataatatataaagtttaaggtaaaatggaaaaaaatatgattttaataatgtattttaaagaatagagtaaagaacaaacgttgtctgtttgataaaatatgaaatgcattttactctagttttcaattacatgaatctcataaatctcgcaaaattttatattttttatagatttagtatttttttttttttttgagtttttggcggctaaatcattcttattattgtttcacttgcacttaatcctccaagttcaaattttggcggtaaaacttttcaaactactgaactgttagcaaatttaaggtgtcatccggttaactgctaccatagactgcttatgtgtacactcttatacacgtgacacttttatattggtacacctaatattattatttataaatttattttaaaattaactaaaattatatcaatgaaaaaataaaatatttaaaaaataaaaaatgttataaattttgaaatatttttttataatttttaaataataatattaattgtaccaat

SEQ ID NO: 213027 - DNA, 719 bp, Cannabis indica
catctcgccgcggccacaagtggactcgccgcggagagataggggtgaaaaaatgcctctctgcccacgacttatggccgcggcggcagtccttctcgccacggcgagataagcacgaaaaatggtctttctgttcaaactttatggttgcggctagagtgtagctcgccgcgacgagatatcgctggaaaaatcagcctctgtaatcaaccttatggtcgcggctagagtgtagctcgccgcggccactgggcagtacttcgaaaatttttctttttttttctttctgtacagtacaaaacattaaagaaaaccaaaattcggtttaccagttcactaaacataaaccaaaaagaaacaaaaatattaatcacaactaaaagaagcgaaatacgaaagctcaactaaaacaccaagaaaattcgcctcccaatagcgctgtctttttcgtcgaacaactggtcgttaactgagttcttcagagaggcgccagaatcacagcgaacttggcttggtcaaattgacctcccaagtagagctttaaccactacccgttaactttaaaagtctcggggctttcacctttttgttctaccgctccataaggaaacgccttgaccactataaatggtccggaccaccttgactttagcttaccaggaaacaatttcaaccttgaattaaaagtaaaacttgctgcccaaattgaaactccttcc

SEQ ID NO: 213028 - DNA, 668 bp, Cannabis indica
aactaaatatttttaaatattaagaaagaaaaggtaatgtaaataatagaataacaaataagagatttttacgtggttcaggcgttaacgattcttagtccatgagtctattaggctcatctaccggtaactgtttatacaagtagagatacaatggactgaaactcctttctcccgtgttcctcttgaagaagaggaagctaagtaggaatatttttagaattttttaggtgtaatacaaatgtgtttgcccgaaaatggcaaagaatgagtcttctctcagaaaaaaggagtcttctcactctgcaaaaagttctctttttcccttgagcttttcacgggcatttttaggccaacttatcttcttgtgctggcatgaagggatcatacttgggccaaatccaaccattggattggtaggtggtatttttctcatatggcatttaagggtgccaaatcgtacgagctaaacctcctacgcgtatcgtcccaaggcttttcctttttgaattccccttatccctaactgttggatcatttgatgaggtacataaggacacacatgctctgtatgatagcgtgtcgtgagagattacctctgatgtcgtacatgataaagtctggtcactaggtccgtagtccgacacgtataggcagagcctccccga

SEQ ID NO: 213029 - DNA, 628 bp, Cannabis indica
gagtatttgcaaatatgagagatccatctgcgagggtattcaacccaaactgggagggtccgtatgtgattgaagcgatagtaggaatcagagtttataaatgggctcagccaaatggtttgctaataaagaactactagaacgtggaacatttgtgaccctactaccagaaaattaatgattgtaacttgcattaccgatgtaatattttaaacttcagttatgaataaagtgaatcatttcttttatttaagtaattacaaagtattattctttaaaattacttaaggggcatatgtgtatgattaaccaaaatttatccggaaatacatgatatagtgtgttgggattttatgccctaaataaaacccatttcaatctaatatgatttgttatcaataaaagattagaagacatttatgtttacatgtagttttcatgtttatggtttaatatataaaaaatttgttaagtccagaacatatcgtcatttacaattacagtgatgtcaacacagtggaaagtgattgtgattatatgcttcaaaagacaaagtccctatttcatcagtgcattggatttacgctaatgtgataatcagtgaggaagtgtacttacactttgtata

SEQ ID NO: 213030 - DNA, 580 bp, Cannabis indica
atattatttcttttcatagtaaatttcataatctcttctaaaaacattaaaaaaagactagcacgattacaatatctactaatctgttcagttctttgaactgaatcccattgattgttcatacccactgtgggaatttatttgcatacatataatatagctctttcctaggcagattttacagcctggacttgcggttttagagcaaaaaaaattacttgaatgtgtaatgtgttattatattttagttagccagccgccgtagttagggttttatttttttatctcactgtttctttctctctgtgcaggtggacttgggcgatttagggtttgttgccaaggataaggatagtggattgggtttgtggccgcagcagttagcatttgttgccacgttgtgtatatagatctagattttcttgcatttgtattcatttatgtttgttcttgatattgtacatatatgaagattttttttttcgatataataattttgtaatttttctaaattttagggtaataaatttttgtgtagatttctcattttgtttccattttaactttgagcaccaaaaaa

SEQ ID NO: 213031 - DNA, 545 bp, Cannabis indica
caaactatctttcccacattttataacatgatctgcacacaatacaattccacaattaaagcaattcgatctgataatgctaaagaacttgcaatgtccgctttttatgcctccaaaggcataattcattaccactcatgtgttgaacgtcctcaacaaaactctgttgttgaacgcaaacaccaacatctccttaacattgcacgcgctttatgttttcaatctcatttgccccttgcttattggggacatttaattgctactgcaacttacctcatgaaccgaactccttcggtcctcctaaaaggcagtacctcctttgaaaaacttcacttaaaaccaccaaattatgaccatctccgagtatttggatgcttagcatatgcctccacactcacctccactaggcataaattttcgccaagaagccgtgcatccgtgttcattggatacccacatggcatgaaggcttacacccttcttgacatccaaacgaaacaaatctaccattcaagagatgtcatctttcatgaaaacgtatttcc

SEQ ID NO: 213032 - DNA, 646 bp, Cannabis indica
cagaaaaggtcccgagcaagtttttgacactgtaatgatagctccttagctagcctcggaaatggttaagaccgaaattgaagttatggtaggaaagttacacaacttgacactttaatcagatttgttggaaaggatcagaaagacacaattgaaagatcctaagctaattaaaatttgggatgagatattggcctgttggcttaaggacttttttgatcttgaataacggaatgttattttataaagctcgagtttgtgttccagtatatggtgagcttagaaaggaatacttgatgaagctcgcattacaccttattcattacacccgaggaccaccaagatatattaggatttgaaatcctactatcggtggtgtggtatgaagaaagatgtggtggattacgtggctaaatgtgtaatatgtaagtaaatcaaagtgaaacaccagaggtcggcaaggttattgcaaccattagcccttcctgggtggaacagggagagtattgcaatggatttcatggttgggttgcttaaaaccacatgaatatatgactgagtatgggtcatagtagaccattttacgaagtcaacacattttttaccggtaaagactatttgtacagtggatcaatatgcagagttg

SEQ ID NO: 213033 - DNA, 582 bp, Cannabis indica
ctgcacaacacccctttggaacacttgaactaaaaccactagtcttttttttcaaaagtttctttgcatgaactataatagccataataataataataataataatacgatgatgatgaacaaagagaataagtatattgatgaagagatcacaattgatgaagctatatatatatatctattttttgtatgtatattatatagatggattttaatatatatatagtttgtagttgtgtgtgtataacgcgtgtatggaaacgagtcacaaatgggtccaagtgatgagtcataaagacttagttttgtgtcattcttacttgaaatgtgtaaaatatgaatatagaactacttttataggttgtaaagaatatatataataatgtaattataaagttatgatctttttttttgaagttgggatgggccatcttatctttttgagatttttatagtgatgaattgattgaaacatgtttgtggtagtgggggccagccatgcccataaatatatatggttagtaataataataatggaacaagtggtacgtactacgtttgtacggttcgtccttatattat

SEQ ID NO: 213034 - DNA, 691 bp, Cannabis indica
agagagagagagagctatgtaccacaaaaaaagagagcgaagggttgtagtggtggatgacgcaacagagaaagagaagggaaatgaacggtggtcggctgatgatcttttgaaacgagagcttttggtgcggctgtctgctggattttgagggggctagtgtggctctactgggttttagaatgggggctctgctagggtttgaaatggccagggaaaagagatgcgtgaaatgaaatcttcttttgtgaaaattggattttatacaacttaaacccttttgcttcggtggataaccgtggcaaatgtattaacctcatttttaaactgaagcaaaaacaactagcctcatttttccaccaaagcaaaatgtaatagacaatttttaaaattttcacctttttcctcgattcttcttttagcgtcggggaatgagctgacgctaattgatatgttttagcttcacttatactctgaagcataaaatcatcacctattttttgcctcggtcaaccatttttgtgagacgcgttgaccaacgcaaaaatggtattttgtagtagtgcacgtgtacactatgtccatgtgtacaatccaccatgacagttaacagttgaatttggatggaagttgtaaagtgctaacaatatcatagttttggggggttttacaacccaaatttgggttttgg

SEQ ID NO: 213035 - DNA, 1378 bp, Cannabis indica
agtgatgcttttctgtagttggaaaaggtaacaatatttatgtgttactcactagcagtgtgatgaccaagaggagacacaaccttcatgtaatcatttgaagaagctattttgatacggtatattcattttggtatgagaatatatgtaactaacttcttttatttgggggaatatatgtaactaacttaactgcatgtatttattgtaaaaaaaaaaatacctttactgcatggtgcaattttcatgcccacaattacacatcgaattgcccttactctctctctttctctctctctctctatatatatatatatatatatattggggaggggaggaatcgaacttaggaccacttatttattgtgaacaaagtagtggaactactaattatgtttatgaccataattgctcttactctttaatatatggttttagttttgttttttttatttattttttgtttcttgtcaaacttgtctttgaaagtcggaaataacataacaagtgattagtgatctatatagatgctatacaatcaatattgtttagtgttgatgttgtttttcgtcctttatctaataagattgtaaacgaacaaaatgaatgtaaggaaaaatagatgacaataaaccgatttgtagaaagaaaattagtgactcctttcccaaatgcaattttatgtgaaattgggtattgatacaaagagactcttatatcgcaaaagacaaatttctaatcaagttccatttttccatatattgtataaactattgtgctctttagctgtgaactggcctcatagttggggcatttatcacgttataataatctttctatagggttgtcaaatttggcctgaaataaatgagttgttaatacttaataatcttcataatcatgttttcttttttttatcatatggttttatacacctacacatagcttgtttgaggggtctcatggtagtgggaaggtattacttaaaaatattgaagaatcatttgttgtaacatttgttagccactttggttgcaactgattaccttaaaattttcaaattgcaggttgtaagggttgcctgttttgctgaaggagaacttgcagatgaagctagagcagcaggagctgatatatagtggtttggattccaaaacctgagcttgaatctaacgctgtttcttgcagttaaaattttctgtcagaacagagtgtaaaactattaaaatatattccagctacataggattttacctccacagaaaattcaaaaatttacaaattttcttttttacattattgccctaaaaaaagattagacaagaggaaacgtagccgaaactttagtatcaatctgtctaagccatgctattatatg

SEQ ID NO: 213036 - DNA, 549 bp, Cannabis indica
taatttattttaataaataatgataacaattttaaattaaataatattaattaaatattaaatcacaaagttttaccagcgcaaaattgtgctggtaaaagtaagacttcttccagcacgttaatacactggtaaaagtaagactttttccagtgcacatttttgctagcaaaattagactttttccagagcacatttttgctggcaaaattagacttttttcagtgcaaatgtgtgctgggaaaagtagacttttctcagtgcgttagtgcattggtaaaagtaagatttttctcagcatatgtttgcgctgaaaaaagtctagtttttaccaatgcatttacgtgctggaaaaaatcatttttaccagcattttttgttttgcgctggcaaaagttccaaaactaacatggatttgctaactttttttaccagtgcaaaattgtgcaagcaaaaataaattgtgttttgccagtacaatacccaactttcgccagcatctggaaaaaatcctatttcttgtagcgaagctaaaatatcaaattatag

SEQ ID NO: 213037 - DNA, 588 bp, Cannabis indica
ttgttgacgggcctggtaactccatgtgcgtagtcatgctgctttgagttggcttggtctcttcttctttcccttttatcaagggatcctactagcaagatgttgtgtacctcttggtcactgtagactagaagtatgatagtagactgctggtggatcaggctgactagggcaagaccaggtggccagctatattgagggagtactgcctgagggattggataaggccttttttggccagcatgtggaggtggtagctggcctaaatgcgaattctatggtcaaccagcttgctaaggacatggtcggccagacttctaaaggcctggtcgatgttgtggttggatcctgtctacatttaattggctttgccccctggcataattgacgtggagcctttgtgcacttctatcattagctagacagcttctttcttggaaacactccttggtggtgttagagtaccacttctgtgtgttatgttgtgcaggattggacactttgtagccgtcttctcagtctctgctctcggacaaggtctttatttggaggtaggttgtgataggtgtcatccagcatgtcgacctc

SEQ ID NO: 213038 - DNA, 814 bp, Cannabis indica
agttgcaatttaaactatagaggtttctgtataaaattctgtaaaataccaaaaaacaaaatgtttgaagtgtaaaaataaaaaaacctaaaaaaattcattttgtattgagttttggaatatgctgagtaaaaatatcttgaacttattatttaaaataaaaaaaataatatttttttgaaaaaaaaaacatttaaagatatttattttttaactgcaaatttcattcaactatactaactcagctagttttctaaaaaaaattcggtaaacaataataattcgatcctttaccataaatgatgtagtatgttctcaaagataaagagtacttttttctttccgtacgaggtagtggtggtggcattcctgtcctttgctaggggtggtgcacgtcctactgatgggtacgtgtaggcaaaattgtcctcggtacgggagggacgactgtgtcccttgtccaaaaacggttaaacctttttagtaatcatattagggttttgggtctcttctatgccttctttattcttacccaaagttgaatatactctgcttctatctactgtcccaacttcatgtgcctggtttgcatgggttctttgctcaaattctactgttaaaagctcatcctcatgctagtttactcatctcattatgagtttgtttgctggaactgaatcaaggaagagatcttggaagatgttatgaacttggtggagaatgtggctgttgaagatttttctcttgaccttgttccagatgacatcaatgctaagggaactattcgcagaactctcgtgggtaagtttttctc

SEQ ID NO: 213039 - DNA, 810 bp, Cannabis indica
tttgaaatcaacacatttaatacgattctttcaagttttttatgatcttcaagtctcattcgagtgctctcaatctcaaaaacttccattttcaaaagaagaaagaatatcggtaggatattatggaaatgagaaagggattagaaagggagaagacttgcgagagcttaaagaaagagaagattacctcctttaactcaattaaaaaaaaaattcaaattcaagtctctcttgattcgatgaacgagccaaatcttcattaaccaacatttttctttggacatcgcgaagagcttgagctctcgattctacaacattcttggccttcgagatctcctctaaaaactttttatttttcccctcctcacttgacgacttctctttcacactcttcaaaagttgctcttgcatttgatcttctacaacatcaagaagttcagccttctatagcaatttcatttcagtctgcacaagatgctcattcttagcctaaacaatttgtttgagctcataaatttaagtttgagcaccttcacaagtattttgttccgcattaagttcgcttttataagtgttagataaggtagcttattttttaacttgctccagttcataagtaagttgtgaaattcgcaagttgggcgaatcacattgagccttagattctgaaggagaattgatagcaagggagaataacttttggctgtagtcgtacaagtcatggagccgcgttcaaccccttcacaaagttgatacaacttcttatttttcacttcgaattgttcaaaaataaaaaaaaaaaataaccac

SEQ ID NO: 213040 - DNA, 679 bp, Cannabis indica
tttttttttttactttttgcttagcgaagcgtattttataattttaaaactttatcaacgcatttttgtaaataaaaactttagaatgtaaaattataaataaaaaaaatggtatttttgaaactttcccaaaaaagaaaaatgagtaaaacgacatttggttggtatacatgtgaataacgacatgtcgtatctaacacctggtgcgctccaagcctaaaaccccttccctagaatgaattagcaaaacctcaggtctccgaattacagcaccagggtagagtagccttgagggaggcaaacatggttttatcgaacaagaagctgaagcaacgtctcagagcagagttggccgagtctttagctgcatctgtagccaaatcagattccaacaacgatgcctcctccgcaaatccaaacggggatagtcatttgcagcagcctaagcctaagcctcagcctctaaaagttcttttggactcggcaactcaaaggcagagattgtccaaacgtgaaaagcgcagaaaaaccctatctttacaaggtcccaaggcggtaaactgcgatggttctgaagagaatatcagtaaaggaggaggaggaggagaagaaaatggaattaaggaaactgggtcagatggtttaggggataagaagaagaaggagaagaaaagaaaga

SEQ ID NO: 213041 - DNA, 836 bp, Cannabis indica
caagggagaaggtcggtacgtgacaaggcaagtgccagctgaggacgcacaagaaccagtagtcgatcaacaagaggaggggacggaactcgtcgcagtacggatcgagagagtacaggcacaagtagaactgaaagttactccaggacgagatccatgagtagaatgagctccatgagtaggaccaggtcctcgagtaattatgaccagcaacaatcggatcttcgtaatcacttgaaccaggaaaaacttgacgttcgccaggatcatatacaattgcaaattgatgagttagaggacaaattcaggacgtatgaagttggggaatatggaaaacattctagatacaaatcggatgaggaactcgagcctttccatccagacattaagagtactgaattcctgcatggattcaagaaccatcacgtctcatcatatatgggactacagatccagtctcacactttaataattttaatactatcatgcgagccagcaatgttacgaataatttacactatattttattccccacttcgctagttggagcagcgagcagctgattcaacaaatttacccatcattcaatcacctctttagaacagttgtatagggacatcaagaaacaattccaagcagcaagggatagacgacctgcgacttcctcccgcactaacataaagcaacagccgagcaagatgcttaagtcctacttaagtccctttagcacagctactgtgccggttagaaatttggatgatagtacccagcttactgctcttcaagtagggatcacgactgatcttacaacttttggaggcaagctgtgggatgac

SEQ ID NO: 213042 - DNA, 538 bp, Cannabis indica
aaaataagagtttttgacagagagctgacctatgacaactgaggggctaacctctacatttgcatgagttagagcaagcacccttgctggagcgggtttcgtagctgtcttctgttcttctttcttatgatgtgggaaatctcttttgtaatgtcctagaaacctacactgtaaacacccttgccctttacactcacccagatgatgctttttacaactgggacactctgggtaagtgtatcgggttttagaaccaacctgacggttgcctcgaccttggttccctcagaaccttttattctgacctgagccactaggtgcagtcggcgcctttcatttttgatcagtggtcaaaccactacaacccctaccataaccagaggtaggaggagtaggagccccaccaacaacctgagtcgctcgagactcctcagtgcactccactacgctctcagctcgtagtgcctttcccaccatgtcatcataagtggtgttgtcctcagtagtgatcatatggtcatgctttatttttggattc

SEQ ID NO: 213043 - DNA, 649 bp, Cannabis indica
tagttagggtgttacatatgtagctgaactttgttgttttcattttcctctattgtactaaccactagtattttctctttgtagacaatatgagcatcctagctgttatggcatctcattcaaacttgaagaggaaaatttcagtgctgaaggaaactgaacctatagtcagggaagtggttcaaggcatccctgctacttctactacttcgaagaagaaggtcaggaataggggtagaactattgatgttgctctagaattctagcattcgtcctactaatgagagatctttgatcgactgctctctggatgaggttgagcatggtgtcccgaacccaggttcagacttggtggggcagctgcatgagcagggctcttggcttcttacacatggtgatgcctttattggttccatggctgagaacgtcctgttgaagaagttagttagcaccaagcctctgcatgttattgctgagtgatgcttcactgacatctttggggtaattatttttccttgtctccttctatcttaactttcttttgtttaacatcacctgacattgttctcttgtcttcacacttgttttggttatgcttacaccatgaataacaaacacaagaaggcggttgagtttgctgacaagctcg

SEQ ID NO: 213044 - DNA, 1510 bp, Cannabis indica
caatttttgtctagttcactatttttatctactaatataatcgtacatattattattaatctctttgtttttattgtcctttatcatcaatttctttgatcgatgttttattttattttatttacttattaatagataaatattggagattctaccaaaaataactataataataataatagtgaaaaaaataagttaaaaaaagcgtagtgtactccttttctctctccatgagggaaggaaaaaggaataccaaaaactttatattcaggtaataggccatgttgttcagaatcttaagcttccttcgatccagaactgtgttgtggaagcaccggtggctaaggattctcatgactctcgttcagagctcgaagttgatcctgctatggagattagggtagaaccaacgtcgttttctaggaatagatatgaataaagatggcaaaacctggactgaggaggttgaaggaaaggattttcagaactcgactatgaatatgtggagtaaatttaaagcaaactaggtttgtactctatccacgaaacttgaattttcaaccccgatgaaacgtggagaccaattgatagctaaaattgatttagtaagaggtggcattgaaacatctcattggaaaaactctgttatatgtgtggtgttgggtgcgaatcttcccttcctggtgttcgaaggatttatcaaaagagtttaggggaatttaggttgttatcccattttttgcactatgacgtagcaaaatacacaaatgagacgtgtcctacattcctcgcagtttggcggagataaatgtctcgggcagacttcatattatacatctatatgtataacttctaattacccgagcaaggtggaaggtggactatccgagcaggcacaagtttggctttccgaactacttatcaggacttagctacttcagaatgatctcgtgaagtccaagcacgaatacaatccctttaatcatgggattgaatcaggggaatatggcaacctattctaatttcctattttgtgtatcataattatgtaatggatgttctttcctattttatacattgtaagcaaaaaggaaacatttcctcatgcattaaggccgtataaatagtgatctagcttcgctgtcaaagggatcgaaagaattgcttcaaagagagatctaagaaaattactcagagatttcattgtaaaagctttgagagagaaaaacactttgttctttgtctcaagttaatacaatctaaggggagtaggctattgcgacactcactcggtcgaacctctttaaaatctggtaactttattacttattcagttttgctctatttatattgtcgttggctaaaagcgaggtcaatattttggtgcttttcattgagagcgaaaacccaagtttgttgtttgtcttaagtcttaacaggcgtacaaaatggtggtgcaaactcgcagaggcctggtcaatcagaacgacccaatggtgacggatcctaa

SEQ ID NO: 213045 - DNA, 893 bp, Cannabis indica
taaaaaaaataaaagtaaaaataaaaaaacataatatagtaaaaaatatttgaatcatattttttgacaatcaataattttagtaaaatttacaattttttttttttaaaaaaaaaataaataatttataagataatctactataatcacaatatattatgaaatttgtgaaagtaccataaaatatgttaatacatttatttctatcaagactctctaaaacattagagtacaaaaaaattcatatttaatatttcaaattgattcattacaataataacaaataaataaataaataatattcaaattgattactaaaatccttttctatttgcagcagaatattgggaccaaaaaaaggaaatgaaaccaataggaagttacattgataaatttggcccaaattcaaaaatccatagcccatgaatagaataaataaatttgtcattttaggtatttatgaaaatatctccacaatttaattttatagtatctttggaaaattataaaaaaaaatatatatatttttataaattaccaaattagaagctatggccaatgatacatgtgagatcacttggttttttttttcataaatacccaaaaaagataacaaatttacaaaattacagtcctacagttttttttaatatttttacaacaacattattctatgttgctttcaagttgtcttcatattgttttatatttttattttattgtttacacgttatttttctgaggttatgtaaaaatgtaatgaaaataaatccataaaaaattaaaacaaaagtccataaaaaatataaaagaaatacgattttagataccttgttaaaatgggattttttcaaaaatactagattttagacaaaagtgcacaattttactat

SEQ ID NO: 213046 - DNA, 787 bp, Cannabis indica
gtccattataataattctaacaagtggtccattgaaagtgcatttatttatcatttttttaactcataccaaattaattaaaaagataaaatatagagcattgctattaggcattagtggtgactagcacctttgtaacatgtcgcgttgcgtttggctaacgatactccctaaaagttattatattaaattatatggaaccggatacttagttagaccaataacaatattgacacatagggtggtgctaggcaccactaatgccctttaacattatatgatacatgagcattgctattaggcatcagtggtgcctagcacctttgcgacatgtcgcgttgcgattggctaaggtatagcattggtccaatcaaatagttacataataaataaacatatacatatgtatatttaacagaaattttggaaatggctgcctcacatcgctatggctgtggtttgagattgagagagagaagaaagaagaatcaaatgtaggtttgagagtgaaaacagaaaaatcgtaaaaaaagaatcgcaaggatggcatttgtttttttgtgagatattatttgaaaataatttatttaaaagttaatcaagaatattctgtaatatagtgaaatattctattaaagttaacagaaaaattaaaaaataacttaaaacaataattatgttacatagttacctttatagaatagatatatatatagtggaggaagtgcacaagcacgtaactcctgttcaaatatttttaaattataatgatatatattacatatat

SEQ ID NO: 213047 - DNA, 595 bp, Cannabis indica
aaggtttcattccgaaaccaataggtaatggtactccaagtcacatctatgtggccgacctcttgttagcatgtggcagatgggatgttaataagttaaaaagcctttttgatcatgacattgtctctggtagtttaaaaggtggcaatccttcgggtcaaggaaaggacagatgaatttggaccttacagagtaatgggaaattctcttgtaacggcttatttaactcaagctttgaaaagagcgcctcattgtgaggtggctccatctctttggaataaactatggaatagcaaaattttggagtgacataagattctgtggtagagcatcctttccaatgcactccctgttagaactataattggaagcagatttcaaattgagaacatgagttgcccactgtgtggattaagggaggaatctattgaacacctatttcttacctgtgatttggcgtttcatgtttggagatcttcgccttggggtatttactcagtttgtgataacggcattcgcatgtgggactgggttaagtttatttggagtcttaaggataggggtatacgagttgaagaggtctttctctatgctt

SEQ ID NO: 213048 - DNA, 641 bp, Cannabis indica
acaccctactttctttgtttatttattagactttaattttttaaattatttttattttttagttgggtttttgtactagtaaaaatttttaataaattacaacgttcggttgagatggaataatccatgatataagtgaccaaaatttaatcttttgttaactacaattgttattaaaacaaatcattgtttgaataaatatattcattcttgaaacataatagtgttacctttcaaaaataaaacatagtagtgttgtttttttttacaaaattaaccttcattcaaaaagaaacttaaactttatggtcattacaaataatatctgttggaatgactgatacgtcaaccataccagttaagttttgagcataaatctacttagccacattatgagttgaaaattataatctcttaaaataaatgaaaaataacaacttaaaaattaattagagagtctattacaatgcagcatatagatccattcagagttttgatgactttttttgaatcgttctcaatcaacacaaattggtgcttccaaacagtcgatgtctcaagcaccaacaggcaagccgcaactttaccaatgaatggtcagagaaagtgaaccttttagtagcaacccacaaaattgtttc

SEQ ID NO: 213049 - DNA, 508 bp, Cannabis indica
tcgtcaatgactcatatcatgcagttcgtgaccaaactactactccttcgatccactgccccctttaaacctaaacgtacttttcttatggtagtcaaccaagaaagacaaagaaaccttgggtcatagatcttttcctcccatggctgctgcaacatccagcaactcccaagacaatgcccctgcagcaaatgcaacctccaaaaacaaacgccctcgccctcattgcacccactgccaaaaacccggtcactacaaggacaaatgttacttcctagttggcttcccacctggctatggcaatcacaaaccaagtgacaacccccctgtcaacacaaagaaacctgacactggtaatcacaccagaaatccccaagcttcacatgtttcaagcactgctgatgcatctactcctcaactcacacctgcccaatgtcaacaaatcatctctatgttgactcaacagctgcagcctactacagatccctcaacctccaatgacaatgtt

SEQ ID NO: 213050 - DNA, 578 bp, Cannabis indica
agtcttattattatcattccacaacttatcattacgcacagaccacaacacaatgcataacaactctatgtttcatctcagaatcccaacactgaaatctatcatgaagccaatccctaaaagagttgtcaccaatctctatcaccaaaatacttgttattcgccaacaagcaaaagcaaacgaacaccccacaagacaatgagaaatagactcttttactcacaagcaccttggacacaataatgagggaaaaggaacatatttcacgcccaactggacacgggtggaagataattggaagcagccctccaaatcaaatcctcgactttaggaggcactctcaaatcccataactctttctaaaagatcgagttaccgatttcaactaactcacatttaagcttttaaagaaattgatacgcactcttgaccgaatacactctagaactcaccaatccattgtcaaatatcatcagacattgagaaaaacaaatgaatgctcaaaataggctttacatccctctctacaaaaatatatttaggaacctcttcaacccaagacgactctccaatcttc

SEQ ID NO: 213051 - DNA, 721 bp, Cannabis indica
cccaaagagatattgaattaattcttgttgcctggtggcgcatttggtatcgtcgtaacaaggttgtgcatgataaggtcaccattcctccagaattagtaggtccttgggcggttaattttctccactcttatcatcaagaaaatagtcgggttactcccctttgtccaccttctcttgcttgctagctcaaagagcttccccctcgttggactcctccagcaaccacggtcttcaaagccaatattgacgtcgctctcgacgtcaacaatggctcttgtgtcctcaaattggtcattcgagattcgaatgggacagtatttgcatcaacgacgtggaaatgtgagtctcttcctcaacccgagtgggcagagacccttgctattaaacaagagtcttcacaatgcatatctcttggaattcacaacattcattttgaatctaactggcaaagattggttcataaaattaagacgtctacagtattagatttgcctttgggtttaattcttgatgatattagtgttttatgtaaatatcttagggtaaatagcggcataagtacccaaaattttatgtttgtaagcggcataaacttaatatttatttttaacggcataagtacccaatgattgtaaaactgtaattttcttccaatttcgtcagtacagactctgttttgaatttatataaagaatattttggaagtaactgatactac

SEQ ID NO: 213052 - DNA, 717 bp, Cannabis indica
gaagatcaacgggtggctatgttatttttctaggagggaacctcatatcctggtcagccaaaaagcagcaagtcgtggccagatccagctctgaaagtgaatttcgggccttagccaacacagctgccgagatcacatggattgcaaatctcttgactgaattacatgttccattgtctcagcaactagttatttgggtggacaaccagagtgcagccgccattgctgcaaatcctatcttccacgcgcgatcaaagcatatagaaattgatttgcactttgtaagagatcatattttagctcaaactctatctgttcgatacgttcctgcagtggatcaggtggcgatcttcttactaaacctttgtcaacagatcgatttctatatcttcaaggaaaacttcaaatggcttcaaccccttttcgtttgaggggggatgataatgacaaatgaattagttttacctgttactttttgttttaacagttgtaactgttttaactgactcttgattcttgattgtgactaattcttgtataattacacatataaataaagccttaagctcactgaaagatgtaaagcttttcctatcttcattctattttctctttgttctctctgtttatctttcatggtcataccatctggtttttaccttcattgaagattgttaagcttctacagcaagtgagtgagaagtttggggttgagct

SEQ ID NO: 213053 - DNA, 795 bp, Cannabis indica
tataaccacatcttactactaatctattataaatattataaatatcaatatatatatatatatataaaaaatagttgcattataaattggaagtattttttctttaaaatacatttctctaacaaataatataattttaggtaaaacaccacatcttttacaaaactaaatatttttttgtcatatttaattcgaaatcatatgtatgcatgttatgtgtattttttttaatttatttttactctttttttagtgctttatattttgttttgttttttttttttaatataaagaaaagtatcaacaaatttaggtggcactctatataagttttctcacctattcttaattttttcaactttgttattatcctaacaataacaacaattataattaatattcaattatatcttataataaatataacaatcaattatataaaaaaaatgtaacatattaaaagtggctatttttggtttaacggaatctttttttttttttaactgttagttttaacggagagactaactcttccgttaactattgcaattcacccaaaacccaccttgcgattttaatctccattgtttgcgctttctaaaaaaaaaataccattctctacaattcttctttcttctacgcatagcaaattctttttccaaccctaaaattgatactcccgtctctctatttgccgcactctattcaaatccatcatcgacttctgagtctcaagtaagtttgcatcaatgacatggatggtctagttttataatttttgatttaaaaattgct

SEQ ID NO: 213054 - DNA, 617 bp, Cannabis indica
caaccgttggttcttccacaaccataggagcaaccacttttccatatagacagcaagaagatagggcatttagagatgaaacacacggagataagttgatagaggtttcaatgcatgaaaaacacttgccttttaaaggagagttggtagcaataatggtctccataaatacccgactgaaagcagacaaagaaaaggaatatcaagaacctttaccaaccacaccaaatacacagaataactactaacaaacaggagcagaaacaaaatactaagccacccacacggccccactacagaagaaacgaaaaagagtcaactcagaaggctccaaacacaaaaactaaaggtcactaacggggagacacaatgaaccttaaaagcaaacacacaccagagagacacaggacaagaaaccaatactaagagaagaaaaaacacataaccttttcaacaaagaagaatacatcaaactctcactctcactctcactgtctcgctcataaaattgtcaaacctttgttagattactgttagtaaaacttagtgttatcctaaattctgcacaggaggatgatgtgacatttcacatattgacacatgaagaatattgagaa

SEQ ID NO: 213055 - DNA, 719 bp, Cannabis indica
ataaaaagagaaatatagcttatgaaaatataggagagaatatgatcattaaggatatatatcataatgaaagggtcaaacattttattccattgccttggtgattacttaagcccatatagagacttttgtagcttacacactaagttcttctcctttcttaattatccatttaaaaaaacagtggtcacatccatttgttccacttctaggtcaaattatgtagccatagccagcattattcttattgttttgtacttcactacagggggaaaaatctctgtatagtttattccttccttttggctaaagcccttagccactagccttgccttgtatcttgtaggttcatctggtttgttcccttatttgtgtttgaataaccatttacatgcaataacattcttcccatccggtctttatccactttccaagttctgttcttcattagagaacccatttcatcatccattgcctttgaccactttcccaaattcttatcttgcatagcttcttcataagaattaggttcaattatagatatctccatagcacttagaaaagaataggccagaacttcattccatgcattgaaactgaatctttgagtaggcttagaaactctcttgcttctatctcttgtgaattgatactcccttagatcttgatcccctttttcctcagcctattctggtgcatcttgaactgcctgatttggt

SEQ ID NO: 213056 - DNA, 600 bp, Cannabis indica
ttgaaacactggccgttggaaccggatgtttcaaaaaatgtaaatagcccctaaacagtctagcacagcaagtctctaaaaaaggaacagtaaaaaatatcctattcaactactaaatagccccccgcgactagggcaaagttaagtctctctgtggcttgaaaagtgtagttaaaaaaagggatttatatacaaaacaaaaaaaatttggaataggctggctggaatattacggttggacaccacgtgacggagaggatggacctacaccagacatccgccccacagtctccatataaaggccgtgaatggccttcatatttcggatgaggcgagactggcgagcactctcctcctccagttgctggttggcttgcagcagacccctagtttggaatttggcatccaaaagctcagcttagagggtctcattggtagcatctaggtcgcagtttgttgcctggacctgctccaactctgtcacaagtgcatcaacctccgtagtagtcttctctaccaatagcgccgcctgtcaaaaataaggcaaagtcaaaaaaacctgaagactcaagagcaggaggcagagaaaacagagtaaaa

SEQ ID NO: 213057 - DNA, 928 bp, Cannabis indica
tggatatgaatatgaattgttaagttcaaacagaaaagctaagagaatgaataagtaaattaattaattgaacacaacaataattgttacaacactagttgcaacacctaagcatgattatgagaaagaagacaccttattaagctaaagattaaattaaaataaaataaaacagaatcactttcaaaagacccctgtgatataattagttcagtgaatggcctcaatcaacgaagagcccaataagttgtgagtgaagtattgtggcataacaaaatataaactctaattctctaggtgaaatgaagcataagtgggaatcgattaccttcaaagaactgatgtccttctgcaattcaaagatctcaaattcttttagcaaatatacaaattagtcttcccccatgtcaaactttgtttcacacaatctgcttgcgtgaattaattcacacaaattactttgttataaactccaataaaaattacattaaagataagatcccacaacaactattctccacaactcatctccgcttatgacacaagtataaattaaaataatcaattcaaaattaactcaaatcaaattcaaaataattaaaaaaaaacaaaatccattatagaagaaaagtaaattaagtagtagaagaaaatggaaaaaaatggggaaggtgaaatagtatagttcataaaatgagatctgcactgagccgacatttctattgaaaatttcctcaactgaaatctccatctgggtacacatgatgtgggacaagctcgaagaatcgttgtctatgggcattggataaagaattttgtataataagacgattcaacgctcctatactaaaatcaaataagacttgaattcttatggatgacaatggtagtgtctgttgggttttatgccctaaataaaactcatttc

SEQ ID NO: 213058 - DNA, 736 bp, Cannabis indica
atatcctgacataagagagtcacatagagagtatcttgaaatgacaggggtaaaattagtataatgtttaaaaagagataaaaataataggatttaaaaaagagggtaaaaataaaagtggacaatataaaaagagtatagagtgtaatttcctccattttttacttgcacaccaaattttaacatttttatggagattaatttttttaaattatattttttttatgataacataggataaatgttttggaaaatttacacaatacaccaaaagaatagatttttttttacaaaaaaaaaaaaaaaacaataataagctgtaaaaatgtaaaaaatttgtcatttttgtatattaatgaaataatctcaatttatgtgaaaacaaccctgcctatttttgttttttttaaaaaaaaaaatcaaaaatcaaaacagagcattcgtattttttataattttttgttcttttatagtcaattataaaataaaaaaatcccaaaagtaaatactatatcttaaaaaatggtattgtttaaattaaaagtgatgagatactgctaattgaactgcactatgcggtttaagaaatatgtaaatattaaccatatcgcaaagagttcaaagttcaaattgtatttttttttattatattttttttttttgtggagtatggtgtaatgaagaccatctatgcagtgtgagtggtttggtcaacacaactaccctaccctcggat

SEQ ID NO: 213059 - DNA, 657 bp, Cannabis indica
gattaatttttttaaattatattttttttatgataacataggataaatgttttggaaaatttacacaatacaccaaaagaatagattttttttacatttttatagactttttttaactattttacagaccttttcttttacttacatttttatggaacaacgggttttcaaaaaaaaccactctgtattttttgttaaaaaactgtaaaatagttaaaaaaaaaaaaaaaaacaataataagctgtaaaaatgtaaaaaatttgtcatttttgtatattaatgaaataatctacaatttatgtgtaaaacaaccctgcctattttgtttttttaaaaaaaaaattcaaaatcaaacagagcattcgtatttttataatttttgtcttttatagtcaattataaaataaaaaaaacccaaaagtaaatactatatcttaaaaaatggtattgtttaaattaaaagtgatgagatactgctaattgaactgcactatgcggtttaagaaatatgtaaatattaaccatatcgcaaagagttcaaagttcaaattgtatttttttttattattattttttttttttgtggagtatggtgtaatgaagaccatctatgcagtgtgagtggtttggtcaacacaactaccctaccctcggat

SEQ ID NO: 213060 - DNA, 785 bp, Cannabis indica
agtgaggcccttaaagtggccggccactagagtgtatttttcctcattattttatcttttttaattcatataattaaatcataaaccctagttgaaatactataaggaacatgatgctctcattctcatccaacctatctcaaccaaactaaacctagttttctaactttgtcagatgactagtagatgagagactcatttatagtgatttcgactcctcttcccattctttatcaatcttcaagcctttagtgatagagtacctgcccatacatagcaagtcaagtactcaatcatagtgcggaagacggtggttaaccaaaccgaaggagagaaggagattcagcctcagatcttgttattactccagaacataaaggaacaagagttagagatctgagcggaaggagacatattatttcgctgccatcaatgtaagattttctaaactttatatgtgtttatttcattgttttagaaaatttatatttagggtgttaatcaaacatatatgttagtaaatctagatcctggtaaaataagttttaacaactggtatcaaagccatggtaatgatttactttcatgaaatatgaatttaaaacgatgattgtgatgatttggatgtattcatgttcgtttaatgtgcttaattgatagattgtatgttcattacaactttttgacaaaaaatatttatagtttcatactagaagtagttttttttagaaagtagatgaaaaattcatgaatttaggcttttctataactcaatttagattttt

SEQ ID NO: 213061 - DNA, 935 bp, Cannabis indica
ttttttgttttttttttttttgaatgaatcacttttattttatcatttgtgaataaaagtgatagaatcactaaagattgcagcaacagcacaagagagatattaagagtttgctctctgaatcctagtccaattgactaaacaatttgctaatgtattacacaaacgagaaacacaactaattttagagcaaccatgaagaagctgtctattagtgatattattcacagtctccccaatttgtcaagtccaggtcaagccttttgtagcctctaaattgcagaacattcagagccaatgttaaagtgcttgaggttcaaccattgagccagcttaagacccatctggatagctaagagcttcgccattagcaccgtgttgtgcgaaacaaaaacaatgacttacgattcaatttacctaaccaacaaacgcacaacacaatcaaaaaataatagggtaaatggcggcaaaaacccctaatactttcgttttagtttcattaaacccccaaaacccaaatttctgctggtaaacccccaaaattagtaaactgttagcaatttaacacttccgtccaaatttagctgttaactagcacgttggattgtccacgtggacacaatatatacgtggcacaattttattggtccacgtaaataattatttaaaaaaaattaaaaaaatgtaatttaaaattaaaaaataaaaataaaataattttttttctttttttttctttctttttctttctctgaaagatctcactcgatctcctctctctatctctcgcatatccctttctctttcttcttcttctgtcgacgtcctcctccacaaccagcgctgaacaaaaacctcctccgccgacttcgaagccccataacatgttggctctaactcctccatctcagatccgccattaaagccagcgaact

SEQ ID NO: 213062 - DNA, 994 bp, Cannabis indica
gaaatttttaaattttttacctttttactgtggagcggaatgttttttaaaaatactgtataagttttatactgtgtattgtgttaagttttcaatattgttccacgattattttttagttgtgtcactgttgttttaattattctgttttgttttttacggttattttataaaaaagatagtacttttgtaaaaaattctgtatgatagtaaaattgtaaatttttatctaaaatttaatatttttgtaaaattccctgaaatttttagagtttaaagattttattttttacattcatagggtattcataaaaataatacccaaacaaaaaaaaaaaacttcaacataaaaataataagaaaacaacattcaaataatatcaaaataacataaaaataatatacaaataacaaagaattaataattaaataacaaaagtactacataaaaaaataattttttaaataatcccaacaaagaatcatgtaactcaataacacaaaattaatgggcaatttacatgatatttttatactttatacgcttatatttatatttatactgtctattttatatattgtatactgtatacagtatgaaattatttatattcccttttttgctatttgtcacctcaagaagtttttgttttattataaaaaaaataataataaaatttgattttaattgggcttgtcacgtctatgggggtttctttaattttttttaataacaaacaaacaaacaaaaaaagagtgataaattactttctttaccgccattgttcttcccttcttcttcttcattttattttcatttttttttctttagattttaaaaatttcagccacgtttatgtgtagattgcagttgtaagttggttttagttagttattgattaattatttatttttcaaaaatgattttccctctaatgacccctcccccctccccaagtattgttgctttataaatattcttcttatttcattt

SEQ ID NO: 213063 - DNA, 590 bp, Cannabis indica
aaaaaaaaaaaaaaaaaaaaccaaattcagacaaagcaaaactttgacagggtcaaactaaaacccaactcaatttagattcaaaaaaaagagagaaaataaacatcagtggaaaaaagaaataccttggcggcagtgaaagcctcctccgactttttcagagtataattcttcttctcatcaagtgagacagccattttgacacagcaaaaacgacgagaagattgcgaaaactgagaaatgggtcttttagaaaggaacacgcttgaacatgaaatcccagctccgaccaccgcagcactcgtgttcgccatcttctctttctctctctctgtgcgtcaatggagtatggatcaagaagataaagtggctggtaaagagacaaccttttagattggcgtttatttatttatttattttcaacttttaaggtacgatgcggataatttatttgggctgggatgggcctgggcttgggcctgaagccgccgccttaggcctaagcccaattgaaactattattttgttgatataagatggttttggttgagaattttgatcatactttggtttatacaatgttatttaat

SEQ ID NO: 213064 - DNA, 1011 bp, Cannabis indica
tacttgggatgtagcatgtgatgaattgctatccaaatttatttagatgtaaaatgccttcattacagtaagtcacttaaaaaaagcaaataccataataatatgaaacgatgaaaatttttcatgaaaactaacctttgctaaatcacggcttaattctttgagtcattgccaatgaatcccgtccttggagagtctcatctgcataaagaacaatatatataagcaaagctgctccaagttcttaacattcattacaaaaatatcttatctttatcaaaagcaaccaaagaacaatgcttttatgtataatgtgcataaaatgaagtccctaatatcttcgaatttcaaacaatgtagtatcaaagcacagaaaattttccaaaactaacttcaccaattcccttgagaaaaggaaaaaaaaaaaaaagccttcaccaattccagttcaaaacttgtcctcccaaaattcaaaatcaacaaaaccctaaacccctccccaatttgttttcttcccctttttaaatttcaatctcaaattacacacgaaccaaattcaaaatactaaaccctacctagctaaatcacctcatttctcctctcagaaaatccaataaaaccctaaatatatcaagacccatgtcgtaaggcatcgaattgaagaaggaaaaaaaaacaaatctttatcttacattgtcatcgagggcagccttcaaacgcaaatcagcatcattttggttgagttggatacgagaaagcttatcctcgaggtcaaaaatgattttatccttctcgtaaagcttctgcttcatcctccccacatcggtctcaagtttcgatactctcgaagctatagccatggaggtaatcttccgagccagatccagctggtcataaggatccgtgggtatcaccgccaatatctcgtccgatagatgaaaatccggtccaccaccgccaccgccaccgcctccgccgttactacttccactgctctgcgacattattccc

SEQ ID NO: 213065 - DNA, 531 bp, Cannabis indica
aaaaaaaaaaaaaattcaatctccatgatttttcaaattttattcatacataaaatcgatctaaaatattatattaatgtagtaatgcatatgagattcaaaatgaaaaccgaaaaatgaaaataaaattttttcgtatacaacgaacgaggaataaaatttatgcatgtatgtatatactagatgagagttacgtagcaagccacgtaaatattagttttatataagttctagtagtttttgtttaagaatttagtaactaagcaacgacaacaataatagtagatagatctatttaaatttttcatatttgtaaagattatttcgtaagacctcaatgttgtttataaccagttttggctgcccaacatgatacaaaacatcagacaatcaaaattcaaggaaaataggcaagcactaatctgaacaatacaaattcattcaaattagcattgcttattctccttcctcttcatccaaattgttcaaacaagcattgagaattatgatataaatcaaatctagccaaac

SEQ ID NO: 213066 - DNA, 635 bp, Cannabis indica
caactcttggtgagttggctattgtcctcaatgtctgaaagtctcctcactcgcatggtgggatgcaacaccgctcgacagatctggaatgcactcgaaaagcacttcacacttcaagtctcctccaagatcttggaatttcgaaccaaattacagaagcttcgaaaaggttccatgtccctcagtgactatctgttgaaagttaagcaacatgttgacctccttgcctctgttggagaagttctgagctcaagggatcatattgcggccatcttcaagggactgcccagtgagtatgacacatttattatctctactaataccagaattgaggaatacactatttcagaaatcgaagctttactgttggcctctgaatctcggattgaaaagattgatcttgatcaagatgctgatctcagtgcaaatcttgcaactattgaacttgatcaatcatttgaggccaatatcgcataccagaacttcaatcgtggcaccagattcccaaatttcaatcgcactccctctccttatggcacaactcgtggtggaggccgtgggtactcctctcgatcaactcctacaggtaacaattatggatcacctaatttcactaacagtcgtggtgtttccac

SEQ ID NO: 213067 - DNA, 633 bp, Cannabis indica
catttggtatcagagcagccgtttctggtgaatgccgtcgacaaggatggagaaaaaaatcgagggaatcgaagaaggattggacagcgtgaagaatgatatacataacattaaggccatactcggggagttcaaagaatctcaggatcgaacagtaacggggttagctgagcagatacgattgtgcttgaatggtcaagcgaggatggccgacgagatgtgcgcactccgggagagccaggcgccgacgcagagctccggtcgacgttctgtcaacgagagacctccatcgccggcagtgttcgggtcgaatggaagagacagcgatggaggacggcgttcggagtttcgggctcggaagattgaactccctgtgtactccggcgaagaccccgacgaatggacttacagagccgatcgatacttcgggttgcagagattgacggcggcggagcaactagaagcagcgattatgtgcttggagggggcggctttgaattggtttcgttgggaaaattccagaaacacaatcggatcgtgggaagagctgaagttgatgctccttcgccggttccgatcagttcatgaggggtccctttatgatcggttttttgctctccgccaaacggactc

SEQ ID NO: 213068 - DNA, 477 bp, Cannabis indica
atgtttggaagttggaattctgtggaaagaaaaaagtgtctaaaaaattaaaaagaaaaatcaatttttcatgtttgatatgaaaaatttggttgaatcaactttttttcacatcaacatgagcaagtgattattttttttcactttttttacccaatattttccttacttctttctttccccactaaaatccaaacataaccttactgaagaagaaaaaaaaaccactcgatacacaacagtacaaactggtttcttgaaagaattagagacctgaatctttattgctatcacaagaattacaaaagttcccaagcacttggtgaagcttggaggtctctctgagtaagttttactcaattagaacaatcaaatcagccttcctatttatattaactaacacttaatgtctttaactaacatatcagcattattaactaacacatcagcactaacgggacagctcactaataagac

SEQ ID NO: 213069 - DNA, 944 bp, Cannabis indica
caaagccgattccagcctcttcttcaccaccataaatggtaaattgatactcatcttagtttacgttgatgatattcttatcactggagctgatccctcacatatccaaggtttaatcactgatctcaacaaagcatttgctctcaaagaccttggccctgtgcaatacttccttggatttgaagtcaaaagaacagctactgcaatccatttaacacaacaaaaatatatccgagaccttctctccaagactcaactccttgattccaagccccaaccgacccccatgtgtgccactactaaactcactgctgcatcaggaacttctatgaccaatccaacagtttataggagtgtcataggtgctctccaatacctcaccatgacacggcctgacatagcctttgttgtcaatcgattgagccaatatatgcagtccccaacctcagaacattgggctgcttgcaagagagtactgagatacctcgctggaacaacagatgctggattactcttcaaaccagcaacagtttttgatctccaaggcttcacggatgcagattgggccgggtgtcatgatgaccgaaaatccacttctggctactgtatatttctaggaggaaatttgatcagctggtgttcgaaaaagcaaaccgttgttgctcgctcaagtacagaatctgaatatcgagctttagccttggccacatctgaactcatatggctgcagtcccttctcaccgaattaagtatctctctacctcaatgtcccattctctggtgtgacaatatgggggcaggatccttggcttcaaaccctgtgtttcatgctcgaacaaagcacattgaagttgacattcactttgtccgagatcgagtcattgcccaacagcttgatgttcgatatgttgcctccgcattccaactagcagacctctttacta

SEQ ID NO: 213070 - DNA, 1275 bp, Cannabis indica
caaaagctcgacttccttggaactgacaaagaaggccttcgacaacatagtcataaattgcgaagccaactctgcagagagaggcataagttcctcagaaggagtcctatcaacgtttgacatgaactcctcgcccacgaacttctcctgaagaactagaaaatcacaagctcgaacagctggattgatcacgactttcttccccttgtcttgtgacgacctcgccaactttttggacgtatcagcagctggagtaatcacgatgtcgcttttccttttctgaggaacgacaggagaagtcgtcgttgttccggtcttcggcttgcgattgagaacaggagcttgcttcaagaaagtcatttctgtgaagacaagaagagataagttaaaatataaacaatgactcatatatataccgcatatatgcgatgtgttacctaatgttggtcgagaggtctgtttagaaatatgtttgtctatcttctccttttgcttctcagatggctccttgtatactggctcccgatgaaggctggcattctctagaattaacttgtgttcccgcagcttcaaggtcgtgcacagcaatcgccagtcgcgatcttgaacagagaggcaaccgagaacctcagtgacttccttggtagccgagtctaatacggtcgagttggtctatctgcgaacaataaggaagagcgtgttagataacaccgcaaggtaacgtgaaaattaaatgtgtaaagtgtgcaacgaactaggtcgacgattaaaatcggtcctaattcctggtactttaaacacataaaaccacttagatttccagtctcccatattggaaaccatgccttccaccccgttgatttcagaagtagccaaagcaatagaagtcgttgtgaaggcccacactctttatgtcaataaaaatacctgaagtcctccatcgatggctccctatgtgcatactccatgtacatcgcataaaacccgagggctatgcgataaatatttggggttaattgaaaggggggatacatcatatcgcttaaggatagcagcgatgaatgggtgaaaaggaagcgataccccatagcggagaatgggtatagaaacaaccacattctctataggtattatcgcaggattggtgaaaggtagatgcggtctctgggtaggacgaggacgcatggtgctgaggcgtagtagatttaaacctagtaaaggtggttaggtcagacttggtgactcgcgagattgaatcctcgcatgagaagggct

SEQ ID NO: 213071 - DNA, 582 bp, Cannabis indica
tatttggacatatatattagaatattgatttttaattaatgatatgtgcatataaaatatatttaataacgtggtagtatttttcaatcaatgagatttttaccctcataaaaaaatataaaaagcatcaccattagagtgtcaaataggtagtgtactgttatattttgatacttttgtaaaaatatctttctctcctgatgtgctaaaatttgtctaaaatttagtacatgttaaaagtttggcaaaatttaacaaaatatgtaaaaattatattatatttggcacaaaaaaaaagagttttaaatatattttatattatttttatcccatataaacattttttctcttataaatataataattcaacccaccaccactatggtgtctcatttatacccaaaaacccactcattctatccgaaatctaaaaaattggggaaaaaaatacgagtttaaaaaattagaggtcgggttcgagttttattaagctgaaaacccaaaaaaaagttatacccgaacccactctaaacttgaatatatacattttttgaaaacatagaacttaaaaaaaaaaaaaaa

SEQ ID NO: 213072 - DNA, 675 bp, Cannabis indica
aaccacccagcaaccacccagaatctttcgtctgaatgaaacattcgtctgatgtaaccttcgacccaccacctagcaaccatcgtctgattgaaaccttcgtctaatgcaaccaccgcacaaccacgcaataaccactttgcaactatcgtctgattgtgtaagtgatgatagtataagtggtattttggtaattaaaattacataaaaagtataaatgttgactttactttatggaagtatttttgtaaataaaatatcaatttatattttctatggaaatattccatgaaataatgggttgaaagaagttttttttttttggtaaagtgagagaggtttaagatcagggtcggccctgagtttaaatgtgctataggccaaatttttttttgagcccttactataaatagtattttttaaaaattattaaaaaaatatatatattttttaaaatacaatttttttatttgggctcctaaaatgagtgggccctaagcggaagcctagcccgcctatacccagaatcgaccctatttacgattaagtttggaaagttaactacctcaaaatctctaaagatttacaaattatctaatacattggagttaaaatactagagatagcatttaataatatttatatttttcaatttttaatcacaaaaataaaaat

SEQ ID NO: 213073 - DNA, 726 bp, Cannabis indica
gtgatctaggatcaacttagtgatattgaattgaatagatatttacggtaagtttcataaatctatttcaaagttcaatatcggtccattccaatgcatactccatgcatccaacctgagctttactttaaccaatgttctggaaagaacatagcatttctccaaatgcaagtaaactctgttgtagattgtcatatcagtaaaacccagtgttctgataaatctaggaatactttattcacatagtcatgtttactttccactgtgttgacaacacaataaacatgatcaagtatgtgaaaggggtttggatgaatttataaatcaaatagacaaacaattgattaagtgaaccaaaacatacacaaatgaatgaaaaatacttctgttactttattgatattgaataatctggattacattgaaatagagttttatttagggcataaaacccaacacatacaacttctggtgtatacacggttaaaagtggtttccaccttgctactaatcttgaagatgctgataaagaatcttcctcgagctcccataaaaactggtggaaattattttggaatctcaaactactgccgaagatcaagatttttgcgtgcgtgtaattcagaactgtcttccggtggttgctgtacttttcaagaaaaaagtactcacttctgtagcgtgctctttacgttcacaagcctgggagtcgattggccatgcttt

SEQ ID NO: 213074 - DNA, 1177 bp, Cannabis indica
tcaagactttattccactcacaagttcacaacacaccattgtttacaaataataataatgctaattagtaatttttttctcgcactttgacatgtaccaaatcatgtcccttgaacttttttggccgttaaaaattctccctaaactattgagattgttagatttaaagacttttgtctaatttcattcaattttactgtttcagtgaatgtttatgtaataaacatgctcccaaaccttgatatctaccaaatcatgctcctaaaactttgatatatactaaattatgccccttgaacttttatccatattagaatttttttactaaaattagataaaagtccttaaatttaacaatcttaatagttcaggaggaatttttaacggcaaaaaaaaattcaaatggcatgatttggtacatatcaaagttcggatgaaaaaattactaattagccatattaatactacttatttattggttaaagaaatattaagtataaaaattgagtgggtttggtcttttttttttgttttttttttatttttttttttgcaaagtgagtgggtttggcttttcaaatttgacggtcgagtagagtaggtgatccagcaccttcaaatgataggaaatcccaaaaaaatgaaacaccaacgaacattaagggttgtatattatataataagatgtttaattaaagtgggaactatctattactcaactgcaaacaacaatgacatgacccatttttttcaaaacttggaaactaacattgaaatagtatgtgcaaatgttgcatttaggattttaagcaaaaaaaatgttgtatttaggataagtcgtaatgatataactactgctatggttatatttgtaggtattacgtacaaatgggaccacctaaaaatgagttgttgattaaggtacaattcaagcaattttgatttatctctattatattttcagatttgaaaaagacattgggtaagtaagtataactaaacttataaacatatctcatagcttactggcaaaacagcatacctgagatgggccagaaattataaaaaaaggtccaatataaatgggtcaatgatttatagctaatccatttctcttctaccatagcttaggccggtcttgaggttgtggccatagtccatggatgagtctgatcag

SEQ ID NO: 213075 - DNA, 606 bp, Cannabis indica
agtataatcgttaaaaaagagtttttttttttttacatgtacagattaacttggaataaagaaatagtatatattcttattattcatttatttattattttttttacagttgattgaccaagctaattagaacaaattagtatcaaatatgaaaatatatatacatataaatacatattagaacaaattagtactaaatataaaaaaataaattactaaagaattatttataaaattattagtttaatgagaataaaaataatagtaattaaaaaaccaatctgtagttgctttcctaaaagtgtgatgtgtatcaaaaaaaataaataaataaaatacatatagtgacgtgcaatacgagttattgttatctctacagccttacataagtggactctaaataactacagtgacgcgtgcttagagactacaaaattttagtgaccttaattaatcgaatggtaactaaatattatctttccagtcacccacattagtgacccattgtgaagggtcactaaaaatatttagagtccttcctagtgggtcactgaagtctatttttgtagtagtgattgaaattgaaattgtatctctctctctctc

SEQ ID NO: 213076 - DNA, 563 bp, Cannabis indica
aaggattgtgtttttgtgttgttaaacgtgttcacacacaacgaatactgtgtgaaatcagtttcattggttaataactttatgtaaaacaacagacttttgtcatccttgatttggagtggttggcagccttccttcagttggtatttcagttgtatttgagttgttttatggtttcattttagtttctccatcattatatgcactagtttagcaaaagtgcaatctcttgatattaattctccacttaattcgtaatcaacatagtggttgttgtcatcccaatgatcattgctctgtactaaaatttacaaaggtttcatgcctgaaactagtgtattaatttttctatattgttaagcaaccagtttaatacatgagaacaacgtataaacaactattacatgacagtaatcagtaaatgaccttaaatgaatcactatttttttttaatttaaattatttgcaccaatttattcagatcaaccaattttcagtatgaatttgctttgatatacttcagaaacactaaattacaagctgattacgaagaaaaatattta

SEQ ID NO: 213077 - DNA, 775 bp, Cannabis indica
cccgatgccgcttcgtaggctgctaatatattcttgacttggtgacattcttccttagttgcctccacaaaaatcaagctgtcgtctgcaaagaacaggtgagagaccgatacaccatttctaccaaacctcagcccatgaataagacccttctcttccgcatccagaattagactagacagcgcctcggcacagaacagaaagagaaaaggggatagggcatccccttgtcttaggcccctcttcagagtaaaaatattcgaaggtcttccattaatcaacaccgagaaagacaccgaagagatacactgagaaattttcctaacccactggctatcaaatcccaatttcaacatgactgcctccacaaaaggccattccactcgatcatacgctttcgacatatccaacttgaaaccacttttgaaccattcccaaaccggttacgcttcatacaatgaatcccttcaaagccgacaattgcattatcttggattattctacttcccacaaaggcactttgaaactccgaaattacctcattcaaacacatcttcattctattggctaggcacttggagataatcttatatataacattacacaggctgatcggtcgaaattcctccatctttgacggtttgtctactttggggattagcgcaataagagtgtcattgaggtgatccattggcgcattgttgttgaggatgttaaggcaaacccgaatgatatcacctttagtaatctcccaatacttctggaaaaagaggcc

SEQ ID NO: 213078 - DNA, 820 bp, Cannabis indica
cttcataacggtttctactgcttcagcaaatgggccaccttcgagattaccggggtagaaggcatggtttccaatatgggagattggaaatctaaatggttttatgtgttcacagtaccaggaattagaaccgattttaatcgtcgacccagtacgtcgcacattttattacttagttaatatacatgttaccttgtgttttctgtctaacacgctttttcttattgatcgcagacagaccggctcaacctgtattggacccagctcatagagaggtcgctgaaaaggtagcctccccgttcaagattgtgactggcgattactatgcacgactttgaagttgcgggaacacaaactaattttagagaacgccaaccttcatcgagagccgtatatagggaaccgtcagagaagcagaaagagaagatagacaagcaactttccaaacaaacctcctgtccaacatcaggtaacatatcgcacatatagacttatatatgtatatgagtttatttttttatttttaacttatcttatcttgtcttcgcagagatgactttcctgaaacaagctcatgagcttaatcgcaagccgaaggttggaacagtgacgacttctcatgtcgtccctcagaagaggaaaagtgacgtcgtggttactcctgccgctgactcctccaagaagcaggtgaagccttcgcaagacaaggggaagaaagtcatgattgacccggctgtcaagacccgcgactttgtgactctgcagggtaagttcgtgagcaacgagttcgtatcgaaggtggaagcgaccctccccgtac

SEQ ID NO: 213079 - DNA, 877 bp, Cannabis indica
tatatatatatataccgatctgatctcatcgattattcttttttactattatagatatattctcatcagatctctttactgccacactgatttatttgatggattaattgattgatttatctatatgtgattgcattaactactaaaatatatcaggtaaaaaataaaattatagcgaatattattattacacaataagttaaggagcctggatagaagattgtacatggcttacacacttttcttttgtcttctttacaaatgctaaactagaacaattatacaatcccaagatatataccaaaaaccctaatttggccaactcacttttgaataggacgaccatcagggcacatattttaagtacattgtcttctttggtaagtatatttattaattctacttgaactaattatatgttatcaactcatgtagcctctctacctctccttgtttttttatttttaatattcacaacacataaattaaagcttctcaacttctttcattctctttctcacgattgatcaggtacgtatatatatattcttttaattgacaagatttggttggttaaattcaacatatattctacaaaatttgtttttgttgtttttatgataccttttccccaaaatttgtctttacaaagattttctagattctgtgggtcaagcaagtatgtaatctatatttgatcgattaatttattaaaaaaagggacgaataattgagaaattaggcaattgatcattaacgaaaggtgtttaaggtttttaattggatatattttattctactttggctagcttcctgtgctttcgttactattaatggagtatatttattatgattgtttgaagatctcatcattctg

SEQ ID NO: 213080 - DNA, 858 bp, Cannabis indica
aaacacaaacttcactggaagaaatggaaatttttgtgtaactccaaaagtattggggggttaggctttcaatctctcaagccctttaatcaagcgatgcttgccaaggaagcttggagaattcaaacaaaccagtcacctcttctcaaccaactctttcaagccaagtacttccccagaacttctttcttagactcatccctgggacactcaccatcatatgtctggcacagtattcattggggcaaatcacttctcaaaacaggcctatgcaaaagaattgggaatggtgctaacaccaatatccttgatccctggatccctaaccaccgtttcattcctacccaaatcccaccttccctggctcatgtttctgatctccttcttcccaatggggattggaatatacccttattacaaacacatttccagcaggacaccgttaatgacattctgtcccttcctccccctgataactcccaacaggattcctacttctggcagcacaccccttcaggccactattctgttaaaaccggctaccatgttgcaaaatgatccatcaacttgacacaaccttcctcttcagacatggaagccctttcccggtggtggaaatccctctggagtcttccaataccccctaagattaggcattattttcaggcttgctcagaaatccattccaactgctgaaaatctttatcataggcactgtcttagctctcctatttgtcctagatgtaatctctgttatgagtcggtacaacatgctttatttgagtgcaggaatatgaagaaggcttggtcaggtacgttttttaactctgccattaaggataccaaacacttgaacat

SEQ ID NO: 213081 - DNA, 599 bp, Cannabis indica
ttctacaagactccggccacgacgttacttggatcatctccgacttcgtttgttactggctacctccactcgccagcagattcaggatcaagttggttttgtttgccatagtaaacgccacttcatttgccttatatttaccgccgtcagaaatgggtagcgattaccgcagaaaaccagaggatttcacagtagttcctaagtggtggaatgatatgccttacgacatcgcttttaagttgcacgaaatggagaatcactggaagggcatggactcagatgtgtctgattttcagcggttgatggaggtgactaaggattgccatatcatactcatcaggacttgcccggacttcgagcctgaatcacttagtcttctcaagactcttcacaataaaccggttctaccaattgggctgttgccaccgtctgaaccacgtgacgatgaagatcacgagagatgggaagctctgaaactgtggctagatggcaaaaagcaagtcagtagtttatattgcgcttggtttcgagtttagcctgagtcaagaattgatgcacgagttagcttttggaatgagaaatctgggttgccgtttgtt

SEQ ID NO: 213082 - DNA, 1108 bp, Cannabis indica
atgttattttaatatctaatttgatcgaattggatattgagtagagctttcaaaaattcaatacattcaacatctaatcgaactaattagtattttaatttagtttagatgagtaattaaattttatgtgtatatatcaaaattagaattaaaatcttactcattttgtattggatagatctaatccattctaatacatactaaatctaaaatattagatggatctcatcttaattaaactaatagatttacatgaaatacatagaactggtccaatccaacatctaatagatattagattactgaaattaattggatcaaatcggattgtaaaatttaacatccaatatataattgaatcagatctggatataaatactcttaataataataatttgaggtaataggaaatgagtaagtgttgaaagatatattgatgtatgaatcaacctaattcaattataattatttaacttaattaaaactgatcatatttaattatgattggagatacgatattatttttatccaaattgattggattaattagtggatgaagtgtactaaaaattaatataattcaatatttaactcatttgagtaatgcttttataaattttatgttgttatatttaatatgtatttaaaattaaaacttttttataggtctaattcaatctaatttaataaatattatatttaaaatattgaatgaattcgatctagaaaatattaaatcttaaacataagataaattcgaatcaatttaataaatatacaaaaaaaaaaaatactcaataataaatagaaacattccaaattaatatttcattaaattagatcagatcatatcggttttgaagaataaaattaattgaattaaaaatcaatcctctaatatataattgaattgaataaatttaaaaatattcatataataacagtcacacaaattattaatgacaaatggggtaccttgtaattggaaatgtccagtcaactaatggcagcccaaagacctgtaagaagtggaaaatgtttagattttcgaaacaaggaagaaaacgattacatcatagtctagtgatatactcaaattaaaaaatga

SEQ ID NO: 213083 - DNA, 647 bp, Cannabis indica
tagatacaagttattactaatttttagttacaacaagcattgtgactaaaaacacatttcatcataataaagtgtgattttgatgactaatacatttagtcacaatatataaattattatttataattaattacaatttttttttatttttagtcacaagttttgttgtgactaaaagtaacaatttttttttgtagtgctaagaaatacaaacggagacatgcaataataatagaatttgttaatttgaatatgtaattatcaaatatactttttttttttaatatttgataatttattataaaataataaatacaaaatgctatttatataacaacttaccaacaagttgtttatataattataaatgttaacgagaaacattattatgcttaattgtttagtaggcagtaaggtagccagagtagctttcattgcataaatcatgagaattaaaactaaaatattgtgataattatatgtatctaccttgagataatgggaatcttcacaggcatgacattaggattaacaccatgctacatcaacctaattaataccaaaataatattgctagggtggttcaacttcaagttgacataacaacttgcatccttaattatatcaattaatggcaggatccccat

SEQ ID NO: 213084 - DNA, 1244 bp, Cannabis indica
gctaagctcatttctattaggtcggtacttaactcccaatcgtcaatcctgattggcatagaccaaatccaccttttggagataacaaactcttcgttaggtaatagggatcgaaaccctgattcataactatcgtgcggtctatccaatttactaaagaatctggctgccacataagaatgagtggccccagagtcaaacagcacagaaaaataagagtcattgaccgagagctgacctgtaactactgaagggcaggcttctgcatcagcctgagttatggcgaacaccattgctgtagtgggtttcgttgcagtctttggtgcttcagttctgagttggggacaatccctcttataatgccctagcatgccacactgaaagcacccctgccctttacactcccccagatggtgcctttaacagctggggcactctagataagtgtatcgggtttcagtgccgctctggcgattgcctcgaccctggttccctcggaaactcttgttctaacttgagccactggttgcagtggatgcctttcttttctgatccatggccgaaccactacctccccggctaaaacctgatgtaggaggggtaggagcgttgccaacaactagagtcccaccagactctatcatgcatccaactgcaccctcagctcgcagtgccttgtcaaccatttccgcataagtggttttttcgtcagtagtgatcattagatcgtgtctaatttttgcatttaacccatccaggtacttctccttcttactgaaatcggtgggcacaattctcgaggccaaccttgccaagcaatcagactgagtcgtaaactcagtaacactcatgttttctttctcagtcagatgggtgaattcttttctcttggcacttctgaccgctcaccgcctcattataatacttgacattaaacagttcctggaacttctcccaggtcattgttgttaaatcatgaatcatagacaccatgtcccaccaaactaaagcgtcttcttgaaattgaaaagtggcacagaccactctatcattacccgtgacacccataaaattgaagatcctagtgatcacaattagccattgctcgactttcataatagcagggcctcccaagaaaattggaggtgcctgcttacgaaacctttcatacaagggttccatccagttcattggaacccccggttcggcctgcacaataatggcaggagctacaggtatctctg

SEQ ID NO: 213085 - DNA, 527 bp, Cannabis indica
ttttgaagagaattagctttctttgatgatgattattcggattaattattggtataatcttcagcataatacattatatatgtcttaaattaaaagccaagactaacgtagggttatatacacaagtgagccctatataatacaaattgttattattattgtttatattttgattacttcagttattaatattagtattaatataaaataatttggagttttgatgtttaataaattctataattattgtaatttattttgtaattagttttaacattgttggttttaactgttaatgttagatttagtttcggtgttgattgatcggtggtgattccatttgaagaagttaaggctatctttattagagttggtaagctactaaaactcttattcttattaatttaaatatgtttgaagagtttgaatattttaaataaatagatattcatccatagtgaagtaggttctgcgaataaataatatactatggttgaatgggtagattatatatgcatgttagatga

SEQ ID NO: 213086 - DNA, 632 bp, Cannabis indica
gcatataaagtttgtttttcatctcttcctcctccaactcttactttcttatctcccatcttttgtagataaatactggtgatttttagggaggcaaacaccacatcaactaggatttactccaactcttatacgaagaccaccctcgactccgtgctagttcatcttcatccagtgataatctctcaaattctagctttgaagactgagagaaaagtagtgaacacatgccgtctacatagcccaaggtacaacatcaaaggcctaactaaatacgtggagaaaggtacatacacttcatctgggagttaaagaaaggttggaggcattacttgctcgcttcttggatgtatagggttcaacttggtgttgttgatactctgtccaaagccatccagccccatctactatgggaactactgtcgctgaatttgttgtaaccgttgctcagcatacaactgaactcaaatctctgcccaagcatagagtgatggcgctaacaacgtaaacaatgagaaaagcttcaaagagtgacccctatttggctagactatttgcgggggctggtgtggagcaagccagacctttgattgaggaaggagagattgttgaaggggactttgaagtctagg

SEQ ID NO: 213087 - DNA, 700 bp, Cannabis indica
taactttttctacatcaaataatgcatgctaatgagtaaatcataaataatttgaaatcatcgacaacggtaaagttgttgacaaaaaaaagtttggatgtctctaaattatggagaaatattaaaaatcgataggtattgatgttatctattgatgttactgtcgaggtgacatgcatacatcaaaaattaatagttacttaaacttaaagcaaataaaaaaataaataggattagagatagatagagaatcttcataaaaattgagaaaaaataataaaaattattatatatagagcgataaaaatataatgaagaatggagattatcacatgagaatgagaaaaaaaaagttacaatagctttttcatcacttttcatgaatctcaagtatctatcattaaaaaaattatcttttttacatcaaataattcacgctaatgagtaaatcatgaataattcgaagtcatcgatgacggtaaagttgttaatcaactaacagaatgttaaattgggtgttaagtttagaaatttgaggatatcaataggaactacaatgatgatatcaattttatatgatcgagatataaaaataatgcattatgaaaaaatttgattcataatcttacacctgtttcttctacatataacctcacacctgcttttttgttgttcagttcataatgtttgattcataata

SEQ ID NO: 213088 - DNA, 639 bp, Cannabis indica
ataatatataatatatatatgtacggtcggttttctattgacactgaaaccgaccatattaaggcggttttaaccgaagacagtttttttggttttcaattttttcggtatcaattttttcggtgttcggacgatcggtatactcggtttggtcggtttcttacattttttgctcacccctaagtttaggacctgaatttatgaaattcttacatattattattccttagttgaactggagaggaattgttcaatttttggttcctttccattattttgtaaatttctctatctaaatttgatatgtatttatttttcaagttaaaatctgttaagagcctgtccataagaggttgttttggctgatgatttagttgatgttagttaaattttattgattgtataaataggtgaggcgtgcaatagagtttttggcggaaaattagaacgaaaattcgagggaggctcttgaatcaactaccccttgtactgtgttgttctcaaatcttgacatttcttactactttaaagaggaatttcatatctatttgtggttttcttgctcggttcttattagaatatattctcaataaacaaaggcgaacaatattacaattagaacaattaaaaattatgttt

SEQ ID NO: 213089 - DNA, 385 bp, Cannabis indica
tagaacaattaaaaattatgtttcattgtttaattatttaatatttatagtttcataattttttttaatttttatttattttaatttaaaaataattgataaaaattaaaattaaataatactaaatgaaaaaaaaaattaaattacaaaactttaccagtttactattgtaatggtaacagtcaaatatccatctatcaaaaatactttttctcagtgttttaatgcgctggtaaaataagacttttcccagcgcacatttttgctcgcaaaagtttgacttcttccagctcgttaatgtgtaaaagtaagacttttcccaacgtagatttttgctggaaaaagtctaacttttacaagcacattcatttttgccaacgttttt

SEQ ID NO: 213090 - DNA, 726 bp, Cannabis indica
aaaattgggagtgcttcttctccataaaggtccaggtatgtaagtacttatcttatattgaaccaaatacgtaaatatgataataggaaatttctgtagactctcttgaaggttgctttggtagcccatatttgtttcggtggtatttaggagagctttttagtttaattttttattattgcatacgttgtaacttcttatgatcatttataaatttttagaaagtgtcgaatagtttatagtgccgaaaataaagtttaaacataaatttagtagtcgcacatgtaataaatatgtaagacttattttcaacattgcaaactacttgaaattttttaaaaatttacaagtagtcataaataggtacaacgtatgcactcaatgaaaaaaaaaaactaaaaaactctcttgaatgccgaaatatatagcaggtctatcgaaacacctatttaaggagtgcactgtagacttatcttgtaatatatacggtgggccaaagtttgtttgatgaaatttttacataaaaattaataaacaattttatttataaaaatacttttataagagtatctaaacttttatacctataaatattaaaaaaatttctttttaaacttttatatttgcaaaaatatcatttcatcttccctcactcgttctacacttctcactttcaatggcagtcacttccaatctcctaccgttggaaatctcgtctccaatctc

SEQ ID NO: 213091 - DNA, 538 bp, Cannabis indica
tgaataatttgactgattcttgagtatataagatttcctgtaatataaaaataaaaagataagggaggcatacaaagtttagagaagaaaaacagtgttcaatattcatgaaaatgaataagaaattaattatgaaaaatacctattggcggtaagggtccaagagttcttgcaggctttctgtatagagtctagtctgctcaatgttttttgtgcatttgggtcattggtgtcaacctgtggtagccaatgataataatttgattttaatatcgaaaaatgaatattaaaaaacaaaaaaaaaggaaagagatttgcatattaatcaaaaccaccattacaaacaaggctcaaaattataatccacaccccaagaaagttttttatgtttggtggtaaggaaatgagagtaatatttccaatggagataaatgatagagcacttctctaaatgaatgagagaagaagaccaaacatcctctcttttgattggttggagcatatggaggggaaattaggagattttaactgtagaatg

SEQ ID NO: 213092 - DNA, 815 bp, Cannabis indica
atgtacaaaaacaaactaggaaatccttaagaaagtaagtaggtgtggctgccttttataggttgcagcagcttttccaaactggtgaagctccaaccgaattaactgcctgcttgtcacttaggataggtatttgctgacgtggcagggagcaaatgagtcaaatccaccacacgtatgatttgagtagagggactatcaatatgtaaacgcttcttttaatggtagaaattggaaaacaaactcgacatcaaaagttgcatgtatcatttgtgtttggaaactaattcaatcattaatatatgcaatgtgcatgtattaaaaattatgtaaatatacataatatattatatgtaatgtgtagtatagttcctttaaattaaaagatctccaaaagttatttgagttatagaaagttagatgtcatccgaaaagtacgattctggaagttgaacttgtcaattcagaagaagtctcgtggaatgataggtgtcatctggaagggcgttcttggaagtctatcatgtccattccgggtggagtcttcagaaaagttagtctttcttcagaaaagagttactaggatggctagttgttccctcctagaaaggagtcttggatagtcgacttccagttgttgctattacatatccgggaagtcccttcagtgtaatactttgttttgtcttttctaaaagcgtacatctaatctggaagcactttaacttaagctaacgtgaagatattgttacaaggagtttgttaagttgtaacttgttggaaatattttatcaggatctagatttactaccaag

SEQ ID NO: 213093 - DNA, 484 bp, Cannabis indica
atatggcttatcaataataataaataaaaaactggtgtcctataaataatctcagtaggatcacttttttctttttgctcagtaggattaatttgaattatctttccttgtgttcagttataatatcaatatgtcgggtaagtgttcttttttttttggaaatggatatgtaacgtaggttggatatttattaattttgtcctctaatatttaataaaaatcaccatttattcatttgattttctgtacgctgaaaattataaaatatcaaaattatacatgattttgagcttataatgaatgaactagcaaacttaacttaattgaattcacctctgaacatgctaaaaaatagtttaaaaccaaattaagtattaaaagaagaaaaatgattgaacacactcaaattatacatatttttaatgataataactctgtacttatatctacaatggaactttcttatgtgtagagtatagtatac

SEQ ID NO: 213094 - DNA, 512 bp, Cannabis indica
ttaactaataaaaaattatgaaagactcctaatttttttatcttctctaatttgtagtgttttctaatttttatttaccaacaacaattaattaaaagagaaaaaggaaagaggcacaaaaaaaccttcaaagtggtataattagtcaaaacataccatgtagtgctgatatttaattatatgtgatttaaactacaaaaaaagatcatttgagtaactaaaaagagcttttgcatgtagctaatgaagaattagtttttcttttgtgctaaagaagtgtttctagagtcttgtcttgtgacatggtgggttaattttgcaacggatgcaagtttgatcatgttgtttaaggtggttttggaaagtttgtgtttgtttggatagatttggtatgttgtgtgtcttctttctattcagaatggaagaacaatatgcggcgttttcgattcacgatgatgatgaagaaggtcttatttttgagtctggggctgatggtttagtagaaattgatg

SEQ ID NO: 213095 - DNA, 666 bp, Cannabis indica
actgtcccaggtctggttcgattcagattttgggtcccgtcctagattcaaacactgactacgggtcaagtccaagcctcaggtccagattccgatatcagtctaggatctcgttctgttccagttcggctcccgggtcttgggccgcgtcctaagtttggatttaggtccgagtttcggggttgtgtcccagtagtcagttcctaggttctaggtatagggtcggggtctcgtgtctggagactgtcgtcgagtttttaggtctcggtccctgttccaaggctcagttttgggtccaagtccctcatctaactctggatccttagtacaagtctgggtccaggttcatgtctggggcccaggtcccccatctaggttcggatccttggtctcggtctaggtccaaattcaaattcgggtttggatctcgagttttggtgcaagtctaggtccttgtacgagttcgggtttgagtcttggtccgggtgttggtcgaagtccaggtccctgttcgggtccgggtcggggtcccgatccggttcctagtcaaggtctaggtccaagaccaggttctggtctgggatttggtctgggttcaggtcctgactttgggtctaggttcgggtctctattcgagtctggttctggcttctaggttctgatctc

SEQ ID NO: 213096 - DNA, 566 bp, Cannabis indica
taataattaaaaataaaaaaaaaaaaaagaataaatcatacatgatgattagccattttgcctatcccattagaactacactttacgtgtacaagtttaaatttgaaagtctaaaatgcattcttcaaaaagaaaaaaaaaaagtcgaaaatgtactctcactgtctcaccctagctattagcaggtagcttcttcattacaaattaatctatttatatatattatgagaatgggaccggttttgtaaaataaaatttttaaattttttaaaagtggtacggatttggtgatgtaagcagaatattacccctgtagccagtttcgttgaccggataaaatgtcaccccaaacattttattttttgttagggttatgactataatattacattttattggtaaataaaatttatcctagtatgagtaattgtacctattgctacacaatgttgagacccctttaaatctccacctccacaagctagcaactgctttgtatcagaatctgtctacatttttaactgtaccatcatgggagtatttttttgctctttacaaagtaaatc

SEQ ID NO: 213097 - DNA, 826 bp, Cannabis indica
ttgttttatatatgtgtaagtttcttgtgaaccattcgagtattcatgcaagatatataataatagcatttataaagtagttaagttataattttaatgtatttggttggttttcagtcatatatatacaaaacagaacacaaaatatcacaccaaacctaaaatatatacacatatatatttgtaggggatcttaatttgtcggagaatatcaaatctattggagtattaacatatgtatgacatttatagttacctgcaaattatgatataataaatgtaggattcgtattattattattacctgcaaattcatttggatcaacctttctaaggctttcgggaataagactttccaatatctaagggttatctctgaagttttgttttatttaaggattcagtggtagtaagaatgtgcattaacctaacaacttggtgaatctacatgttttgtttaagaataagaccatagtgctttagaactatcaaatttataaagatttcactgcattctgccattatgaactagcaaatgatgaagttgcccatgattcttgtaggaatgtcttaccatactctgttttatattttttttataggctttggcgttttgcaagtgtttgaaaagaatttgagtcaagtggaaatttcaatctcgattcatcagaggtatatatatttttttataattaaattacatataattttatagaagagtttgaatatcttatatattcatccatagtgaagtaggttctgcgaaatttgtgtgctgcggtgatataaggatgataaattgtgtgttatctgattatttatagtt

SEQ ID NO: 213098 - DNA, 641 bp, Cannabis indica
gtaagttcttttatacttaatttatgtgatataatagtattattttaataattaatgttgttcgttttaaggttttttttttgtttttttttttttaaatcgataaatgaagtataatttttatttttgaaaataagaaatgtactgtgtaattatttttgtttattaattttgaaaatataaaatataagtatattttataattatttttgttttcaattttaaaaaaagatagttaagatataagtgtttaaaattttgtgtttgtaaccgatataaatttaatgaattttttagtagtgtaagtattcaatgtttattcagacgtaactatagtcttatattacatattttcatccagacttaataatttagaatctgcgccttataagtattgaaaactctcaatgaaaacatcaaactgttaattcaaaaattcgttaacgttaattgaggattgataattaatacttcaaaacaatatttataatgaatgcaatgcatttaaatactagatagtgaagaaaagacataaatttacacttggttttataatttattctacatactccatgagtcaatattattttgagatttgataaatgagaataaattgacaaatttctttaaattggaattgg

SEQ ID NO: 213099 - DNA, 634 bp, Cannabis indica
ttttaatgttattttcatgttacttttatgttattttcttgttgattttatgttattttcgtattatttttttaaaaatcgtaaaaatataaaaaaaaatatatatattttttgaacgtaaaaatataaatattttataaaaaatggtgccttacgtaattattcctttaaataattactttaaataattacatagcacaagcaaaaatttctaacttgaatatgtgtgacttgccattaaattttataatattacactttgtaggtccaaataatccttaacaaaaaaatcttaaatttatcttttaaaaatataatattttgtagtttactattatttattaaaaaaatataactaatttttagaaaacaatacctaatttgctttgggaaatttcaatttttgaccctaataatacaacctatatcaaaatttatacccctttataatttgtacaaatttagtccattaattacatgaacttcccattttacccttttttttttttaaaaaaaaaaaaaaaaaaagactaaaatctgaaagtgtatttctctctctctctcttccctcttccctctctctcgtgcaccactctctctctctaaggaaaaattagaaaaatttatagaaaaa

SEQ ID NO: 213100 - DNA, 627 bp, Cannabis indica
ttatttgaccccttacccaatccccactctctctctctctcaaaccttttccttttcgatcatgattttgggaagaacttgcttgaatttggcttggatttgaagctttgtgtttgtggaatcttgagcttgcttttggattaaagttgaggtctactgaatttagttaaattcttgctgattttggttgtggaaaaaggcatgaaattattgagatgttcttgtttatggatgaaaggaaaagatgtgttgtttttgatagatttaagtgtaaattccatgatcttgttgtgttttatgttgtgaagctttggatggatttttctagggtattctctaggttgaaatccatgttatttttggtatatggctgctggaaaatattggaaataaattggtttgaagctcaagctttgagcttgatgagtgatgagtttaaaggatgatttagtgatttatgcgcaagctgtttttttgggttattgttaagaattgatgcatgaaatatgtttatttgagcatctattaattgttagcaaccctacttgttgatttggaagtttaatcaagttttgggttgagttggtgttgatttggagcagaaaatttgtgtttgcttttggtttt

SEQ ID NO: 213101 - DNA, 679 bp, Cannabis indica
tgcgatctatctcaggctatacacgcgagatgttgaagacctgtaaaattgaacttgggcaatcatgccaagttaggtcagtacgagagggtgaattcagttgctaccccctgcacgctttgccaggagtaactcaggaaccagtggtgagactagtactagttgttcaactagcatgggcgcctggagccttgagcatattagtgcaagggccatcctccctctttgggactacttcaaagactatataaatcacattggggttgccccattccagctgactcccatctcctactggattctcgctagtttgaaagtcttgtacaaaattatgaattgggggtgtcccgcaccagtagagattgagtatctttactcagttaaggcattccatcgaggaagaacgctccagtgggctttcactatgttggtactcatgctagtgagccaaaaattattgtagacttgccaaataaagtgtctttcaaggacagcttcttctagatatttggtctttcccccattggtacaaccacgttttacaaacttcgtaagtcattgttctcttcttacttatttacatcaatcttcctttttcaagtttttgactaatattttgtttgttctgacagctcttctgacgagacctacccttacccccgagagggttagtaggcac

SEQ ID NO: 213102 - DNA, 749 bp, Cannabis indica
aagagggtggttctacggagataaagggacaagtgcaaacttagaatttagatgaagcttggagtaagcttaggagttgagctcaggaaaatttgcctacggtctgtcgatgagggcatcaacatgttaaagtgggggagattgtaacgtgcgagccaatatggtacgatacaagttaggtgatgcacacaaggtggccaagtggtggttaagtggtggcccatgttggtgcatgctgatgcttagcttgaatgttagtgtcattttcgtaaatatcttcaatattgtctggatcgggacaagacttggtattcactatatatttgggtctatgaatacaatggagaaatcaaatttgagaaactctgtgatttggtatatggtgatgaccatatgtctacaaagcaaaaatcatatatgttcttagtagaaggctaaacacttagaatgctctttaaggagggagtacctggtgttagctctccaccatcccttggtaccttggtactaagtgagatactactagttagtgggactagtagggtgggcatatgaggaccatgagaggactcatatgtctccatgagttggaatactcatgaacactatcggtctgacctggtagtgcatctaaaaatgctgacagaggctagcatgtatgtttccattggcttgccagtatgtcgcttgcgcgggacgtggcctaaacctctgagagacgttaattgtgtgccttggccatgagtctc

SEQ ID NO: 213103 - DNA, 632 bp, Cannabis indica
ttttaaaaggaaataaattaacatgtcatttttaattttttttatttaatttccaagttaatcacaaccatttaatagtgatccaatggttaaaaaaattgtaatcatgtggttacaataaaaatgtaaccattagaacctctttcattatttataatctactaattaattactaactgttaatttttatatctaatcatgctattattatattattaggatgttataatttttaaaatgtattttttatttaatcaaattggttaattctaaaactaatttatataacttgggtatataatcttttcaataataaatatgtcattatttattttaataggtataaatgtgtaaagctattttgttgttagtttatataaataatatgttttaataaatattaaataattattattaaaaaattgtcaatttaaaataatcaattcaaaatatgtagattagattgaattgaatcggatttgagttattatgcagattggattggattcaaaatattaaatctgtacttagtgaggatcatattatattatgagcaaaatagtgcggattgaattggataaacacccttatgtaatgtaaaatgatgatgtaaattaaaaaaataaataaaa

SEQ ID NO: 213104 - DNA, 827 bp, Cannabis indica
gatcttaataatgtcttgtctcatggtgataaacgtggggggcgtccttatcctcggtggcttgtagatggttttcaagaagttgtagacgagtgtgagcttctggatatggatcttgtcgggcatccttttacttgggagaaggggaaagggactccaaattggattgaagttaggcttgatcgtgctctaatcactagtgcttggaacactcttttttcggctgctaagctttttaacatggaagtctcagcttcagatcactctccgctttggcttgaccttgcatttcgaaaaccggaggtgtttctcaaaagatttcggtttgagaatgcgtggagtagggagcctatgtgtaggcaaattgttcatgatagttggggaatgtttaataatgatcctttgcacctgaaaataaagtgttgtagcacttcccttgctgaatggggaaaagatataaccggaaatttcaaggatcgtattgctcgatgtaacaaggagctgaaaaaattgaaagggcggcgagatgatacttcgatacagaaatataaggatactcatgcacagctttttgagattcttacacagaaagaggtcttttggagacaacgatcaaagcaactttggttacaagcaggggacaagaacacgaaatattttcatgcttgtgctaatacgagaaagaaaaataaccagattgtttctctcaagaatgacaatggtatgtgggtggattgggatagtggattggctacggtaatgattgactattatacagtcctttttactgcttcggatataagctgggaacgagtcactaattgtgt

SEQ ID NO: 213105 - DNA, 620 bp, Cannabis indica
gcaccctattctcttgttgccaccttactaaaagcccgttatttcccgcgaaacacctttttagaggctaccaaaggccgccgaccttcatttgtttggaccaacatctcctggggaaaagaacttctagtttcagggctcaaaaaatcaataggcaatggtgcaaatacttcaatataccatgacgcttggatccctggttataacaaagtcaattacctcaaacacctctcagatggatgttcaaatgtatctgaactcataacccctactcatcaatgggataccaatcgtattagagccatttttcctactgatattagtcaagccattgaaactctcccactattgccttcccagtaccccgatacctattactggccttacacaacacatggaaactactcagtcaactcaggttaccatagagcccatgcctctttgtgtaaggatgatccctccccttcggacaccttggcacaccaaatttggtggaaaaagttgtggactcaggccataccgcctaaagttaaacacttcatttagagagcctaccatgacatccttcccactagtcacaatatgcacacaagaaagatcatcccttcacctaattgctg

SEQ ID NO: 213106 - DNA, 494 bp, Cannabis indica
tcggtcaatgctactattcatagggttgactgacatgaatagtgtccaaataattggacccatctgtttaaaaatgttattaataatatactatttgcgttgtttgattaaatgatgataaaaaagaaactgacgaaataaagtaaaaatttaaaaacttgtttttcattttgcgtccattgttaatagtcgactattgtgcttgcaaagttttgaaaatgacgtgaaatataattgtgagcgatagaaaccgacacaaatttaataaaatccctaaaacccaaaaattatataacatgctgcacacatccctaacctttgtctcctccttcgaaattgctctggccaaattggccattctcttcaacccagttcatcctcttcaaaactgaccattctctttcacccattttgtcctcttcaaaagtgaccatcctctttctcctcttcttaattaggcagtgacccaaccggtgacgtcccctctcttcttc

SEQ ID NO: 213107 - DNA, 682 bp, Cannabis indica
tagctcgctgcttacagtaaagcgcttttcgggtcaacatttcattcagcgatttcctaatttcacattcctgcctccactcccgggctcccgcagggagcctctgaatactatccagtttcagttccaggtctttaattacccaatcaagcctaccatactgcgatctattccaattcagaagagcaagcctagtagcaccaacctttttgaaaatacgggcaggagcccaagaatgagttaccgttcgccaagcattggcaactacaagtttgcttctatcatccctcgtccaaccttcttcaaacttgaaaaatctcttgaagttaggggaatgaccactagtatccagaaagaaaggtctatggtccgagttgctcgtctgggaagagcaaataacagctttgggaaacagttggatccacgctccattcactatccctttatcgagagcagatttcacatgaataccccccgacctgtggttatcccaagtcatcttgtcgccttgtatacacagattgattaaacctctagaatcaacaaggttagaaatgagagggataaaagggtctcttcctgaagaaccttctcgttcagagttgctaagaacaaagttggtatctcctataattagccatggacccccaaacctgtccccaagggccattaactccgccca

SEQ ID NO: 213108 - DNA, 639 bp, Cannabis indica
attttattaaaaatagcatttattaaaaaaaacgtattttattaaaaacatcgcctatttgtttactacgattttaaaccatcgagattacaaatttttcccgacgattttaaatagttacttaattttttagcgacggtctccgaaaaaaacatttttaagatcatcgcgaattctcatatttgtagtagtgtaatcgcgctggcaaaactcacgtttcccaacgcatctcacaaactacgtttgtaaaagggtcataacttactagcgcacatttatgttggcaaaatgtatttttccagagtaacccatatttgcgccggtatagcaagccgtctaaacaccattccctttatacattttaccaatacaaaagtgtgctggtaaaagtaacttttgccagcgcaaatgtgtaatgcgttggcaaaaattacttttcccagcatctcgctaagtgcgttggtaaaatgtcatagttgtacataaataatttttaatatatattttttttaatttttaattttttataattatttagtgtctttatgtcttttataattattttaaataattttttaataacaatttttctattatgatatcctttccccaaaagccacgcatgctctctctctctct

SEQ ID NO: 213109 - DNA, 628 bp, Cannabis indica
cactatgtaattataaatagtgagaagtgagatcaaaaaaagggatggaaaaactcatacaaaagagcccctgagaaacgtattagaaatttgaagaagattgactcgtggactatgcagatttgtaactacaaaaccatgtaaataaccctatgttcatacttttatttttatagcttttattttttctatgtgaaatcgttattgtgaggctcaaagtttgttaacaaaaatctacggtaacggtttggtgctttcattgagagcctctgtgaaaaagctcagaaaaccctccttccttttgaagaaaaaccctctcattcattgcttaaaatccaaaaaatttaaataccccacatgaggaaactcatcatcgttctaggaaatagcccatgggctccagaaggtctaccaacccacagtctcgacggaccactcgctctaggaggacccaacctgagggtggccccagcgttcggacatcacttcaaggagaacttaacctgacgttggtcctagtacgtggacaacacgatcgaggagaactcagcatgggaatggccagaatcctgggacgagggatgaagagcccgatgcggttgtggccaatctatgggagaaggtactt

SEQ ID NO: 213110 - DNA, 866 bp, Cannabis indica
gagaatgtgtgagtactcgaccttgaatggtgagtactcaagctatgaacacattgacgtacttgaaatataaagaacacaaaggaatatagttgttcagtcagatcacgatctgcttagtccactgttgcaatggttttctgtcttgtccatttcatgttggatcactcctttatatacaaagcaagtgtcctttgattacacagagattgaattcattatcaatccgtttgtacattgaatataacatttaaatcattaaaaacgtaaatacaataaatgaagaatagttttggcctaatttactaaatacagcaacgtctgcgacttctatagtgcgagttgtctgttcttattcttgcataagctcataggcttaagatgcatacaagactaatcgagtctgggatgtttgcgtcctatctagtcgcttatacggacatcttgtaatatgtcgataacttaagacatgtgagtccttatcgggttatcgaggttattgggtcatccaaaccagctcgctgagtttagaagcaatctttatctcttcacaggaagacctttatagtcctcgcatatgtcttggtatatgagagtcttaacccgatcttcggtcctgctttgtgcgagctactcgaatgcgactagacactgtcaaggtcacatcatcccgctgagtctggttcaggcgaggtttgcactcaagaggtctctcacttacatctcagccctcctcgaggagagtgagtccacgtgtcatttttataggagcctggtctcgagtttctaagtgagaaattctcactataacacatgcccctagttttgcaattgacagcttatgtcataagggaaactataagcga

SEQ ID NO: 213111 - DNA, 861 bp, Cannabis indica
ggagaatcccgatttagatcatgatcatactatgcaacagaaaggatcaagggttaaacggaacgagtcatattattttgctgccataaatgtaaagttttctataacttttagggtaaatagcggcataagtacccaaagttttatgtttgtaagcgacataaacctaatgtttatttttagcggtataagtacccaatgtttataaaactgtaatttttctctaatttttagcggtatcagttacttctaaatattttttaatagattcaaaacagagtctatattgacgaaaatggaagaaaattacagtatttttatgctgctaaaaataaacattgagtttatgtcgcttacaaatataaaactttgggtacttatatcgctatttatcttaacttttatgtctttatttcattgttttagagaattcatatttaggatgttagattatagaactataattcaacatacatgtttgtaaatctagattctagtaaaattatttccaacaatatcttattgaaaacgtgtagaagtttgaatatgtaaataaaaatgaaaaaaaaaaacttgatataggaaactaaaattgaatatgaaagagagtgaaattagttgagtgatatgtaagaagaataacatcatcatcaatgaaaattgtgtgttcaagtggtattttgttaaataaaagtaaaaaaaaaaaaaattgttgtccaatccttgtgaaggtatttttgtaaataaaatgacaatttatatttggaattatttcacaaatacacaaaaataacaaaaaaattacaaaaatacggtttcacggaattttaaacatttttacgttttttttttttattttat

SEQ ID NO: 213112 - DNA, 770 bp, Cannabis indica
acacttcaatggcagtggcgaacccacaggttctaggtcaccgagcgccatgaacgccttattctagaatgtccaaagacttgggaacccttggacattaaacactctcaaatcccatgtcaaggattatcatcccgggatgttttttttttcgaaactcgtttgtctaatgctgccatggagtatattcaggttcagctgggatttgctggctacttttcagtggatgctaagggtaaaagtggttgcttggctctcagttggtctgatacttttgatgttcaaatcatgcaagttcgatacgatttctcatattgatgctcttttggagaatgatctagggttcctctttcaatttactagcttctacggtaaccctgatccgggaggacgcacagaaagttggaaattgttgaaacggttgcaaccgatgtttcatggtgcttgggttcgtggagacaattttaaagaaattacaagactttgtgaaaaaatagcaagaatgctaaactagaatatttaatgcgcaactttcagatggcgatttcagattgcttttttacgtgaaattcctaccgagggtggcaactttatatggtgtaatgggagatcatcaaacttggtttttgagaaactagatagagttatgtgcacttcaaaatggctagagaaatttcaggtaaacaaagttccctcttaaactggtggaattctgatcatagaccgttattgctaagcgctcagcaggtacaatggcaatacctgtaatc

SEQ ID NO: 213113 - DNA, 557 bp, Cannabis indica
aaaaaaaaaaaaaaaaaaaactgaaaagaaattgaaaataataaaaaaaaaaaaggaagaagagaaaaagataagtgaatgatgtaaggtgtgattgatataagtcatcaatcaatgacgtggctgcatgcatggaattgatgtgtaagtggtataattgtaataaaagaaagaggaaaggtaaaaatgatgatgtaagcgtgtaggggtttttttgtaataaattgagtaaattagatttttgatgtaaaaatttctttatttttttgtccaaaagacattgttaagtgccaaatatgatagcggacatgtataaaaatgtacatatgtcatgttcatattaatttacataattttaattattgtaatattaaataaataattttaaaatatgaaaaataattaaaaataataaataaaatttaacaattttttttttttttatctttttctctttcttttacattttttttcctaaccctaatttcccacagcactccctctctcttctgttctccttctcacacagcttctgtctctcttccattctccttctc

SEQ ID NO: 213114 - DNA, 514 bp, Cannabis indica
ctggtcttgataaagtgaggtatggaagcttcccaataagttgtctgtaggcagagggattagtgaggggttctccttgctgatcgtccaacttattccttggatccattggtgttttggctggtttacatccagaaaaaccagtgtcgtcaaggagttgcagtgtgtattttctttgagaaagaaaaagaccatcttcagatttggcaatttccaatccaagaaagtatcttaactcgcctagaactttgagtttgaattgttgatgtagagagtgctgaacttgttgtaaagtgttgatgtttggacccgtgagcactatgtcatcgacatagacaagcagggcaacgaaattatcatttgttcctctagtgaataatgtgtaatcggcctaggattgcttgaatccttcttggagcagagcatccatgagcttcttgtaccattgtctcgatgactgtttgaggccgtaaatggatttctgaagtttgcaaacgtgaggagcatctgtatt

SEQ ID NO: 213115 - DNA, 880 bp, Cannabis indica
tctcttttaattatattattcaaacgcttattattagactcactgtcgttggcttaaagcgaggtcaacgttttgtttctttcattgagagcaaaaacacaagttcttcgtcttaagttttgacaggaaaataggatggttgtataaactcgtagaggccttgctgatcagagcgacccgatggtggcagatcctaacgtgcaaactcctggaaacacgagaggaccaccagggacaaacctcgagtaggttaatacacaaccacctactgtgggccatggagtgacttcccctttggctgagatcacaccaggcgtacaagagactggaatcaccagttcagcaaccgatcaattcactcccaacactaatgtctcgtctaccactaatgctcagaggctagttggagatcacactgaaatgcaaaacctttgagcagcccttgggctcatgcaaggtcataataacgctttgcaccatgattaggaggatctccatgcagtcataaaccttgcatttgacgaacaaagatgtcaatttatagaatggaggaaccgagagatggaaactctgagggcttagccagcagccattgatgatcacacgaggcaggccaccgtactaataagaagggcctaccaattcacaaatcaacaaccggctacttcatccaatattaccttaggaagtttcataagggtatacagttgggcatactatacaaactcacagtggtcagtcgtccaatccacggccgtaggtccgacctatgggccaagcgataaacgaccagatcctaccacactcgtagaggctgcccatcaatggtattttaaattgcctctaggaaggtttacctcatggaatgccttctcatcgg

SEQ ID NO: 213116 - DNA, 1152 bp, Cannabis indica
aatcgtgtcacataagtcaaatctaatccgacctaaataattattgtattatttgggtttcaatttcaattttggcatgcatttattttatatgaccttaatccgtaataattcatatcgaattcctattgtgactcgtgactttctaaattcccactaataatattaaattttatatgtgttttgcaatatgtatttcaaatcaattttattttgtggtgaataatactatatttacttttaggtaaaataaaatctttctaaattttaggttcaaattttgtaatgtataatattagagcagttgcagtagagagaagccaaaatagctaaatagtacatacaaaaagaatctaaaggtactccaagaaatgttgtattatacaaatttttcacctacagctactatacttatagaatactgttgctcctttaaaattattttaatagttttggttttaattttgacaactgtgcaacatcaatcgtattagagtagctaaaatagttaatagctaaataatttagctaaaagatgaaaattgattaaaaaaaaattaattctatcaaatgagctattttagctaaaaaaaattaaattcataaataccgcttagctatatgtacagaagtactatttatcgagctataaatattataattaattattgaaatttttttgtagtatatatgtatgtgctattattagatttatttatttaatttttgaataaaataaattaaataaataatttatatatttaataaagacggtatagagaatctgatatataattgtgtcactaaaatataaaaagtgaaattttaataaagcatattttaaaaaattgaatagaaattaatgtaagtgctcttagctaattttgtacattgatcaatttatcttgtattccttctatattattgaagaggtgaattaagctactttttctatggtttatagtggtttagtttaatactaaataaatctcaccctttcctttattcaataaatatttggattttttgtaaaatatatttttattcctaaattaataaattttctttactttataagttgatttatttaaagtataagataagataacataattaattatagaaattattccatagaaaatataaattgat

SEQ ID NO: 213117 - DNA, 556 bp, Cannabis indica
ataactaataaaaaataactccaaattaaattcaattaaaacatacctgcttttaagtgtaatgtgcctaaaataccctcaagatttaatctcttattaaatcctcaatttctcccccatcgagagttcaccatcactatcatttccttgactcctctgccattgctagcattcgtccacttctacctccgtctccgccacctccaccactgtcagcgtccgtccacctccacctcctcctcctccatcactaccatcaacactagtcctcaacaattgcaatctcaacaatgagaactttcaatatttcttatttttttattagttccagtttttggtcgggtttctccctttaattttattttcttattctttgtattgactacgtccatatatataactttgtgtgtgtttgtgaacattatttttgtattttgtatgagtttttttgaatcaataattactttttcatgtaattggggtctcttttatttcactgtttgaattttatatataaaagtatatctaaaatgaaatgtcttctaagtatttgttc

SEQ ID NO: 213118 - DNA, 641 bp, Cannabis indica
tttctctttgttttggtttgttttctttgtccctgttctgacacttcaaccttttttaacttggcttattctgacaggcggccctactgacgaagaaggttgctgcggaggatggagtgctggtgacggagttggagcaagtcaaggcagccaaccgtgacctacgtgccaccaatgagaccctccgggtcgaacttacggacaccaagttctagattggggtattcgcaacaggcgaaccagcagctggaggaggagaatgcccaccaagcgtgcttcatacggagcatgaaggttgttcgcgatctttacacgtgggcgcgaatatctagtgcaggctcttcctcccagttaggtggtgtctaaccttgaacctccggcagacctcccagattaatgttattgtgctttctttttccttttttatatatatatcctctctctagccacaaagacaattaaaattttgccctggccgcgggggctgtaatagtaaaatagggtcattttgtgttgctccttacttggagatttggtgtggtagactcttggggactggttgtgttattgaagcacttggttccaacgaccagtgtttcaaccttttcctgttagtcctaattatctctcgatcaattctg

SEQ ID NO: 213119 - DNA, 590 bp, Cannabis indica
tttaataaattcgatccaataccgactatgggtctgggtccagggtataagtccgagtcttggattcgggtcttctgggtttgggtcttgggttcggatctgggttgggatccaagtcctgggtccgagtctaggtcgaggtcctgggtctggtctaggtgggtctaagttcgggtctgggtcagagattggggttgactcggatcctttataaatattataatacaagctaatatggactgtttgttatgtattaaataagacaactaacattgtattaaaaaatttagttgtaataattaatacaatatattattttattcaaacataatattatttattatttaatataatacgatccttatacagtgtaccaaacgagcctaatacgatacttttatggggttgagtaagttatagtgattgagtaatttgcggcataaatatttaagtttaactcttagttgcaaatgaaaacctaagttcaatttttggcggtaataatatctaaatataattttggaatttttgtaagtatttgactgttaactattatgtaaattgctatgtgacaatttttaattggtcca

SEQ ID NO: 213120 - DNA, 632 bp, Cannabis indica
tatgcaaatatatctatactagtatatccgccgtcctatattattgaataattaatatcaataaacaaaacagattgagaaattaaagtatttttttttttttggttatatttttgggttaaatggcatttaatttcgggtgtaaaaaaacaatttattatgtaggatttgttatgtaattatacttcgaagaggtaaataaataaaaataaaaaataaaaataaaaaaaaaataacaatgtcatctcaattctttttcttaccccttcttctaactttgtaaattttttatcttaatacttcacataagaatatttataataattttaaaaaatatgttttattcaataataacaataataatttaaaatatattaacatgttaaaagtgcaaaaaggagtgacttgttttaccacacatatgaataatatacaatttttttttacatttttggagaaattaagtttagactttctatttctgagaagaaatgcataccatgttttcaatatgtggttctataatttcaaattgtacaatactttggtatcatgagtttaaattagtcgataaattttaacaatatattaatttaagtaactaaatttgaattgaaaatccataaaataaa

SEQ ID NO: 213121 - DNA, 1161 bp, Cannabis indica
cgaccagtactcgctgttaggatcaaggacataaactagaacctaaacccaaactcgaactcaaactaagaccctgacacataccaagaccaagacccacactcgtgaacaaaaaccgaaacatgaattagaacgggaccaagatctttgaatgggaccgggacctggacccagacccagcctcgaacgctacctgagactgaaactcggacctaaaccttgcctcatacccaaatcatgacccaaacccagactcggatccaaactcaatccaaacccgtatcccacgacttgaaactggaatcgaaactagaagcggatcaggacccaagaacaagacatgactaggacattaacctagacccaaaactgtaaccggaccaagacctagactcggtcaaagacccaccctgggattcggtccaaaatctaaatccaaacccgaaccgggactcgggacccgaacccagacctgaattcagaccagaacattgaacatgactcgggacccagaactggagcctagtctcggtcctagacctagacccaaacctaaacccttacctaggacatgaattggaacaagactaggacccgtgattgggatgcagatcttgtccaatgattagagaaccggggcttggacaggacccatagtcgatgtcttgattagggacttggacaaggacccggagctggaaaaggacctagacccaggcccaaacctgggacccaaaaccgaaacttgaaaaagaacgtgatcaggaccatggaacaggaccgggaccgtgacctggaccttgacccggacgcagaactagaccgaacctagcccagattttgggttcagacccagttctggacccagactagcactgagacttgaaccagaacctgaacacgaactcgggacatgatcccagacctagacgaagcccgtgacctaaattggaattcggaccttgacacggacacgaacccatacccgaacccaaataccgacgcagacctagactgggattgaaacacgcgacctaggcccagacgcagacgcagacccagacacgaacatgggacccagaaccaagacccgaacctggaccttgactcagatctagacctagaccgagattcaaagaacccgtactcggactcgaacta

SEQ ID NO: 213122 - DNA, 590 bp, Cannabis indica
tattaattgtttaaataatgatataatgaagaaaaagtgttatattttagatgaagaaaaaaaaatgaaaaagtataattaagcttcaaaactatgatgaaaataatatatatatatatatatatatacagaaggactattattgtaaagtatttaataatgcatgtaatatataagtgaagaaaaatattaataaaaactaaaaagataactattgcgtaagcttatgaaagagatagtaatgcaaaacaagtattattgtaaagtactattctataacactctctataagtgtatataagtgttgggattaaacttacttaacctgttaagttagtaggtccatctatttgttcagcagatgaatctgaagaaaattgttatatattaataattcagaaaacccctaatctctttctctcccgatacctctctttctctgtctggattccctcgtgtgcgttggaaccggactggagttaccatctccagtcttgctgagccaacgagctatggaaatgtgtctcctcgtcaagggcttcgagatttatggcccgatcctcatgcactccttgaccagaactgccacc

SEQ ID NO: 213123 - DNA, 795 bp, Cannabis indica
cggaatttttttaaaaatactattaaattttatactctgtaatgtgttaagtttttaccgttattctacggttattttttagttgttctgttttgtattccactgttgttttataaaatacagcatttttgaaaaaaattccatgtggtaatatttttgtaaaaattaactcaaatttcaatatttttataagttttccttatttatataatgtccggtgtgatcagtttgaacttcaacttatatgtttatgcaattattttacacttggaaattttcaatttttttaaaaacactaagggaagagattttgaactttatgagtaagttttaataaaatatgctaattatgatttttatacctgaactttaacagatatcaaatcatatttttaaattttttagatcgttactagtttacttgaattattgagattgttagatttaaaatttttgttcaatttattaatggaagtctgatgtagatgaaagttcaaggagcacgattttgtagatattaaaattcaaaaggtactattttgtagatatcaagattcgggtggtacaatttggtacataaacaatcagattcatcgtgttaataaaattgaacggaattaaacaaaaaaattttaaatctaataatctcaatagtgaaaaaaaaataatgacttaaaaaatttatagaacatcgtttgatgtatgttaaaatttaggctataaaaatcttaattagccatcaaattttctaaattttgtgagctcctctttataaaaataatagtaaattttgtt

SEQ ID NO: 213124 - DNA, 808 bp, Cannabis indica
tgccataagtacgaggcaaacagaagacctacccagttgtcacctccccaattcaagcactacctgcatggaaaaaaaaaataagggaggtgagcaacttgactaagctacaaatatattcaagtcaacaacactcaacatcatcttccatgtaaaacaaaaggtacaaggtcgaccaaatgaccaagtatcgtattaggtaaaattaccaagacacacagtaagtcctaagttgcataattaactataatggactcattatctagccttttacaaagtttccaagataaaccacgcataaggccacaacatgtatatgcctccaaggacgtcaggagaccagctgaggtcaaaagagggagaaaaactagctacccacttggagccttggccttggccgagtagggttccatgtcctagtggccggtcagatcccaagaccctgcctagtggccgagtaggaaccctagttccaggcataggctggctagcctagggacacagtccccatggccagaccccatgaaagccacccatggtcggccaagcttcaaacaaagcctccttcgctaaccagcatttgcatggatcaaaacatgtgatttttcaagagctcaaacgtgtttttcatgttcttcgtgactcaaagagccaagaatcacaatgaatgttagattcagttctttttcatcaaaaatcacacattgtttatcctgaggctatgatgtggattaaaatactaaatggattataatctaacgtaagaatcgaaacatgttcaaaaaaagactcaatgttcatgcattca

SEQ ID NO: 213125 - DNA, 1001 bp, Cannabis indica
tctcggtcctgggtcccagtcccagtcacagtctgggtcctagccccagtccatgttcagttctcggtcgttgtcctggtctgggtcccagtccttatctcggtcctggtccaagtctcaggttctagtccgagtttgtgtacgagtctgggtttgggtctggatcttgatttgggtcccggtttcagtctgttttagggtccgggtcttggtctgggtctgggtctgggttcttgtatgggtctgggttttggtcaaggtctcaggtcatgggtcctgtgttctgggttcttggtcgcaggtcctaacgcaagtatgggtctatctatcgatcctagttggggttcgggtctgtgttcagttctgcgtctagatctgttttttagtcaacgtccaattcctgttccaagggcttcataccggttcttgttccaatttcgggtcgcgagtccgagtcttggtttggatcctagtctagaaattgctccaggtttgggtcttggtacgattccaagatctagacaccgactacgagtttagtccaggctccgatcgtgagtcatgatctatatcccaatcttgggtccaggtctcatttcgatccggatccaaaatcctggtctgtgttcgtgtcagggtttgggtctaggacggagaccggggtcgggtcttggattccaatcccagttgggtcccgattctggttctaattttgagtttgggaccccaatctttgtcgggctcctgggtccaggtcctagtcaccaatctccgtccgggtcttgggtttgggactgggtccaagtccgtgtctgagtttgggtttgtgtctcgagtcgttatctgggttttgattcgggtccacgtcccggtccagatctgggtctgggtcctagtcagattccggttcgtggactcaaacctagacttggactcggacccagatctagggtactggtctgggtctcggtcagggtattggtccgagtccgggtctgggt

SEQ ID NO: 213126 - DNA, 586 bp, Cannabis indica
gtgtcatcatgtcgaaaaaagcccaggggaatggttaaaattcggtccacatcaggtggtgaaaaccagcgatttagcaaagatatatcccattgtcgctcatccgtgatgatattcgaaacaactagatccgggggtccagaatagtggtaaggttgaaagctagagtggcccggaatccatggatctttagcacaaagaactcgacaaccttcgcctattttccatcttagaccagcagtaaggaggcctcttccccaatgaatggcttgccaagttaatgagggggagtggccaagatgagcttcaaggaaagagttgttaggatagtacctactcttgagaagcttagcaagtagggagtccggttgctgtagaagtctccaggcctgctttgcaagcattgcttgattaaaatgcacaaatgaacggaaccccataccaccattatcctttctttggcacataagcttccatgagcgccaatgaaccttgcttccattttcatttaagccccaccaaaagttggccatcatagactcaagttgattgcagaagtaaacaggtaagcggaagcagctcatag

SEQ ID NO: 213127 - DNA, 567 bp, Cannabis indica
cttttttagtttttttttgatgactatttaaactagtctcaagtagttatttaaagaaaattatttttaaaaaaatattactgataattataataagatgctattaataaaaaagattaagcatcaatcaaatcactaatatttaattgcaatactttaaaataaaaatatgaaataaaaacaatggctgacaaaaaaagtccattttgtttggttgctagtttggtgccaaaacatctattttcaacttgggaaatatgtattttatgttcaatttccaaagctggtgaggtgagtcgatactaatagctgtaattactgtgcgcgttgtgttaatttggttcataattttctacttttaaaccacgggttgtgttagactataaaaaatataagttgtgtcgtgccataaaaaaatataaatcgtgtcttgtcgtataataattttataagataaatttagtacaatttgtaaatttgataatttcgtaccatgctcgaatattcatatagtggccaacctgtttcctaaatagattaatttatttttataggtactctatattt

SEQ ID NO: 213128 - DNA, 619 bp, Cannabis indica
gtgactgttacttgtttatcgaggtttagatctgtaacagctgagtgaacactctccattgccggaagtaagttgtttgtgagtgaagaatcgttaaaggtgagaacttcattaccgacaaaaatggctgtgattttagtggccggaagataacattggacatttgatttgacccaatctttagcaaagtttggatcttgaacttttgttaagtactcattgcctaatccgaccatgatttcgattcctgagtttgcgaaagctttaaggactcttgaatctgcgtcgtagagtttgattttggttgctccgagggatttgaccagtggaacgacgtcgtttggggatgggaggttgtttgcgatttggccgtagtttactcccagtgaatttgccggtaatgggataaagatgagaactttgaacagaaaagatgttaattagaaaaacccaaaaacagaaaatggaaaaaagatgagatttttagatacttacttgttgagattatgaagctgagtttgtgatgaagatccatttttttaattctcattttgttggttgaatgaagtttttttggccggagatggaagtaagtgagtggttgaaaggttgaagcttt

SEQ ID NO: 213129 - DNA, 879 bp, Cannabis indica
actacgagtcgggtccaagctccaagtcgtgggtcaagattgagatcccaatcttgggttccggtctcatttccattcggatcctgggtctcagtctatgtctgtgtccgagtgtgggactgagaccggggttgggtctttggtctcagtcctagtcctgagtcttgattctcgttctaattttgagtttgggtcccaaatctaggtctgggtcctgggtgcaggtctgagtctcccatcctggtccgggtcctgggttcgggtctggtccaagtccgtgtctcggttttgttcgtgtcccgattcctgatttgacttttgattcagatccgcatcctgatccaggtccgcgtaccgatccgggtctgggtctgggtcctagtcagattctagttcctggattcaaacccagactcgaactcggaccttggtctggggtacgggtctgggtctgggccagggtctttgtccgactccgggtctgggtttgagtccggatatgggtcctagatccaaacactggctacgggtcaggtccaagccctgggtctagatttggatcacagtctcgagtcctagtctagttccacttggggtcccaggtcccggtttgggtcctaggtcagggttcggtccaagttcatatcctggttctcagtcccagttctgatgcccgtgtcccgggtctaggtctgagtcctaggtctctggtccgggtctggggtcagctcttgggtcccgtatcacgagctggatcctatgttcaaattcgggtcaggggtcggctcttgggtcccggtcctagttccgttgcctaggtctctatcccgatttcgggtccatgtctcggttctggtatgggtttgggtcccaatctag

SEQ ID NO: 213130 - DNA, 689 bp, Cannabis indica
aaataaaaaaaattccttttaaatattacattatctaattattttaaatattcttttttaatataattattaattaaaatttatatataattagtgtctaaaaaaatccatattttcaaacacttttcatatttttaaataaaacgatttgcggcgaaacccccttatgttttattttttatacacttaattccttcatttttttttttgtggcaaaacccttttatgtttattttttttatttgcaaatttgacacatcacttaccgttaaatatcaactggatgaccactgtatacacttatgtatatgtaacaataaaatttcgaagtcgatacagtaataattcaattagtatttaacggtaatatccaactagaaccttaaatttgcaaaaaaaagtaaacttaagaggattttgccacgaaaaaaaaaggttaagtgtataaaaattaagacataagagcatcttcaatggtagtattctttaaggatgttaaaaatctcaaaaatataatattttattttatttctcctccacatcatttttggtacttacttctaaaaacattccaatgtataacactcttcaaaaatactataattataatctcacacattattattttaatatacatcttaatttttagctacaataattttataacttcaattgtttattaaaaaaaa

SEQ ID NO: 213131 - DNA, 632 bp, Cannabis indica
taataataataataataataataataataataataataataataataataataaataacttatttttgtgtttctgtgaaatttattttgtaactttttttataataagttaattgtggtaaaatatttaatagttttacttttctagtacttaattttcaaaatttaaattttggcgataaaactcctaaaactactacactgttagtaatttagagttttcatctaaatttgactgttaaatactatattagattgtccacgtgaacatagtgtacacgtagcacaattttattaattacggaaataattaattgtaagaaaattaaaataaaaaaatccgaaggaagtattttttttttcctactctttttttttcttttctttttttcctatagtttcttttcctttgttttttctttcattttatcgattatccttcttctcactctcgagtggatgcaaatacctaggagcactcaacattgtcgaggaccactgagctgtcgccgttgctgaggaccaccaagccagcgctgttgttgagaaccaccgacccaggtgtagtcaccgagaaccactgtagtagaacacctgtaagtctcggtcacctctctctctctctctgtctc

SEQ ID NO: 213132 - DNA, 879 bp, Cannabis indica
ataaaatagaagttaattttacagtgaatacttctaagaggttttgttaccaaaaaaataagacctacacatagtatcgaaaacaaagtttttgatatttcagtttatattgcgcgtgtttaaaaaatttcaaacttattttcgacactataaattattcaaaatttttcaaaaatttataaggatgatgttgtaattataacgaacaccgtcatgagaaaaaaatattctaatatgtatttttaggcacaaagatgactaagagattataatacaaggttgacgataacacttaagggtgttcatcaaatacccaatccacaaagtgcagattagattggattaaaaaatccaaaaatccgtgcttgtgccaattggaggttgattgtcatgtaaaaatccacacatatttatatattttttaaaatatgtatatatagataattattattttaatgtaaaataatagtaatttaaaattttaatagataaaatatatagaatataattttaaacaaaattaaaattttatttgtacctacaatgttttttaattttttatttgttattttatttattttaatttatttttgaagatataaaacaacaatattttattttattttattgttagttatgtaatttttttaataaatattaaataattcaatattgaaaaagaaccaatttacaataaaatttgagctaatatgcagattgaatttaatccaaaatataaaagaggaaattacactctataccctttttatattgtcctcttttatttttaccttcttttttaaaatctatcatttttacctctttttttaaacattgtaccaattttgtccctatcacttcaagatactctccatgtga

SEQ ID NO: 213133 - DNA, 1374 bp, Cannabis indica
aagcccttgaaggaaaagaagaataagaaggccaagccgaacggagcaggagaaagagcttattcaactcaagcgtggggctaagttgaagggagacgactgggccaagcaatatgctcaagaatattcagagcaggagcagtatgctcaagaatattcaaagcaggaaaagccaagcaagaagaagaagacagctcccccgacctaccaagcaccagttgaatatgctatcacgattaggaaacctgatatgcctgctcggccatctacccctataaagggaaaaggaaaagccgtcttgttggagtaggaagagtcttcagacgatgatgtcccatctgtacttgtttgggaaaatgaccctacccgcgtgtagactattttaacttgcacttacttctattatattatgctttcacatatattatatctgcttctaacaacattgttttatccgtgcagaaatgtctcagaagatactccaagccttaaataagagagtaggtgataggttgggcctgtctcctccagccaagaagtctaaaggcgatgagactccgtccaaggagaaggcgctagttgatgaggtcattgacctttctgaggagtgacctattgtggaccttccagttcagaaggtctcgaaattaagagttatagaggggaagctaggacgggtctgatcaggctacgacccctttgacggccgtggcactgagcacggagaccaagaggggtaaagatatggtccagttttacttgaaccgatcacttcctgaggtgagtgatcaactgtctagggaggacaatgagctatctttggagctggtcctaggaggagtcttgaaggaagctactcgggtaaatatctccttttttatctcattcccttttatgtagctcagactctaacatttttccgtacaggtcaatgtgaagatggcttatgcttattcctgagctaaatcagctactgccaagaaccttgacaccaccaacacactgtagagggaggtggatgtggctagaaaggaaactcaggacgtgaggagccagcttggggaagtgaggaatgagcttggggaggtgaacaagaagcttctcactactaacaccaagattgaggagctgaacaaagaactgcaagagatgccttcgaccaagaagttggaggccgatagtgtccttttgtccaaggaggtcaattatcttaaagatgagagggagagtgtctggactcttctttccaaactagggaggatgtcaagaataagcaggctcgagaggaggagctctagaaggaggtggagaccctagagatagctgctcttgaggttttctacaaattctggaaggccaaccctgaaggaagct

SEQ ID NO: 213134 - DNA, 543 bp, Cannabis indica
aagctcccttatatccaatgagtaaccaataagaagatgagaatgttctcaaagctaatattcactcaacgaagaggttacaccataaaagatgttgataaaagtcaaagtgtcaaaaaactccctcaaacaaaatgagtagctgagaagaggtcgagatcgctctaagagttggtactctctcaatcaaaaggttacataagtgaagaggtcgagaaaggccaagtggctaagggctttctcaacaaaataatgataactcacagaggaggttaagaaagctcaacgagctaacactctctcattgtgatgagtaccaaccacaaaaagggtgaagatagttggtaaaccctacacttacccgtgaaaggtaacacaaaaaaaaggagagaagaaaataagtcataaagacgaagatcaccaaactcttatacaagaacccttaaaactaaattcttatagactagggccaagtgttgactccccaaaattggtaagttaatttttggtagatctctagattaataagagggaaaagtacct

SEQ ID NO: 213135 - DNA, 841 bp, Cannabis indica
gacatccgagaagttcaaccgagccgtatgaatccgattcaccctactcagatggttccttgctaccactgcaatgcacatggtttctaatcccaccctgacatcacaattcaatttaatccaatcatgaggaggaggcctccaagtccccctcgaagatggtgtcgggcaaggcaagaaaacatcatgaagccctgcataagaagtacaaacctggtcaatacctttcaaaacatctggataattgttattatgaataaactcgtttcgcatcctccagatagtttcaacaacaatcgaagcatacatgaagacttcttctactctgatccccctattattgagattccatataaatttgatccagtcccaaactcgaatcccagaattacatataggatagatgtcccatggtgaagatcgccataaatgctacaccacatcacaggacaagaaaagatgttctatggattcctcccctaatccacataaaggacaacaagtgtcctcaatgtggaatcttcttccaatcacagatctaacaaggagcgcgttagaaaggatgcaccaccaaaggatcttatgcctctctaaaattttgctattccataacttgttccagagcgccgaagcaacttcacaatgaggagctctttccaacgcttgagtcaagtaagccgatttgctcgtgaattgcccatttttctctaaagtccacacccatttatcttctccttgaccagagggtttaccgacctttaaccaattccagacaccgtttccctcgtcaaagatgcctttgagctttaggatgttccagtctccattatcaaggaggagt

SEQ ID NO: 213136 - DNA, 480 bp, Cannabis indica
atatgaaaaataacttgcaattttttcttgatgaataaattgggcaaaaatgtcttattacatcaaaagtgggtagtttgtgcctttacattatcaaactttgctggtaggtatgacgaccagctatggaattacggggacaccaaccagcctaagacattgctgaaaagcaacttatattggtagtacttttgtaggtgctctccattccaatggaaaggcactagtactaactttgcgttggcaccatgacatgctaacttgtatattctaggtgggatgaccccaactaatacatactcggtggtaagtcatcctttggtgggatgataggttatcatacccgtaggcaaagacaaggggaatgtcgcacgtggctaaagattatatcaattaggaggacatagtcatttatgatgatgctttgttaactttttgttgttaataaagttgtttccactattatcgtcattggcccta

SEQ ID NO: 213137 - DNA, 639 bp, Cannabis indica
tgtcgaaccaagctcgaggagcttgtttcaaaccatagagggacttgtgcaacttgcacacatggtttggtttcgaagggtcctcaaacccctcgggttgatacatatagacgtcttcttcaagatggccattcaagaaggcattattaatatccaattgacgaatttcccaattgtttgagatagcaatagtgagaacaatccgaattgtggaggccttgacaacaggactgaaagtctcactataatcgagtcccggcctttggtgaaatccttttgcaaccaatctcgctttgagtctttggagagagccatctgcatttcttttaattttataaacccacttacacccaatcacattgtaagcatcagaataaggtaccaaagtgtatgttttctttgctttgagagcaccaacttcattgctcatagctccattccaaccagggtgactaagtgcctcagctacactcctcggttcctccttttcaggattccattttgtcttactgaagtagactttgggcttgaagattccactcttggatcgagttatcatgggatgtgaaggttgtggtgctggttgaacattcggactatctgctggggtttcggctgcagcaggtgagtcagccacgg

SEQ ID NO: 213138 - DNA, 594 bp, Cannabis indica
aattccttcgatcaacatcagcacacctgagtcaggttcttttacaccaataaatgttgatcactgccccgagaatgttccaccaaatacttcaccaacagccattgacatcactactgctgctacttctcctaagcatttgagacgcaccagcagagtgtcaaagcctcctggataccttagagactacgagtgtcactctgtccttcatgacatatcctctacacctcactcacttgataaattcttatcttaccataaacgttttgattctcacagggcttttatacttgcagttacgacactctttgaacccacaacatacaaccaagctgtgcatatcaagatatggaacgacgctatgcaaactgagctctttgccctcatcaaaaacaagacatggactgtggttccattgcctccaaacaaacgtgccatatgttgtcgttgggtctacaaaatcaaatataatagtgatggatctgtcgaaagatgtaaagcacgtcttgttgcacaaggctacacacaacaagaagggcttgatttttttgacaccttctcttcagttgccaaatggtcaccttcaagttactc

SEQ ID NO: 213139 - DNA, 618 bp, Cannabis indica
ttaagttatattttttgaactctataggtacataactgttaaatgtcaagtcattatccacacactattttcttattggtattttaaaactaattattttttttaaaaaataaaaaatttaatgacttagatcaatcaggaattgtcacgtagcaatttacttaacacgtaaatcaggtacctacagaagttcttaattataagttaggtatttttaccgttataaattaaacttatatatttatttataattgagatttaaacttaaatatttatgttataaattgcttttgttattaataatatttttcttgaaagttattttttcatattttttatttttttattgtaaccaagctaataattctctataaattgtttcctttttttcagaaatctttggagtttgatggttggatctttcgcccaatttattttccatagattatatttgtattgatctcagaggccttattaatagaattattattttttttaaaaaaaataacaataataacaataaacaatctctaattaaaacgacagtaattttacatttataattataataatgatctgtggatctgattttgttgattaatgtcctaattaatgcca

SEQ ID NO: 213140 - DNA, 901 bp, Cannabis indica
gatttgtacggtatgactaccttgcatcattatcttccaaggaaaaacacaccaattattgctgcatttcctacattatctccttagtatgttaattctgttatatcgtgttgtgtgatgttttcagcccaagaaggtgttatcatttgaggatgctaaacaaagagcgtggcaatggaagaaagcaatcgagggactacaaaaccggtgaaatctgatcctgcttttgacaatctcattctttgcataaattattatattgtagaggaacgtggggaattcttttcaagacagttgattaccccaaaccattatttattaaaattaaatattggaaactgcaaagagaaagcttctctcaaggtgcatactaggtactgcagagtgcacagcaatttctttaactatctattccctttcaggggcttcttctatatgacaattttgtagaatttcatagggtcttctgtgagaaaagggggtggatgggctttgttttatttttatttttctttacttgttttaaattattggcccctatgaaagttttgttcaacattgaacattccaaaaaaatatacatacacatatggcagtcttggcagatttacattgggactcttcttatatggatgattgattgtacagtttgcaaattatggaagttgctaaaaatcatttatatatttcaaccatgtcaagggtacgttacactggtccttaattacaagctggtcaattattgttttggagggaccatagctgatgtttatctattgaaactttaatatatatttatttgtatgaaagcacatgccttaccatctgtttttctattaaataatgctgataagtgacaagtcataaatacacaaaaagtttttgcattcatccttttaaa

SEQ ID NO: 213141 - DNA, 690 bp, Cannabis indica
ctagaccacatggagagcaagtaaagcctggggctacctgaaccgatccaccggcaccacctccacctccgaagaatccgggggataatgtgagggctggtaatgctaatcctcctgctgactggaagcagatgtttaagaaatgcggagtgttatacttgatcaagaagaagagttgcaatgtttaaggcaacaggctgccccagttgatcaagggttaccaccagcacctgtgccagtggtgggtaaccaagggtatatgatgtcgcaccgggactctgtgttcgagcggtttgtgaagctgtaacctccgactttttggggaggtattgacataattaaggttgagcagtggatgagcacaatcacccgtatcctcgataatataggggtgacgggaactgaaagagtgaactttgcagccttcatgttacaagatcatgcccgcgtctggtgggacatagtgggtcagacccgagatgtcactgtgatgacatgggaagaatttaagaatctttttgaagaaaagttttacaatattgctgtgaaaacttcacacatggaggactttgtgaagcttactcaggggaaaatgtcatggctgaatacaccctggagtttgatcggctatctaagtttgctggtgatctggtgcccacagtttctcaaaacagaaatatgtgagaggac

SEQ ID NO: 213142 - DNA, 402 bp, Cannabis indica
taacgatactccctaaaagttattatattaaattatatgggactcgatacttacttagaccaatagcgatattgacacataagagggtgctaggcacctctagtgtgatttagcatttctctttgttattgggtaatgttggaatgtgagagcatttgaaatgaatcttttggtgcaattttttatgtaagattgtagtgggtcccatagacatttaatggggtagttccatatttcccaaaagtgatttttttgctcacgttcttatactttttttgctcacgttcttatacaaactaaaacttataacaaacacaaccttattttatatttttatactatatggcatatttacttaaatggaatagaaatgaatggtatgatatttcttttttttttttt

SEQ ID NO: 213143 - DNA, 689 bp, Cannabis indica
aagcctccttctcaatggcctcctccagccaccgatttcttcgaagttaacacggtcgccatcgacttcaatgggggttcttgtggtctcagaatggtttttcgtgattctagtggtgtggtgtttgcttctgttgcttggaaagtcgaggctatttttcaacctaagtgggcacaggctcttacaattagaaaggtggtttcccaatgcatctcctttggaatttacaacattcaaattaaatctgattgccaaagtttaatccataaatttaatatgttcattgttttagatttgtctttaggtttaattcttgatgacaatagagttttatatatacatttaatgttgtaagttttgttgttaatgcagtagctgacactcttgttaaatttattttaacagctactgcaaatatggtctagtggcctaggtatccaaattgtattaggaaccttatcttggctgaggccatccatcaataaactcttagctctcggtctctcagatgttctatgctctttagtggtgttctctgaggctatttctacaaaaaaaaaaaaataaaataaaaataatattgtatcctttcaaccgtatgtcgggaattactaaaattgtaaccaaagtagagaatcataaacaattcaaattgttaacaaactaataattagtgaagctattactta

SEQ ID NO: 213144 - DNA, 584 bp, Cannabis indica
aattggtagatctaaacaagaaaatgacgtacgtatacactttgcacatgacgtcacgtactgtacgtagtaagtgaattaattcaaatattaacattattcttttcttcaagaaaacaaaaaattattaacattgttctaattatcacctattttccactttgtacataatcaaaatatattgtacatatgtctacctagatgttctgtaccaacacatgcatacacgttgtaccaataaaatattctttttatttcttaatatactcaaactggacaccagccttaggtcgtcatgataaatatgtaatatctataatttagatattacaaataattttgtaatttatatttcaaaattatataaaatacatattaaatacatattgctatgttattgctacaacaacaaatacttgaccaattattcgtggtatttcttggcctcgactaaccagccccttgaggaagatgaaacagattggaaaaatatcatgttcaagcctatcaaatttgatattggtggagaaaaatattttcgatttcaacatatcacaaaccgttacgcttgtctttccaaatgg

SEQ ID NO: 213145 - DNA, 855 bp, Cannabis indica
caatggcatggtgatcagactgaaagtactccaggtgttgaacatgaggggcatcaaaagtattagtgtaatattgattgacaaaacaccaatctggcctttttttttaattgtggctacccccattttaatccatgtaaaatcatcaccctcatatgacagatcatgcaacaagtaatggtccaagacttttcgaaaggcttccatctgtgattcaacccgaagaaagtcacctgatttatgatcatttgacaatatctcatttgaagtcaccaataataagccatggctccattggtgcagcatcaacaagacactaaaaaagaattcaattgtctgctgtattctatgctgcaagaattccataaaaatacagtaaaatgaaaagaaaggccatttcaaaagcgtgtaacaatcaaagtagtttgtattgtatgataaaagagtgacttcgatattgtcattctataagagcatcaaaccacctctgaagactaacctaagggactttaagcttgttattaaaatgtaaaaattacctaaagcgagaaataaaattgctacgaagtttagtttcctgttatttaagggttagtaacaacatatacaacatatataatttttttttacatatctaatatttattggtaaaaaaaataaattggtcctggtataactattgacaaaaaatatattactaagtagaattattctcttcaattatattaatttgagtaatatttttaaattaatatataaatttaaatagtattaatattataatttattgtaagaaaacaaaaataagatattatttagtgtgcgactgtgcggttttttttagttgagttattt

SEQ ID NO: 213146 - DNA, 324 bp, Cannabis indica
atattgaggttatttaagctgttgaaagttgtttttgttggttgtgggtggtgattgagcaaggtttgagtttatgaactcaagctttgctctttaatggtgaattttgatatagatattgttggttggttttattgtatggattatgttgattatggtacaaataggtgttctgaaagttattgtaagttttgggatcgagttgaggtgtgtaggtggttttgggtatttcctgcactgaacaggtcgaccggtttagtgagacctgtaggaactggaattccagttagtctccaagaaccccaccgaaccggacttccggtt

SEQ ID NO: 213147 - DNA, 625 bp, Cannabis indica
aacatgagtcaaatatacaagctgccacaaaaaaaaatacatgcatctataagcactgcagtacacgagagaataaaatcactaccatcacaataattcaaaaacttacctgtaaaaatatggtgcagccggaaacatttttcgtgttcttagtcttgtaccgctgtagagagctcataagatatcgaaagccaacagtcgcccaattcttcttcttaattgaccttgtatcaactaaagagtgcatgtagctagtgctgacctcggtaccattcttgggcagtaagactgttccaatacaaacaagcacaaacttaatgagaaacaggtaatcgctctcgctgctttccttcagctcattctccagcatagtcagaggaaacctatagtccttggcctttaaaattttgtcaaactcaaggaggtcacggtcactttctgttgccacatgttctcccccatccctgattcccatgacatcctcaaatagcttggacgatagttgaattgttcttccaaatatctacagccgagaagtggttagatccacgtgacgataagccaactaactatcttagcatcgatgtatgggccatcctcccttgagaatgtagagaaactggta

SEQ ID NO: 213148 - DNA, 700 bp, Cannabis indica
aatcctatataaagaataagatgtctctcattatcataatctacatcacactattctgtcagataactgagaaacaaagagcctctttagaaatttgaattcttcttctcttcttccctgttgaaatcatgtcatatagtgaaagagtacatgcgtactcatatcaagtcaatactcaatcatagtgtagaagattgtgaagaattccatcatgaaaggagaacctagttcagctcttggcaatattctacgatagaaaggaacaagggttagaaatctgaacggaaggagccacaatattccactgccaccaatgtaagattttttagaaatttatatgtgtttattttattgttttaagagattcatgtttgtttaggatgttaggttatataatataatcaaacatacatgttagtaaatttggatcctggtaaattatgaacgtaagtgtacgcagttaaacaagtaataaaatgataagtacgatcgtctccacatggattgcaaacaaaatatgttgtaaaaccaactaattacaactttaagtaaaaggaaaatgataaaaatggtcgagcaatgattcaaaattaaaatgacagtaagtaaacttgctaaaattaatgctattgttgctaaaaaaatgctttcaaaaagtgtaatatgtaaaaagtggattgaataactaatccctcctatg

SEQ ID NO: 213149 - DNA, 726 bp, Cannabis indica
atgagtcatcatcaatatcctcattgtcatgacatgttgtggtattttcaacacgcaagtatatgtattgttaacaaattatagactcacaaagagtgaggtcgatcccacaaggatagtatgtaagtactttaaaattaaatttttacttctatttggctatataaaatttaagagaaaatttaaataaaaaaacagtaaaaataagaagcaagtaaattaataagggaattaacaatgaataaaggttaagactttcgatttcaattgcatctattgattatggttaaacatgatgctattcctattaccaaattctatgcaatagcacgtttaataaggtaattatagtcttctcagatatataaacctcaactacatgcaaattttctactctcatgataagttaaacatgtaacaggcattaaacacagaaaccctataagttatccaaaccatataggtactcttgtcctatattgaaatttgattctattttactatatcataattgacagtcgcttctcagattttgtatcaaaattataaacaattaattgtcggctaaacaattaaaagaaattaagtacgaatgaaatagaaaacataaaaattgaggggaaattaaatcatattaaaaaaaaaatcaatgtccaacaatttccaatctaaaccctaaatgtgttgtttagctactcatgttcatcataaccatttcacacctat

SEQ ID NO: 213150 - DNA, 830 bp, Cannabis indica
cccaggagggcggtccaattttatacaatttggcttgttggggttctttggtcagggcactattaacttcatttcctctctctgggtcactggcaattgcttgattgtcacctgataaacctggttctgtatttagagactctgtaggagtgtcaggatacacttgaggcggtctagtgatgactggtctaggtccagagaggacaggggcatcatcctcgacccacacttcttcatgtccttctcagtcatcaaattttacgttcattgattcgaccacggtgagagtccttttattgaattccctgtaagcccgactgttgatggagtaccccagaaatgtcccttcatcacttctatgatcaaacttggccaagtgatcacgatcattcagaacataacacgtacatccgaaaatgtgcatgtggctaacgtttggaggtcttcctttccatagctcataagcagtttgagaggtatcagtgggaaggtgaactctattgcacacatagtaggcagtattgacagcttcagcccaaaatcgttttgaaatatccttggcttgcatcatgacaagagccattgcttggagagttctatttttccgctcaacaactcaaatctgttgaggattttttggggctaaaaattcatgaagaattcccattccattacagaattttgagaatatggaatttttgaactcttttccatggtcattcctcagcctaaatacttttccaactttggagtctttctcagtttgcagtctcaatatcaaggcagagaacgatctgaatgtgtcacacttctctctaagaaatttgacc

SEQ ID NO: 213151 - DNA, 906 bp, Cannabis indica
tgttttaatgttttacaaattttttaacgttgaaatatagatatgacctctagattttgcatcgtttgaatattttaatcggtggtatttccatatttttgctcggtactgtatttgcagggttgtttgtgttttgttgcccccaataaagtagtacatgtaagagctcttcatacttgcaatgtttcagtatgaattcttcactagcctcataactgacataattatttcttcttcccatcatccattgctctttaagagaacatatatagatttcataacctgcaatttttcccagtacttcattaattcaacatttttttttcaattaaaacaacaataaaataacactaaaaaaacatatttgttcattgatttggatgcgcatttattatcatcgatatccttaatttataataaaattaaggtcataagccaagagcgattatagaacaacgttgaattttgtaatgtacattattaatcgtttctcagggacgatctatattaatctttactttcttttaaatggcatgtataattatacatttttcagtttatactttattttttttcgaattcaagatctaattatgggtatatttttttatttgttatttaattgaattagtgtgagttttttcttttttttttctttttttttttaaaattcttggctttaatgaagttgttgggtcttaatttgtcgtcgatttctttttttttttttttcaatctcgccgaaatttatgggtgttttcctgattttttatgttgttgtggtcgctatgtctgtcgacaaggaagaggaggcttcattcttcctattttgtgtttacagtataaagaaaaaaaagtcttaagggcagcataaagtcattgcaaaattctacaatgcacaccctt

SEQ ID NO: 213152 - DNA, 522 bp, Cannabis indica
gtaatattgtacgtagtggagcaatattataaatatatttagtctacttaggatttttgtcactctaattatgctctatgtatattgtgccttttgattttttttcagtcgattaaaagtagtctttaattatttacagtattgtaaattaatttttctatcaaattttatcacatataacaaacaaaataatgatatgcctatttaaacaattgtcgtgttatatcaagtgtgtaattaattttaaaatatttttaaatttagttttatgtaatttttttaatcattaattaatgtttttgaatgaatgaaactttattagatctgctaaaaaatctaacttacacaaatttagataaattcggccaccaaactcttatttcaacaagagaaagagctaatgcaagtttatgagcaatacagttcatagaacgaggaaaaaacaaaaatttagaaacatgaatatttttgcacctaaaataaatatcttgcaatacctaacaatagttcaccacccaactc

SEQ ID NO: 213153 - DNA, 612 bp, Cannabis indica
tatatatatatatatagataactaacataaaatcctaaaataacccataataattatttaaaacatatcatttaccccatataccttagcctttcatgctcttattagagcattgctattgggcattagtggtgcccaatatcttttataggtagcaatgcatccaacgatttattagcgatattttttaaaagttaatttcttaagttatatgagactcgatatttaattacatcaaatagcggtatgacattgaggagagtgctagacactagtgatgcattttatcaattctcctcttattattatgaccctatttaagattatattcaagtgttatcgaaaactcaaaaaatacaaaaaagaaacaaaatctttgtgtaaatataaaaaattattctgaaattgttgtcgattttgtctattattatgacacattattgtgccatttatattattgttttaagattatatttaagtatcatcggtaagtataaagattataccaaatcaatggaatgctaaattttgcactattccaatgtatataaatcgaattctaaattttgtgcaacactaagtagatagtgtttttccttctttttttttttt

SEQ ID NO: 213154 - DNA, 1146 bp, Cannabis indica
aaaggcatatgatattgtgggaaagttatgttctacttcaatacaactataatgtcatgtaatttagaaataaaataaaaaactgtaagagatcacaagagtcattatatgtatttgtttcttttaaaataaaaataaagtcattaatattatttatacttaaaaagattacaataattttgagacgtcaatgcttttttctatgtttttataataaagctagctaattaaatagagaggaaaggaatttaattaagggtaaaaagggatgataagaaagaatggttatttatttttgtatataataagaagaagtattatgacgttctttcacatatatattacataatatgatatatctctcttcatgtccaatcaataaagcaagtccattatattatgttaattaatataaacaaaaaagataagagaaaatcaataaagtagagatcgtaccaaatatgacatgtaaaattatatgtataagatagcaatgatggttgtttcatggacttggtaattattgcattaaaattattgtttattaattgtcccctttgaacaatctacagttttttataataattatgattataattaaatatgaaaataatattttaatttttaataactattaaccttttattctccactcaaaaatagtgttacaacttacaagaaatatgagaagaaaaaattggtgtttttttttaatgggagacataggtactctttaattaagaagggtttataatctatttatataattattattaaattaaaattgagtaacagtatataaggagtgttgattgcaacattttattataatttcttagtcaatttttacgcttgaaattagatgccgcaaaaaatattttttataacagtattcgtttcagttacaatattatctctatattttttgaaaaatttcaaatagttttaccgtaccgaaaatagagttcacgatatttttatttatcacatgtatttaaaaaattttaaatttattgttgacaaggataatattataatttataattattataacgaatactattataaaaaaataaaaaatatatatttttggtaaaaggaggttgaaggtaccacttttcaagattgataagggaaataatatgt

SEQ ID NO: 213155 - DNA, 554 bp, Cannabis indica
atttaaattttgtaataagacatgctaaaggtggtagcaagtgattggtccataaagccaactaaaaatacgattaaggtaaatattaatgcttcaatttttcacaattaaaagttgtagtgaaaatattttacatgattaagccaacagaatttggagttttttttttaacatagtataatattgtgaaaacattaaaacaacataaaactgtaaaaatgtaaataaaaaaaaaattctaaaaatataaaaagatttcgtttgtaggtgtactatctagattttcttaagttttggatttgtacaccacatattgatattttctagtttttttttttaaaaaaatattgtgtactattttaacggttgttatcgttgttttttaattgttttacggttgttttaattgttctatttttttgttttaccgttgttttataaaagagtatttttgtaaaaaaattcgtgtaacagtaaaattgtaaactttaacctaaaattcaatatttttgtaaaaaactttttttaggtttttgagataattacataagaca

SEQ ID NO: 213156 - DNA, 643 bp, Cannabis indica
gtcatgatgatcacctaattataatattttcctttcttagaataaccttaatatactagaaacaaatatatcccaactaaattgggatcatatatatatcatccaaattaaataataataaaattaatattaattaataattatttgtgacatggcatattagtgcaaaaaatgaaagatatcacatcgatcaaataatgcaaaatcacacaatatagcacacattagttgtttgggagagatagatggatagatatatacgtatatatattctcacataatatatatgaataataattggttatatatatatcttatttttttttgcatgtatatataagaaagcaaagaaatttacctaaagaagaggtttgtattttggtaaggtttttggcttggctggcaatagcagaacaaaatctgtagcttggataagatagatgctctttggctttattacaaatatgtataaatatttatttatttatttatatacgcaaatatatatatatatatatattaaatcttagcctagctggctagagagagaggcccatatctctcatccccattatattcccaccaatatatatttacaccctaaaacaccccactttctctgtaaaaataataaataaaaaaa

SEQ ID NO: 213157 - DNA, 586 bp, Cannabis indica
cccgtctaatcccgataatccaaaatcaaatttatgattgtcccaatataacgaaggttctaagccaacccatgtgactctaacggccattcgtcgcattttctatcgttacttagcaaaaaacataaaatactaaatttcacatatagcatatataatacatttagaatttaataaaatcttcagaattgaaaaattataatcctaatacctattttcagaaaataggacccacaacatgcatattcatatataatcataaaataaaagtaatttaatgctagttgtcctattaatccatattctaatcatccagtcattataatcttcctctatcacttgcttcatctttctcaaggagcgatatacacatttgtcctttttagatccatttccatccttcttcctctaaacactaaacatgagactttccaaaatcactagcttcatacatcacttctttatttttattggattaatcgccttataatatttagaaaaagaaagaggattaggatttcaccattgttttagaaatatctttttaagcttaaatgacaagggagttttttttttctttcttttt

SEQ ID NO: 213158 - DNA, 570 bp, Cannabis indica
tgaagtgtaaaattaaattaaacgtaaatgtattatgaataaagtattaaaatatctttcgacattgattttttttagattcaatctatatgagctttacatctaaaaaaaacttagtgtaggtatttagccttttaagctctttcttaatctagttattgtaatatcaatttaaataatttttcggtaatgatacttgttgagaattatggggttccaactcaaaatcaattggcagtgagtggaatagcccaatgttgacaatattctccaatattgaaaggttctaatactttagatgtaaaacattatttctgatcgtttatgaagtgtaaaattaaattaaacgtaaatgtattatgaataaagtattaaaatatctttcgacattgattttttttagattcaatctatatgagctttacatctaaaaaaaacttagtgtaggtatttagccttttaagctctttcttaatctagttattgtaatatcaatttaaataatttttcggtaatgatacttgttgagaattatggggttccaactcaaaatcaattggcagtgagtgg

SEQ ID NO: 213159 - DNA, 683 bp, Cannabis indica
aattatgaggtgacaagtcttttctcataggatcgataatcatcaattcaatactattgtatagaaatgaccactttatcttctttaacatgttctctctcatctaaatacttaatgtcattgtgcttgcttcgacatctactttagtttttcctttagccatgaaaataacagttgaattgtcacagaatatgcttaatggcatttatatgtaatcaacaattttaaagcctaaaatgaaactctttagtcatacaccatatgatgtagcctcgaaatacactactacaaaaaaagctttcttcttcgatttttaagtgacataaaaaatttgtgtcagttgatataattgatgttgtagtagtagacataaatactattatttttttgctttttttaaccgacgcaaaaagtttttcgcttcattaataattgaagccaaaagtattgaccggcgcaaattgattttttttcttcagttatgaacggccgacaccaacaaataaaaaataagtaaaaaaaattgaaccagaaatctcactagggcacccgatagatttatcaaaaatctaaaaatctagatctaaacaaaaaaaacataaactaatttatacaaaatatacacaatccatatctaaccaaaaaaaaaactaaatttatacaaaagtatacacaaattaatc

SEQ ID NO: 213160 - DNA, 614 bp, Cannabis indica
atgattatataccacatatacacgatgagttatctaatgttggtcgagaggtcttctaggaaagacatttgtctatcttctccttttgtttttcagatggctctttgtacaccgactcccgatgaaggctagcgttctctggaattagcttatgttcttgcaacttcaaagttgtgcacagtaatcgccaatcgcgatctcaaacagggaggctaccgagaacttcagcgacttctttgcgagttgggtacagaacaggtcgagccggtctatctgcaatcaataagaaagaaaatgttaaccgatatcataaggtcacgtgaatattaactaagtgctaaaaagggtgacgtactaggtcggcgattaaagtcagtcctaatccctagtactttgaacatgtaaaaccacttagatttggaatctcccatattggaaatcatgcgttctaccccattgatttcagaagtggcccacttgccgaaacaatagaagccattatggaggcccacattctttatatcataaaaatactaaaatcctccatcgaaggctcactgtgcgcatactccacgtacatcgcataaaactcaagagctatgcgatagctgttt

SEQ ID NO: 213161 - DNA, 416 bp, Cannabis indica
agaatttttatcaaaaataaaaaaaataaaaaaacttgatgacaaactttgtttgtttggtgacttctattgatgaagttaaaatgttttctttttcattagattattaacgattggagtttaaaaggaacacaattttataacaaattatccttgtcagacacaagtttcagcgagaagataaactatctcattacaagctataatgtatatctattaatgtaattgtggatcgtaatttatctttattttttatttattataaaaaatttatttagagttttttatagttgaattttgcaacatggctattatacaattggctaagtggtaagtgctaattgcttattattattctctattacttttttatttttattatgtataataaaacaatttggttgatttttgtagta

SEQ ID NO: 213162 - DNA, 927 bp, Cannabis indica
agtcttgtaaaaagaccttcttgtccccttttactaataaaaacaattaaaacatcacaagggtagaatggtcatttctaaatcccgaaaataccaataccgctaaaacttaacaaagataccccgaataaattctaaattatataaagtgcgactctctataggcccaacgtcgctttccacagctcccgagcacaatcacagaaattgagaaattgacataaatagcataataaatatatatatgaactcaaataaattcccataaccgtattatttattaataataataaaatctcatacataaatcctaattatttaataatttaaggtattaatcatatgcggtctttacagcatggtttattacataaacaatcactgaaatagtaaaattgaatgaaattagacaaaaatacttaaatctaacaatcttaataattcaataggcatttttaacgaccttaaaagttaaaaaggcataatttactacaggtcaaaattcaaaggacaaaaatcctaattagccttattattttgttttggtggaaatttaattatttaatgtttgttactttgtaaaatttgatattgtcatagtccaccgtattctgagaaccaccctatagaatagcccaccattatggctgggattgaaatccggataagctctatacttcctctaaaacaataattattataataagacaaatcggataaacataagcggaacaataattcacaacagttgaccccatcaaaacaacccgccacgtgtaaaactctgcactttcaacggtctagatcgatggttcacaattacacacgtggaccccattgtacttttaatacgatagcctagcccccccttttatttatttcagtgtattaatggtattggattctacctttgtctgattcacacta

SEQ ID NO: 213163 - DNA, 1037 bp, Cannabis indica
cgagtagctttataaatggatcaagttagatttgattcagctatgattcgaactaatccatatcatgtaatgagccaccttttgcccgccctgttagatcagatattcggattggatcagatccgactatcttctttttcatttaagaattttaaatttatatctaagcttataattttgtattagtattatttaatacaatactatgtttgatattggcttgtattaatagattgtgtaaagttataatatatttctaataaactcaaccctaacaccaactacgggttgggtccaagtccgggtctgggtctgagttcgggttttggtctgggttcgggtcccgggtcccgggtctaggtctgggtcccgaatccgggtctcgagtctgggtctaggtctcggctttgggtttgagtttaattccaagtctaggttcggttctaggttcgggtttaggtctggtatctggctttgggtccggcattgggctcgggcttaggtgcgggtcagattttgggttcgggtctgggtcccaagttcggtatcaggttcgggtctaggtccaagtctaggtgtttggttttgggtccaggtctgggtccagtgtcttgggcccaagttcgggtctgagtttgggtttgggtctaagtcctcgattcgaaacctgggtttgggtctaagtcctcgattcgaaacctgggtttgggtctgggttcaagtttgggtcccaagtttgggtccgggtgtggtctcaagtttggatctgggtctggtcctgggttcgggtctgggtccagatcaaggtgttcgggtgtctgggtccaagttcaggtttgggtcccgaatggttccgatccgggtataggcctgattcttgggtcccaaaaggttcggctctaggtccgggtttgggtctgggtcccatgtcttaggtccgagtttgggtcccgagctgttccagtacgagtccaagtccggttcccaggtcccagggggttgagctctgggtccgggcctgagtttgagtcttgaat

SEQ ID NO: 213164 - DNA, 735 bp, Cannabis indica
atatatatatataaataccttctcaattacaccagtatcaccaccaaaacctccaccacttttattgaaattaacaacagaatccatattttcaccttacaaaataaaaaacaaaaaatggaagcatagaacttaaaatacaaaacagaggcaaaactaacacacaaaacataaacaaataataaacactaatataccttctctaaattattattttcatccccaacaacttcacccgctacaccaacatttgcatccacattttcactctgaacaacaatatcttcagtcactgctgtatcttgctctttaacctacaaaaaaaaggttttagaataaataaaaaaaatagataatttttgttaaagataaagcatataacaaaaaaattaaataataaccttctcatcatctttggactcaggatcaaagtcttcatcagtatcatcaccactaaaatcatcataagccacactctcacttctaccagcaataagatgttagaaatattttaccaggatctagatttactaccaagtatgttttattaacatcctaatatgaattctaaaacaatgaaataaacacatataaagtttaagaaaccttacattgggtgcagcagaatataatgactccttccattcagatctctagcccttgattcctttctgtagcagagcattatcaagatctgaatctggatctctttctctccttcctttgatgttgatt

SEQ ID NO: 213165 - DNA, 909 bp, Cannabis indica
gcttaccatggccagaagagccatcggaaccccctcgtatgcatgggcacaattctcaagtcagagaattgtgtttagccattctttttttttctgaaaaagagtaattttcctatttaattaactctctaaagaaaaatatcaaatatataagtgtcttgaacaaaatcaacttaaatattaattttctaatttaattaaatatatcgagaaaaataccaaaagtctacctaaaaaatatctgtctagatatttcacttttggagataactaattccctgccaggcagtagagttccaaacccttcaacataactatcaaatggtctacccaattttatcaaaaattctggccgccacataagaattagtggccctagaatcaaataacacatagaaataagagttgttgaccgagagctgacctgtaataactaagggactggcttctgcatcagtatgggtaagagcaaacacccttattggagcaggctttgctacggtcttctactcttctttcttgagttgcaggcaatctcttttgtaatgtccaggcaaaccacactgaaaatatactcgccctttacactcacccagatgatgcttcttacatttgggacattctgggtaagtgtatcgggtttcaaaactaccttgacggttgccacgaccctggttcccttgaaacctcttgttctgatttgagccaccaagtgcagatggtgcctttctcttctgaagagtaactaccacccctaccataacaaaaggtaggaggagcagtgactccaccaaccacctgagtccctcgagactcttggatgtactcaacttcgccctcagctcgtaatgcttttcccaccatgtcagcataagtggtgttagttgtcggttgtgatcatcaggtcat

SEQ ID NO: 213166 - DNA, 508 bp, Cannabis indica
atgcactcgtgatagaaatgcatgcatttagttttggtattttctgttgtgtaatttgcatattcttagactgttctaggttaattgtagaacaacttaggttaggtttggaaatttaattgatgctcaaccctaatagctaattatctgactgcgcttcgattttaaccttaaatcgttcattcccactcgtccataaggttctgataagaaactaggttccaattgaggttttgaacttctgggactggaaattccatttctgtgttaaatcttttctttcgattctcaaccaagcctggtcggcatatacaatctatttttcattcgttactctgaccaactcttattctcttgtctcccatcttttgtagatgaaccctagtgatttttggggaggcaagcatcatatcaaccaggacttcttcaactcctgtacgaagaccaaccttgcctccgagctaatccatcttcatctagtgttgatctttcaaattctagtttcaaa

SEQ ID NO: 213167 - DNA, 647 bp, Cannabis indica
ttaattttaaaaactaaacaagaacttataggaactaaaccaaacaagacgctgttgaattttgtttaagttcaaaaatgaattacttgctaactaaatataaaagacactaaaatattatttttggttttagtcatatttcagtgatggttgaaaaatatatgcttaccatgtatcatttttttttaaaaaaaaaattatgataaagataaagataaataatttttaatattaaaaatatattatagatgtagaaaaagaaaaagatgacgtggaaatagtgaaagagacaaaaaaaaaaaaaattcaacacttcttaattaatgaactacaaagaaaaacaagaagaaaaaacaaaactttcatccatgtatataaaaacaagagagaagggattggtatatacgtcggccaaataaattcacaaacattcgctaataaaaccattattggtttttttttttttttgaaaagaactaatgttcattaattagtaaaattgatgagaatcaccgggggaataccctccccttgatacaaaattgccaaatcactattaagtcttgcgcgtttggctacaccatcagccacactattaaaataacgattaataaaacagaaacaaacgctagtaaaactattagata

SEQ ID NO: 213168 - DNA, 771 bp, Cannabis indica
aatggtatttatcctattttaaattgagatggttataataaaggattgattgctttctgttttagttcttgtaaaccgattcacacaccatatttttcataaagtttcggaataaaaaacttttatatcaaatttacgaatccagcctatatatagatacacttaaatttggttatgtaagttttggttaagaatacagtaaattacaatatatgtattatcaattacgttacctaattaaatttttttaaaaatttaaaaagtcagtacaaaaaactgttacctttagtgataactttttagtcacaatataaagtttttgtaactaaatgtgacttttagtcacaacaaaaaattatttgtggctaaaacatacaatttagacacaagttatcactgatttagttttagtcacaacaagtataacaaattataatttttgtgactaatacttttagtccacggaccttttagtcacaacataaaaataataatttataattagtcacaacttttttacttttagtcactaaattttgttgtgactaaaagtaagattttttgtaatgagtaggtatatatataatcatatccaaatgacactaccaatacaacaatagctaaaaaaaaactttttaaagaatcaaaaatctcaaatcccatttaaaataaaaaaaactatattacctattaaaaaaaaataacaatataatgtattctacttaacatcaactaattgaaccaatttagagaaaaaaaaaaaaacctaat

SEQ ID NO: 213169 - DNA, 502 bp, Cannabis indica
tgcagtcaaaataatcaactagtattcatgaaagagcaaggcaaatgaaaattcaagaaacaagcttcaagtttaaccagaaccacaaacaagaaatagatcctaatcattgaagaaagagaatagcttctggcagttttttccataaattggcttttatgaccatacctcgagaaatcagagaacacatgtgatttaagtatttgcttgatattcttaaatttctctctgagctctgtgatttttggaatatccctataagcttcaaaatgactacacaattggttcacagcctgaaatgaatcatgaactatatatataagtagcaattgaagaaacattaatttttatttttgaaaagaaactgaacttgaataaaaaaaaaaaactacaagtcagttaagcaaacaaattaaaacagtttacaacaagaactcttatgcaacaaacagagagtttacattaaaaattccaatctctatgtctatctatatcagcaaag

SEQ ID NO: 213170 - DNA, 1608 bp, Cannabis indica
gcaaacgcgagaaggaagcagatttcaacgttatgttgattaagaaagcatgagcaatacgagaagttatcaatctgagagttactcagatacgagatctgtgagcaattatgaacaaagagaacagatcttcgtgagaatttgaatcaaagacaacccgatcttcgcgagcgactaaataagaatgcacctgacttatgccattaacttaatgctaaccagcaacaaatggaccccattcagttgtgaatcattgagttgggagacaaatttagaaagtaccaggattgggagcatgggaaattacctggctatgactcggatgaggaaaccgagccatttcatcctgatattatgaattttgaattccctcagggattcaaaaatccacacgtctcgtagtatgatgggactactgacccaattgctcatttgaataacttcaataccataatgcgagccagcaacgtctcaaataaactacgatgcattttattcccaacttcattgactggggcagcgagtagctggttcgataaattaactcaccattcaataacttcttgggaacaactttccaagggctttaagaaacaattttaagctgtcagagataggcgaccagaagcatcatccctaactaacataaagcaacaaccaggcgagtcgattaaggcttacctgagttgcttcagcactgccgctacaaaggttaggaacttgaatgacagtatttagcttactgctctttaagtagggatcacaaccgacctttcgacagttgggggagagttgtgggatgacttacatggtcatctagtaagaaacattaatgaattcaacgaaagagtgcaagtgtttatgcgcaaagaggaagcaagaaatgagatgaaattgctgaagactggctcgggaaacaaacccagcacaagtactgccacaacaagtaccttgtcaacgaaggctgataatccaagtgattcaaacaccaaaagaaaagatgactctagagaatcatctaaaaataagaagaagtagaaaaagcatgacgaatatgtgccaatttacaccgtgtacactgagttgaatgaaacacatgaaaacatctttctcgcaaatgagcagagggttgcattccacaaacctgagccaagaagacatccgagacataaacgagatccaacaagaatttgtcgatttcataaagacgtagggcatacgacggatgagtgtcagaaactaaaggacgagatagagagtctaatttcgcggggatatttcagacaatatgtgaaacgtcaagggaacgagctaaaatagcccaatcagcccaacaacccaaataaccaaagattgcaacctccccctattgagggcaaggatatattggttatctcgggagggctgcatctcgctggagagagtaataatgcccagaaaagatatgtcaataaaataaaaaacgagcaattggtgtttgctccagaaccactgataaaagccaaaactaaagaacctccaatcatattcttggaggaagatacaaaggacatatgttgatcctctcgtcgttgcagttcaacttgccaacaagagaataaatagtct

SEQ ID NO: 213171 - DNA, 834 bp, Cannabis indica
taaaagttcaaaggcatgatttattacatctgaaagttcaggatgcaaaaatcataattaatctttttttcatttgctaattttacaaataaagggtaataattaagcatttttcatattagagagtactaaagttatatttaagtagatcacttgatcaatggaagaaagctcaattgagtgacaattacccttcgttgaatcctgaatttttcaataaaggggatgagctttggactaaaccagtgactaataatgtggacgctgcaatatttgacagcaacaaccggtttggaatcgggttcgtggtgagggattgcaaggctgagctactgtcggcagtggggttgtctcggccgcggaaaccagatcctgctaatgccgaagccatggggatacgggaggctttgagctggttgaaggacaagccgtttcagcaagtgtgcgtggagagtgatagcttagtctctgtgcaagctattaatagttcggtggtgatttattcggtgtttggtttaattgttcaagattgtaagtctttgttagactctatgaataatgtttcgttaaggtttgttaaacgttctgttaatcgagctgcacatgtggttgcacgtcagtctcgattatttgttgatcgtatgttcacgaaggatgatatctcttcggaacttaaagttgtacttttgagcgagtgctcttgagttaatgaagtttatttttattcaaaaaaaaatatatttaagtaaaatacaaaataccaaataaatatattccctttaataaatagtgctatgcattaatattaacctaatctatatattacagtataaa

SEQ ID NO: 213172 - DNA, 560 bp, Cannabis indica
ccattagggacaccgaatgtcctctgtgctcttcggacgtagaagattcatttcacctcttctggaaatgccactatgcaagggccttgtggtttagttgtgtctggaatttgagaactgatcggccaggcatcttacactgggatgcttggttgacatggttcaagctggatgtcaaccggccaagaggtctcaacttcaatgcctttctcgaaggtgcagcaatcatttttgagaaaatatggactgaacgtaacaacagaattcacaatgcgaaagatactccgttgaatgttgtcctcttccacactaatagaaggctgttggaaatgctcaatctctgcaaccaagagagttctaagaatcaatacttgctgcagccccctcctgggtggaccttctgcaacacagacattgcaattggagacaacttctctgttggggctgctattttcagaaatgaccaaggtagagtattccatgcctgcactaaacgattctcctactctgatgcattggcaggggaagttgctgcgttatcctggggtgcggaatcggcc

SEQ ID NO: 213173 - DNA, 577 bp, Cannabis indica
tcttcaattgtcattagcgaattcttggttggacgaagatgaaggcttttgaaggtcttgcttagctttttcaagctctttcgcttctttttccttctttgcaaatattttccgtcgcatatcttgcaaggtaatttcatctacctctttttcactttcaagtgaggtagattcaggatcttcttttgtcaacaaagtcatgcagcaatctgacacactgtcatcataaccaggtgccttgtcctgtaactcttttggtaagaactcctccagagttattagatttcgttttcgttgttcaaattcgtttcttttggaaacgaccttttgctttccgatccttttcttatttttttgatctttcatatctggtttaccccgaaatttgactccaaagtttctagattgtttcagtgatggaaatttttgtaggttttttcgagtacatgtttgccatgtactttccaaatcctcttcactatcataccagtcctcccaaatttctagattaggctctatcataagctcatacaacgtaggaatatttatgttttctggctttggcatgtctgagtgg

SEQ ID NO: 213174 - DNA, 1221 bp, Cannabis indica
atttaatatttataaattatacttagatggatatgaaaataacatgaattatttccatcttagtaataatttccaataaatatttagaaaaatattcaatttaagttgtttcaaaaattaatttaaattttaacatacctctaaggtttgttaagtggataatgggatgtcttcgggctacctcttattccttagttatgaatggaagaatgcaaggtggctttaaaggggaaaaggggttgagacagggagatctgatctctcctcttctttttattctcataatggagtatctcacgagaagtctccatctggcaacctcctaatcaaacttcaggtatcatccattatgtaagggccttaagattataaatctctgttttgctgatgatttaatcctgttcagcaaaggttccaaaaactcggtaattgtgcttaagctggttcttgaggagttcagctcgatatctagcctccacattaactcgagtaaatcccagatttacttaggaggtgtgaaaactgaggagaagcaagctatcatagatgggtttcacttagcagagggcaccttccctctcaaatatctaggtgttcccttgagaccgacaaaatggaaagctgaggactgtgggatcattgtggataaaatcaaacagagattacatacttggtcgagcagacatctctcttttgctggtaaggctcaactaatccattctgttttacttggtcttaggaattactggatgagtatctttgttcttcctcataatgttacaaaggaggttgaaaaactttgtcggggctttcttcggggaatgaatggtaatagaaataagattcatgttgcttcctgggagaaagtttgcctaccaaaggcttatggtggcctaggttttaaaaaattgtgtcaagtggaatcaatcaattctggccaagtatgtctgggcgatatctactaaacaagatcttttatgggttaaatggatagataatgtctatctaaaattggggaggttttgggattatgagctcaaatctgatactagttggtattggcgcaagttatgtcatttgagggagaaattcaagagagtcgatatccttaaagcaggagctaaggaccgattcaagactaactggttatacaataacagtctagtccgaaaccaagtcaattatcacaaagctatccggagttcaaccattgtgccaaaa

SEQ ID NO: 213175 - DNA, 692 bp, Cannabis indica
taatttctattaatcaaaccgaatcaattacagtcacaagaaaattttcattaaaaagagaaacttacaactcttttatatttttaagattaattttatctatgctagataacttcctttcctctacaagattaactctattttagaaactctctttaatgttactatctatataactcggactcatactactttttttttttattatttatatataaatttcaatttagtgttcgaacataatttctatgatacattctaatatttttttttgaaaatatatatgtaatttttcaaagatatttttttcaataacaaaaaaattaaaataataaaataataacaaagttcattaacttaaagctaaaaaaaaaaacaattctattaatatatatatatatatataatgcactgtatatgtaaaagcaaccttctttctctagttgttttcttttaaaattttttatataaagcaactgctttttttttcaaaaaataaaaaaaaaaaaatcaaatgtatatataaatacacactaccatattatatgtaatgtaagctctattcaaatttaatcggagtaatatttatttatatacaagtaaatgtataatattacaaaaaaatataaaaaaaaaatataattacataattttatacaattttacaaatatttacaaataaaaaaatacac

SEQ ID NO: 213176 - DNA, 878 bp, Cannabis indica
aaattagctaactaattactaaatataagtaacaaatattgattaattcaaataaaaatatatacagaaataagagaatatatattaaatatcttctaacacacctcttcagtcgaagcgggaggttctcgtatgcttagactgtccctgaatcattaaatagaacgcgcggaagaccttttgtaaaaatatcagcaatttggtaaaggaacggtacatgaaacacacggacttcgccatgagccactttctcatgaaggaagtgaatatccatatcaatgtgtttagtgtgttgatgttgaacaggattgtcagataagtatttgcacttacattgtcacagtaaactagagtagccttttgaattggacaatgcaactcgagaagcaagaatctgatccaagaatcaaaaataacattagccacacccctgtattctgcctctgcactgctgcaggagagagtatactgccgtttggaagaccgaccaaattatctccatggaaaacacaatacccggaagtggaacgacctgtgtcaggacacccaccccaattagcaatatttcttgaaagttattttcttaagccatatgagacctgatacttaattacaccaatagtagtatgacaccgaggtaccagtggtatcttttagtaattctcaatttatatctatatatttaggtgactacttaatggtttacatttttattgtaatcttacatttttattgacatgtaatagcatgttaacaacatataaaaattccttttttagaattaaattaacaataactaactatttttaaaataataaattttaatttgaatatttaatgataccctttttagtaaataatattaataattttatttt

SEQ ID NO: 213177 - DNA, 509 bp, Cannabis indica
taattaatgatgcggctgttatagatagtttctcatgtactttttttgaatcttactatatcaactattattttttttaataggaactttgatgttcaatttcgtatgtttatatttattattatttttttttgttttgagattgaattggtagttggggagagggattaattaattattcattactcttacaaattataaatccaagccgcaaacctacccatatttaaaatgtgataaatagttagttagggagagtaatagattcagaacatgataattatttattgagaattgttaaaggcattattggtgcttaacacattcttgagtgttatactgctattggtgtattatgtttcaagtttcatataacataaaaaaattcttatttatactgctaggcgtcacttgtagaaggtgctaagcactactagtgtcaaatagtaatattcttatttattggacagatttttttctttgaggaaatttattattattatttattt

SEQ ID NO: 213178 - DNA, 748 bp, Cannabis indica
aataaataaagtaattaattaatgtacatctgaatttagaaattatattcatgggtgaatggttagactaggaaagttcgaacaaacacttttttttttaagtcttaaggaatttcttcttttcttacctttaataaaaaagtgaccactcttttcccttcttgacatggtccttcttaaattctttatgtccccttttcattttctttttaattttttaatatttttttcaatatttattaatttaattaatataaattattattttttatacttgaggcattccgtacgatgagttctctaaagagtgttttttcaagctctgaaagggtacttctgttaaagaaaaagtctctccatagactatttttaatttatacaacttttggtccaaaaaaattggtgtaattatggaagaagtttcataaatatatagcatcaaattaattattattattattattattggaatgattctaaataatacgaggatagtgtaggtaggacaattaccactacaaaaaataatatttttagtcacaacaaaatttataattgaaaaaaaaaattatgactaattataagttatcttttatatgttgtgactaaaaggttcgtaattaaaattattagtcacaaaaatcacaatttgttatacgactaaatatgcttttattcacaattgttatgaccaaaactaaattagtataataacttgtatctaattaaatattatgttttagttaca

SEQ ID NO: 213179 - DNA, 509 bp, Cannabis indica
tttaaaaaaaaaagtaattttacagaataataatttgaaattacttgaacattactctaaatttattaatttataaggattttcattacaaatagaaaatacagcatttacattataagtttactggtaatagggtcccaaatgttcaacattccagtggttttttattagcaagtcgttaagttgagccaatttaaaaaccaggttccaactattgcctcgatatcataaggaccctcccagtttgggttaaacactccagcaaatgcatctctcgtgtttgcaaatactcgtcttaacaccaaatctccgacattaaagagctttttcttcactctcttgttgaagtatctcatgattcaatgatgatacactgcattagtaatttgtgattcagtacgctttcgctcaagtagatccaaggacaatttaaggagttcttggttttcatcttgattatagaaatcttgcctatgagtcgcaatattaacttccccactggcagtatt

SEQ ID NO: 213180 - DNA, 760 bp, Cannabis indica
cttatggaagttgttaagtcattcgaaagagaaggagttatccaaggtagcatcaacgagaccttcatatgtctaatcccaaaaaaactcaacagttgtaggataaaagattatagaccaatcagccttataacaagtgtctataagataattgcaaagatgctctctatgagacttagaggggtgctggagaaaaccatccttgaaactcaatctgcctttgttgaaggcagacaaattttggattcggttcttgtggctaataagacagtagaggactatagatgcagaggcaaaagtggattggttctaaagattgattttgaaaaagcttacgatcgagtggattggaccttcctggatttggtattgtgcaaaaagggttttggagccatttggagaaaatggatcaaaggatgtttgtcttctacttcattctcggtattcattaatggtagaccgagaggaaagtttactggctctcggggcctcagacaaggtgatccactatcaccctttttgtttactctggtcgcggatgttcttgggaggatggtgatgaaggcagtaagttcaggcaatttctccggattcgaggtaggaaaaaagaagattcatatcagccatcttcaatttgcggatgacactttattctttgtcaaagatgatgactcgttgcagaagttggtacgaatagtggaagccttttgtgctatctccgggcttaaagttaatatgagcaaaagtcagttattgggaa

SEQ ID NO: 213181 - DNA, 766 bp, Cannabis indica
agacacgatagcacgactcaaaaccggcacgaaagttagcgagtttgagttttccttaaacaggtttaatggagtttattggaccacatccaatatttttaggcctatccagattcgatccaattatatattggatattacattttatcatcctgtctgattcaattaatttcagacatatgatcaattcaacacccaatagatgttggtttaattggttctatcaattgaatatatttcattaatatttattaaattagtttaatttatctaatatttttggcaaaaaaatttggatcggatcagatccatccaatgttttagatccaatatttattggattgaatttgatctgtccaattcaacaaaaaaatagcaaaaatttaattttatttttttatatatatattttacgtacaacaatataaaatttaattatttgtctaaactaaatgaaaatactaattaatttaattgaatattatatatattgaatttttaaacacctcatctaacatctgatccgaccaattggatattaaaaaataacatccgatctgattcgatcacaattgcatattcaatatttggcgtccaattatgattggattggtcgatataatagaattagatcgatttatgcacaccctaagtagcattgaaagattctacaccaatttaattacaaaaaattggtattacaatggtattgaattggatttgaataactcaactttattaggattgaattgcatggtggatgata

SEQ ID NO: 213182 - DNA, 506 bp, Cannabis indica
tatatatatatatattacagtgtaaaatgtagtaatttaatacattttgcaaatttttgaaaatttagttaatgcataaaaaataatatataataatttattgcacatgtgtcttttttattttttatgtgcgtgaatcttatgttttatacggtaaattatttaaaaaattttaaactttaaataactacaatatacaccatcatataagaaaaaatgatatttacaatgaactttcattgaaaataatcaaaggttactacatagagaaaagatgaaaacacacccatctaaattagttcatcatccattctaagtgcacaaattgctgttatgcaaagttagtagagttacgcaagtgtacgtatcaaatagtattcacataggtgaggtcgaacaacatgaaattgaaattgaatgctattaaactagacttatatttctatttagttaatcgaaataatctaggaaaaataataatacttgacagaaaattaaaaaaaaaa

SEQ ID NO: 213183 - DNA, 519 bp, Cannabis indica
ctaatgcagctatatgataatcctcaatggcttactatcaaaggacgtgcacaatgttttgtgaaaaaagtatgtaacttatttttatgaaaaaaaaaaaaactaactaaggcattatattattttaattatttttttaaaaagtaaataaataactacaggtaagagaagagctagcgtaaatagaggctgtcaaattaaaacatgttctgaggtacaaaatgatttcaaccattgatgagggttagtgctctcaactacttttaattacatttgtacattattttgatatggcttgacgcgtaaggaacagtgtccaacaaagttcatacaaaatatgattattaaaaaactgaaaataaaattaaaaataaaaaattaaaaactgaaataaaattaaaaataaaaagaaaagaagaaaaaaagaagagtgaaatgatggattgattgatagaaaatgaaaaaagaagagggaagagagtaggatttgattgatgatggatggaatgatgagtaagt

SEQ ID NO: 213184 - DNA, 457 bp, Cannabis indica
cttctccaggtgaaagaagagttatggccaacataagcattcagaaaatcagtatgtttaaaataacgagctttgaggatagaatggatgagagagtctgtgttagtccacactctccaagcttgcttggccaacagagcttgattatgaaaggataaggtaccaaaacccaagccaccaaagaacttggaaacagaaatggcaaaccaatttttccagtggactttgttagtaccctgagatccccaccaaaactttgctatagcactctggatttttagacaaatagatttaggcaccttaaaacaggacatagcaaatgaagggattgcttgaaccacagcctttataagagtttctttcccagctctagaaaaaatcgatcattccaagaattcagacgagaagaaacactttggaggagataatgaaaaatggaatcggtaaccctgcccac

SEQ ID NO: 213185 - DNA, 598 bp, Cannabis indica
cttcattatcaaatcaatttagttaaaattcatttcagagttcatttattcaatagcaactaaattcacagttaatcaattcaatagcaatcactatttaaagcccttcttattttcttttttgtatctgtaaaaatattctatttatgttgtttttatgttgttgtattgttctgtagctactgttatttttcagtctatacttggattcttgcatgtcctcctattgtgtccttttcttccacatttggtgcatttgatttgtgtctttgtctcccaactaggtcttgttcttttcttctttggtcttcccgctttcaccctttcaagtggtggcaatgtttcaatatccttgatttcttgtggaatatcccaattgctttgatttcctactggttatatagttgcttcctaggtttttagccagttttttgtgttgtagtaatctgaacagtaattttgtgggtcgagatacatctctttcatcactgctaaggcatgcacacatggcatttcatctatttgaaacatgttgcatgtgcatgttttttgttctaaattcacaacccatgatcttttactttgtatacttcaaata

SEQ ID NO: 213186 - DNA, 1202 bp, Cannabis indica
ggtcaaagttttttaattttgaccaccaccatgagaggggtacctcctcaaacgaaatgaaaccagatcacttgacagacaagacacaaaaataccatttcctatacaggctctaatcaaacatatttcattcagttcaagtacctaaaaaacaaattttgattattcaagagaaaagaatatagaaagatcaagcgaaattaccaccaacgctgttgtggttggagcagccggcgacggcgcgtgcgagcacgtgcgggcggtcggggagtgggtcagagaaggggatgaccggcatgcaaatgcagacagtagaagtagtgccaccgtccaagcccagaatgacatctctagcagctaaagcgaggggaacggtggtgctcgaaatcccaaatttcgccatttctgtaccgtttcatattatcacactctctcaaagactgactgattggttactgggaatagcccaaaacgaaccaatacaaaggggtacgtctctctctctctctctctctctctctcacactcaacaaagtcagtcaattggataaaatgatttgattttgatattaattttgacaattaagtaatggaatgagacttaagttgtaactaaatgagattttgtttaccaaatataatattttctaataataatgagggagattatgattataagtatttggacggcctaatgggacaaaagcttgaggtcggagttggagtcttatgcttcatatttatacatgtctttccatactatgatacaacagtgtattacaaattatgttgattgaaaattgtttcacgtagattaaaaagaaagaaaaaaaggtaaaaggtcattggtttgactgtgatggattttgatttatactctttggctttgaatcacaatacattccttctaatcaacatttgttgtggaagtggtgttgctgtcattttcatttattgaagaattgagttccaaattagttagcgatttttctattgaatttgtgaccatattgattttagtttctaaaaatattcggcttgttaaaagttcttcttaaattattacatttaaagaaatttagtccttctgttaagtttcgtctcattattccgtttaaataataacgtgtctttgtcaattagcaatttaattccttaaaccttaacaactattaaatcgtacccctcataataaaaatgag

SEQ ID NO: 213187 - DNA, 604 bp, Cannabis indica
gattaattatgtctttttgagctgagtttgaagcttttgttgagaattgttcaaggaaaggtttagagaaccttagttgggtctttaatggtgttttattaaattgagttgtttgctgtggtttattgcttaaaatgagttgtttggagtataagcaagtgttctagaagttttcagaaggtttgattttgatttgtgttgtggggattggttttgaggtttccagctatgaaccggtcgaccggttctgggaagcatctaggaaccggtcgaccggttggtacccaggaactggggttccggttgggaaccggtctgccggttggggctttttcccgagccctagttcttcccgtttttgcgtaatttaaggtattgacatctaaattatcgatagggttaatcttagtttcaattttaaacccccgataagtgttttagcgtgtctctcatcgaattctaaacattatggtttagggccctgtaaagcgttgagctgcgtttccactcagactgaccgacacacttgagcacagaacgaggtaagatagcataagaatatatatatgaatatacgcttattttagatgttggcactactagc

SEQ ID NO: 213188 - DNA, 643 bp, Cannabis indica
ctttagggcttaattttgacctaaaaaattgtgaattttgatatagctatctctacaaaatttatagatatttgaattatctttccaacgtcagaggaatcacctcaatcggagttataaaactgcagatatggttgttttagtaaaatagtttctatacttgtgaatttctctaaacctacgaatttcttaacattaatttaataataatgttatttaataccacttataaaattaattaaatctactaaatatattataaaaccctaatggactttgctttaattaaacaattacttaacttgtgaaaataccataatattttattttcgtagttaaatctattacaaccaagtcattaactctattacaactaacagttcttagaacaatatatactcttattggtatagagcacttgtatgtaacaaagaattatcaagagaaacaccagacgaagtaacctggttctggtagaacaacttatccaaagtattgttaaaatagcataataaagaactttttataacaaagcaaatatcaaaagagttcactgcagtaagtaaaggcttggagcaatagatgatagaatggagtattggagctacagctagtagttaatgttgtagaattacaataatta

SEQ ID NO: 213189 - DNA, 647 bp, Cannabis indica
attattattattaaaaaaggatataatttgttcatttactacaagaaaaaagctttttgtcggcgagttttcttactggcaaaagtatacatatgttgccagtatagttttctcgatgagcttttataccaacaaaggatgctggcagtaattcgtcgacataacgtgttttaccgacgaatcactataactcaccaatagcttatataagtttctcaccagcaagtcagctgaggagtccctgatgatgttttgtcagcaaaatattgcaccgaaaaaactttggcactaaattcgcatctaatttatttacccacaaaagttttgttggtgcattatttcgccaacaaaacttcaccaataaaaaacattattttagttttttcaactagatgtagtttgctggcaaaactatttatttaaaaaaaattatatttataaaaaataaaattaaaatcaaaatttttaagataataataaataaatataatccaaaatattgttagtttataaaaattaattatatttactctgcaaattaaaaaataaaactataagtccacaatcgggagaggtagtatgtgaagaagagccatcgctgggaggctgaaatggtataatcaatggaattggaggcatcgagacat

SEQ ID NO: 213190 - DNA, 765 bp, Cannabis indica
tattccgttgttgattccatagcatttaccaaacaagagaatagaaattccaatccattcaatcccattcccattccattttcacttactaaccaaacgccatcttaagggtgtgggggctatattcccagtaaaaaaaaattgtattaaaaaaattaaatatttttctttttatttgataattatagcacaaaaaattattacggtgcaccatacatcaagcttgtttcaagcaaatgtcgggagtgaaaaggaggtgaacaagaattggggatcggcaaaagctcctacaaaattaaataaagtacctagaaaaaatttaaattaaacccccacttaatgaaaattctatagtatccaaattaccctcacaacctcacataactaagacacaattttaaacataataaattgtgttctttagagatggatgtgtaagtttgtgagaaagttaagacaaaattttggttagagaaaaatagagacgtgaaatgataagggtaaaatttgtaaaatgattgaaaaaagaaataaatataatagattttgaaaaatgtcataaaaaattaaaggcattaatttgaaagagatatgtagtataattttctcattattttttatattactttgatatatatttagtttatatcaattttttttacttatttaaataatatactaaataaagatatatcaagttacaattaaataatattaattaattaaaataatttatcacaaattataacaacacaagaaataaaa

SEQ ID NO: 213191 - DNA, 1001 bp, Cannabis indica
  modified_base (997)..(997): a, c, t, g, unknown or other
ctatacttggtacactagtcatattctagtcgcaccgatgtgacagcatcgatcagtatctgagaccaaacatacatctatcggtaaccagtataactctacatatactaataccgctatcgatgtaatctaataggcttaataaacatgtacgctaaacatgtaaacatatatgcatatcattatactaatcttacctcatttctgaattcaagtgtgccagccaacctgagcggaacagctgctcgacgatttataggcccctacatcacataattcgcaaaactgatgagtgacacgctaacttactttttggggacttaaaatcaaaactaaaagttcactatcgatgaataacatggtaatacactgactatcgcaaaaattagggtttccaaaactgccccaatcggcagactggttccccaaccgaaagtctggttcagtggggtttcctagggcccaactggaattccagttcctataggtctctctgaaccggtcgactggtttagtacaagaaacacccaaaataccaccaacacccaaaattgattccaaatgccaccaaaccttccaaacctactaattagatcacaacaaacatactccaagccacaaaaactagaaacaacctgagaaactcaaatcaccattaaagacaaaagattgagctctaaagctcaaaccttgtacaaacacacaactaagccatcaaacaaccccaaatcaactcaaataacatcattttaactatagaacacaaatttaaactacacttcaacaacacagaaccctaatcctaaaaacatgcaaggaaagctaacttgaaacttaaggaatcataaaaggatgagcttgaaagcttacctaggattcgaacctcaacaatgatgctagaaatgctctgaattgttgaagaaaaccctaacctcagctgtctactatagagagagagagagagagagagagagagagagagagagagagagagagngaga

SEQ ID NO: 213192 - DNA, 780 bp, Cannabis indica
taaatatatttttttaataaaaatcttattggtcacctgctttagcaagtcaccaaattgccacctcatcagtttttagtacccattaatggatattatctattgagaaattattcatatatatatttatatgtgtaatttagatcaattttatgttttgcttagtatattttttttttgagtgtagcgtaatgttatttttacaatcaattaatagcttaatagcttaaaggtgctgggttcgaacccatgacctccccttttttcccatccctccttcaccactaagctagccttagtggcttttttgcttagtatgtttagagtgcctttgatgacactttttttttttttaaataaaaaagtgaaaatattttccaaaaacatgttttataaaactgttttcactttctaattttaaaattttgaaaataaatcactttcaaaaaaattttaaacatttttttaattaatattttgaactccgaccctaacctggaccttgggacacggactttggccccaaccctagtcccggacttggatcacggcctggccccagacccgaacctggacttgacttaaataaaatcaaaaaataaaaataaaaatgaaagttatagaacacacttttattttctgttattaaaattaaaaataaaaatggttgtaaaatacattttatttttaaaaaacaaattttaaaaactacaaattttactttattttatgattaaaaattaaaaaaaaacaaaattagttaccaaatgtccctgtagg

SEQ ID NO: 213193 - DNA, 516 bp, Cannabis indica
cttaaattaagaatcttacttacagactaaaaaaaaaaaacgtaaaaaaaaaaaaaaaaaaaaaaaaaaaaaaaaaaattaatgcgaaaatgctaagttttttaagccttaaagcaattactcaatagtttttttttatgatagaaaaaaaatcaataattttattttggacttggtaaagttaaccattaaactaattctcttcttatattattaacggaattttccatcaacactatcaaaacttgtaaagtggcatactgtttttctaatatggtagtaatgagttatttggtgatatgataatttattattttaattactttttggtaaattattatgttggtgacttttataaaaggtaatttgtattggatactttaccataaaaataacatatcaaatgttgtttatcatatatatatatatatcaaatgtatttatcaaatactagagcactcttatcagcttatctattttatttttcaaaggaaaatttcattttttgcccttaat

SEQ ID NO: 213194 - DNA, 572 bp, Cannabis indica
gctgctattccgatacatgggaatatgtgtggccttgagactgttattcatcaccataagtgtgcggtaatagcagctgctgggcgcaatatgcatggcagtttcttagtccttgtggctgaaagtttggctatttatttggggcttgagttatagctaagaaaatgcagctccatccttagtaaagtggagtgcaattttagatgaaattcttctctctaaccttagttctcattattgatttctgcatgtaaagaaaacctgtaatacaatgcacattgccttgctactttttctttggtcaaagggtgtaattagtgttgggttggagagattcccatctgtgcatctgttaattcattttcaaaaaataaaataaaatgagcaatatggtatatactttagctgcatactatatttggtacaattattattgttgtaatgaaaataaaaaggttaaatttgtatgatgtacgttggagttggtcttaggaccgaacaaaagtataattttattgatgttattaattaatcgtagtgttgatttatagagttaatagttaaataattta

SEQ ID NO: 213195 - DNA, 580 bp, Cannabis indica
tcaatctaaaataactgatccaaggatcagattggattggacttgaactattgtgcggattggattggatccaaaatataaaatcttcacgtgcggatcagatgcattatgagcaaaatagtacgaattggattagattggattggatgaacactactctaatcaagtggaatatgtattatgtatataattttaaattttagtgagtaaatagtatggaaatggctaattaggatattggtctcccttgaactttgaccatgtactagatcatgtcttaaaattttttctgaactattgagatggttggattttaggatatttgtccaatttcattcaattttactaattttttgattgtccatatactaaatcatgctctccaaactttcatatttatcaaattatgtctctcgaattttgacatgtaccaaattaagtctcttgaactttcatccatgcatgttagactttttttactaaaattgaacaaaagtttttcaatttaacaatttcaatagttcagttcaagtaattttaacattcattcaaaaaggatgatttgatacatgttaaaata

SEQ ID NO: 213196 - DNA, 630 bp, Cannabis indica
caaccatgtcagctgggatctgaaaaaaacatattcgaaataatatttatcagaagtatcaatcaacaataaaatataataatcgattgatacatatatttttaattagaatattattattagctattgcaattaaacacaaatattgttaactataagtttccagataatcatgttgatcagttttcttgattagtttttttaaacacgcttattgttctaaattattatatttatgaaagtatgttattgatctcgtttgacttaattaacttaataggcaattaatgatcatgctttattacttatttcatgtttataatccaaagtcttaatttaagaacataataagttgctctctaataaattgcacttaccaaatcaagtatcaacttgggatttcctaagaagcatgtaacttttcctttggcataaccaataattacgctatcaacagttctgaaaatatatatgccattatcaataaaacaaatatgtattagacatatatagttcatatagtttcatgaaacgatatcgttatatgaaactatatttaggaataacattacaatattgataatgttacacgtactaacatcatcagtatcatcagaacaacaaatcaat

SEQ ID NO: 213197 - DNA, 658 bp, Cannabis indica
acatttaatgtattctttattatcctgaatggaagcataaatggttggagcagtctggtgtctttccaaataagctttttaattagtttaaataacagtgtcttctctcacaaatacacaaaaataaccaaaaaattacaaaaatacagtttcaagaaattataaacatttttactattttttaattttatttacaaaaaattcaatttttttatattgcactcttattaaattaaattattataattttttattatctatatattattttttgttgttgttttgatattatttagatgtcatattcatgttatttttatgtaattttcttattatttttgtgatgtttccattaaaaaccgtaaaaatgtaaagaaaaattctttaaacgtaaaattgtaattcttttacaaaatttggtgcattatgtatttatctcggaaaaaaaaaaaggcacaatttataacaccgaggtggccaacacattgaaggaacgaatttgcattcatcacgaatctgcgaatagtagacaaaaagtataaatataaaaccaaaaaagaggtggtcaacttcaatcttaatgaaccagaagaagaaagtttaagtatattattagaccagacaaagctattggaaattggcaatggcaaagtaattt

SEQ ID NO: 213198 - DNA, 568 bp, Cannabis indica
gtcgcaattagagctacagccatagccagaagagcatccgcggcattgaggaggagggggagggtggtggtggtggtgagccgccatgggaggtaaaatggaaaactcaaggtaaagcttttgccaaaggctcgagttttgagcaaatgtttgctaagattgagggttttgtttgccttttctggatttagttaaagctgcaaaatttggttaaggcagtaattaataataataagaaatggtaataaagagggaatatgctaaattaattgattataggcctaaaaagataaacttatagaaaaattacactcatcagtcatcacacaggccactgccattttttctttcttaaaaataaatagactaatgctaggtgtctcaacaaattgtctctaaaagtaatatttttaaattagatgagatgctttattttttttttttattatttaagcgtttatatattacaattatgttaacacacatactcacttatggccacttgagctagcctcaattagttatgagatgctttatttaattacactaaggggctgtttggaatagg

SEQ ID NO: 213199 - DNA, 481 bp, Cannabis indica
aaatgacaatatattctcaattcaaattaatactgatgccacgacatctattgtctaagtagcatagacctatgtgctgcgctcacacatgtatttataataaggccttagattggttcatctcggttctaattactgagtctcacctaattatgtcttacccgcataattatgtatctcacatatatggggatagtattgcattcaagatcatttaaacactggagtaataaccctagatcgtataaccgctcactttagggtaataaccctaatcccagtttctcacttaatcacatcataatatcaaacatgtgcgaagtatgtggagatttcgaatcccgagtgttcctgagcaagcatcggtagtcgtagtcacacattcttgagatttcacaaatagggctaatcccaaaattcaatttaacataatcacctaatatctattccaattatatataagcatatagagctcaaaaca

SEQ ID NO: 213200 - DNA, 1205 bp, Cannabis indica
aaaaaaaaaaacaatgtaatttctaccatgagaatttaataatgatgtggggtcttgctttaataataatgcatgttatttataattaaaatggttcaaaacattactataatattgatatgaaaatttgcaggaccaggtttatcaagaagtagaccacacaaagtgattttccacccagcaagtggactttgtattgtaagaaaatcccaattgggtccattgagtttaggtccctgctctagttctgtagcgtggcattattcacgtgatgagaatatattgaccatgagaggaacacccttatgcttacgagcactacagcaaggaaaaccagcacagcttagcaaacattgtaaaggctttgactccaaatggaagcccatttcggaatctaagttgcacctctctactacaactggcaaaaacgacaccgtttgccttgatgttgactctgcaaatgaagttgtgatcataaacacttgtcattgcgtgagtagacatagttcgtgtgacccgtctaggcaatggttcaaacttgttcacagcacaagaaaaccaaagttgtttggatctttttctgatagttttgattattatgacacaaaatcgtgagtattaggattgcttatatcacatgcaattgctgtacgtaactgtgttcacatatttacatattatatgagaagggaaaaggactaatacatcataactctttgagaagaatataaacttttattgacggtataaactcatccatgatgttagttgccgaaaactcaatgtatgaatgttaaaaagtttttttttttggaagaaaaaattgtatttcatctaaccaaactttacaattctatagcgcttccctttaaaggagatttgaaaaaaaaaaaaaaaccaatctattgaatctttataaacttataatgcctaaaatcagaatgtcggaaagttagaacgtagatgaaatcaaaatgaaacttaaaaaaaattacgtagagtaacaatggtaaaaaataatgtattgtattatcaacttaatagcttatgttacaaaatatttctaccctctcaacttagaaaattgggtatttataggctcagattgcctaatactgttgtgaaaattatgtagtatatgtagtcacacaaataataaaagtgataagtaagatcgtccccacagggattgtaaacaaaaatat

SEQ ID NO: 213201 - DNA, 421 bp, Cannabis indica
gcatgttttgattgtttgttaatatagagcacataatgaagtccacacaatccataataatctcaacatgtaataatatatattttaattgaataaaggcagttttgccttaaaaaactatatcactgcttcttctatatacatataattgattaaatatggtaatatattaaactattttgatacatgatcatgcagtggcagactccagtagtgtgtgtttggtacgacatgttgaggtcgaaagagggaacgaacgtacgtacgtcagtaagcggcgccaagcccaggcagccacgctgtgccagaccatgtcccaaaaccctaccaaaattatacaaacattcactgccttttctcttcgttacaccctaaaaccacacaaaatatttctcaaccctccgataacattgcctctact

SEQ ID NO: 213202 - DNA, 1042 bp, Cannabis indica
aattagatcacatcagttgatacgttttatttgaggatctagatttaaatacacaatcacctttctctatatgtataattcattttcattctacataaattaatggattagctaggatttggaaagttccataatgatgctctcattcctccaaataaagcagaaattaatattaattaattattttatctagaaaataccttaaattgttctcctcatattttacttatataattttctttgactcagaaatttgtcaataaaataagaaagaaagagagactgagaatttaggttgttgactaatgtgttgaattgtaatatatgttgatctgcttactttaatatatattgatctttgcattcgcaggtaattaactctgttaaaatttgtagattaattatatcttatttttatcaattaagcttaaacaaagacataaatatactatagattcactttaaaaaattaagtttatataatattttcaactattatattttataagcaaagttttttaaaaaaaaaataataactaacaaaaatttatatatataaaaaaattaataatagcacaaaatgaatatcatatgtaaactcgtttacactattatttttcaatatataacaagcaaattcactcaattttattggatatttcgttgttattcgatgaatatttttatactcctgtagaaaattataaggatttgattaactttcgagttttttttgaggaagggcaaaaggcaacaccggtaagatgcatctagccttgtgagatcttgtctgcaagcctaagaactatagaggcttgggtttctggaaaaaatccaagtggaacaaaaaggtttgattgctcgatacatctagactctttttacgaaacaaggtgttttttaagttaaatggatcaatgatgtcatatacttaaaacaccaagattttggatggctgataagaaaggagatgtgatttggtattagcagtaaacttcttaatctttggatgttttcacataggacacaattctagatgcta

SEQ ID NO: 213203 - DNA, 1088 bp, Cannabis indica
agagagagagagagagagtcactcagccatgcttggccctagattaggggcgaacccacgtataagcgaggcgaggcagtcgcccctgaacaaaaaatcgggaaaaaaaatatatatgcattttagttagttacaacatatatttgtaataaaagatgatatttataaatataatattaactttggtgtaatgattaagctaattagcgtatatgttagaggacaagggttctaatctcaccaaaagaattttttttcttttttagtttacttttgcctcccctcacttaccaaaaagaaattacaccccctcactttaaattctaggtccgccaatgccctaggtcactcggtaatggccaagaaagaaagtcactcaaccatacaaccttgaagtcactcgaccaagctaaggaagagagtcactaagccatgtttggccctaggtcacttggcaatggccaagagagaagttcacttggctatacaaccttaaagttactcggccaagctaaggaagagagtcacgcagccatgcatggccctaggtcactcagcaatggccacgagagaaagtcactcggccatacaaccttgaagtcactcggccaagctaaggaagaaaagtcactcaccatagtgaccttgaagtcatttggccatggtgaccttgaagtcactcgaccttggtaagacaaaagtcactcaggcatgaccaagaatgaagtcacttgaccatgtgaccttgaagtcactcaacctttgcaagaagaaaagttactcagccatagtgaccttaaagtcactcgatcatgatcaagaatgaagtcactcggccatggcaatcttgaagtcacttagccttggcaagaagaaaagttacttggccataatgaccttgaagtcactcgaccatgaccaagaatgaagtcactcgaccacggtgactttgaagtcactcgaacatgaccaagaatgaagtcactcaaccatggtaactttgaagtcactcggtcatgatgaagaagaaggtcactcgaccatgcttgaattaaggtcactcaacaatgaccattcaagaggacctt

SEQ ID NO: 213204 - DNA, 1260 bp, Cannabis indica
tttagatatatttatcgtaaaaaattaactttatatttatctacaactaaaagttaaatttaaatatttataccacaaaaaataataataattgttataacattaccaaaatatagatatatttcgtaagatgttgccaacgttgcacgtgcatatttagtttctatgtttttggtagtattaagatatatatacatatcacttttaagttaaactaagccttatttgattttcaattgttcaatcagaaatagaaggcatgtatagtacgtagtatagtaccacattttttgttttcactttaaaggcaccaccataaaataactcagatctaattcttatttcactctccaatgacaatataatttgcaaataagtaacttctatttttggtgatgtctcaaacacgtttcatacaccaagtctttaacttttttccccttaaaaaagagaaaaaaaaaaaaaaaactattaaaacaaagccttaacaattacttaagcctgtataacaatatatatgctagtcaacttaatcaaattaccatacaacatactaaaacaatttgttagctagtatttttattttttattttagtttatttatttatttaatctcaatcttttttaaaaacgaaaaaggtgttcggaagagttctcagaaaacatcatcgaaatcgacccaggttaacaaaatattaacttgggcgctgggccagccccaggtgtcaacttgagctctgagccttctttctgacactcgagaagtgttgtttcttacctgaaagggattttttctctgtttttgatgaatacgaagaagatgcaaaagtcggatcatttctgatacttggaaggcgcccagattaatagattgtcaacctgggcgctggggtgctcgaggtcccggatgctcaataatgaacttgctccaattctaattataatgcctcaaatatgtcagtggtatgtctagttgatgtctcgatgcaagttttgacccatttgcactaagacatttccgaaaactaaaaccttagttggaaatgtcaacttgggcgtaaaacccgaagtgcacaggttggcttcgggttgcaggttcgtgtaattttagctcttggggcttggattagattggtccatgtcttcatggtacaaagtactaaaagatagtgagttggattcaagttattgaaatctgaacttccaccccgaagcttctgaagtcaacctgggcgcagggttagggtctcttcccagatc

SEQ ID NO: 213205 - DNA, 507 bp, Cannabis indica
atcataggtcaatcttctgtggggcggaagttctagttctatgggcaacatagcttcatagctataggccatagagaatggagtctatccagttattgtttttttaattgtgcagtatgaccatagtacttctggaagtttctccggccaattccccttaacttctttaagtcgttttttcaaagtatctttaagtgtcttattgactactttgacttgaccatttccttgagggtgtgccactgcggagaagctttttacgattccatggttcgtgcagaaatcagtgaacaattggctgtcaaactgtgtggcattattcgagactattttgtacgggagtccgagctgacatattatgcttttcagcgcgaagtccaatactttgttagatgtaattgttgccaatggctcagcttctatccactttgtaaaataatccactgcgaccactacatattgtactcccccttcacctctaggcaattgtctgattaggttaattcc

SEQ ID NO: 213206 - DNA, 555 bp, Cannabis indica
agagagagagagtgcgctttaagaaaaagattctgtttttaagtttacacgatttttattgttaaattcattaacatgatcatcaacgttatactacatcgagattacgagaaatagaacgtttattaatctcatctttatatcttttaattattattatcttataaatatttattgcttgcatttgatttgatcagttttttttttcaaggctatcattgattgtgttattagaaagatcatcggctaatttgtgtataattttttttgaattataattggttatggaagcagtgattaatgttgacaggtactactctttcatcatcagttgagtacaacaagaacaacaataacaagaagcaagtgatgatcaaaagaacaaccctaagaaagaacagccgaatttcttctggctattataacaataaaccatctgaaaacattgctccagcaacggtcaacgtttctggcatcatccaacaccttccttctatttacttttttaattatgttaataataataataacccatatcatcaacgacaacaaaac

SEQ ID NO: 213207 - DNA, 531 bp, Cannabis indica
ttgtatattatagttattaaaaacatgtttcaaattttatcgaaattttaaatatgttaatgttactaaagttagggttcaaacttgcatgctaagaattaaatatagaaattttacgtttatatttctccaatattttcaaatttttaagcaatatatttttttcataaaaaattagagatatatttccgaaatatacatggatctcgatatccagtagcagagagaagagagcgcaggtgggatcatttgcctttcttaactttttcttcatataaattttgtatataaatttttaagtattttattttatattttgacctcataaataatttttttatttatgttcttacatatttttatttgtcactataaaatttatatattttttatttttatttttataaaatttatatattgtattaaatgcttacaaaaaaaaaaaaaaacttaccccaaccaaaatattgggctgactaataaatccatgattattctttatatgggcataaatatatatgttttaacata

SEQ ID NO: 213208 - DNA, 893 bp, Cannabis indica
tgtgccccagctccccacattttgttacatttgttatattatttcttttcccaatcaactttctttttttatcttctagattttaccctttcaatgggaggtaagactattactgttcatgattctttcattctagttacctcaaataaatatttagtggttgctttaacctgtgtaatttaaaattaacattgttaagtatacgaaacaacagtggaacaatccaaaaaattgttagaattttatgccctaaataaaactcatttcaatatattcttatttgctatcaatagaagattggaagtcattcaagtttacatgtagttttcatgattatgattttaatatataaattttgttaaatccagaacatatagttatttacaattacagtgatgtcatcacaataggaaagtgattgtgattatatgtttcaaagtctttagtcccataatttatcagtgcactgaatttacactgacgtgataattatcgataaagtttacttacacttgtataagtgaaatgtcctttccagggtattagcaaagtatgtattgagtatacatcagattgaatcgatattgataatggaaaagatatcacaaacttacagttatatctttttaagtcaatatcacttagttgatcttagatcaatagatcttaatccttagatggttagattttagcttaactatattatttgtgttcttgacttgttcgttaaagttgaccaattggatcggcccaatacttacatcttgggaacatggtagtctaattgaatgggagctttaatcatagatatgcaatctatagcttctataactgtatagaagtgaaataataattacctttgagcttggattaacaaacataaatggaagagc

SEQ ID NO: 213209 - DNA, 588 bp, Cannabis indica
ggcataaaacccaacaacacattggattgggatttccctgaggaaatgttgagagagctgaagttcccatcaaaatttataagcttgattatgacatgtgtgaagactcctagatactcattgatgttcaatggatctcttcatggtttttttgaagctaaaaggggtttgaggcaaggagacccgatgtctcccttactttttgttttatgtatggagtacctaaatagaatcctgatcaaggtggggaagaaagaggaatttcacttccatgaaagatgtggtgaaatgaggcttaatcatcttaacttcgcggatgatattctcttattttgcaaaggtgatttcaagagtgtgtatttcttaatgcaaggccttttgcttttctctcttacttcaggcttgaatgttaataaggagaaattagctgtgtattgctcaggcatgacagatagagagatccaaagaatattagatatgtctagttttactagacaaaatgacccgttcaaataccttggagtccccatatgtgcaaggaagatcaatgcatccgatggcagttgtctagctcaaaaaatggctgcc

SEQ ID NO: 213210 - DNA, 680 bp, Cannabis indica
aactttaatatataaatatatatttccaatgaaaaaatcaatatataaatatatatatagtagggaaaaaaaaaaatagcaaataaggcacacaatttttttattggtatatggaatgagttttcaactaattttatttaggaaaattaatttcttaatttatatgaattataatttttattggaatggattttccaatcataataaagaaaagtaaatactccttttggaatagtaatttcttccctactcctatttatgtgaaccaaacactaacttgaatacagataataatttattcaatttccttttcaactaaactacacagctcatgcctggagttttctcgtgcccacactagacaaaaagtttcacatttttatgtgaaagtttgtaaaacaaataataatatgcccaactttcaaacccaatgacatcttctcttttttgggtaatgaaaaaaaaaagctcttaatgaatgacttaaatcttttgagggaataatttgtttattatcataattagtttaaagggcaacagatgtctcaatacattttggagtcataactacaacaaattagacctcgtttagattttaattttacttataactaaaaatatactatacccttaatatcttttgtaatgatcataagatctaatttcagttttatttataa

SEQ ID NO: 213211 - DNA, 865 bp, Cannabis indica
acaaggagaaagaactacttgatcggagcacaatggcttcggaacggtgctgaacagaaagaaacgatcggaggggagggtgatgatcgatatcctggtgtgaacgtgacagatccgattggggctaaaatcatggagattgattctatcaatcagggaggagagattacatccatgattgtaggaaaaaataagagtgttataggcggtagtaatgaccataatgaagatatttctgaaggagaaaaaggtggcaagaataatgggaaggtggttgattgtgatgatgagctgttaattctattagatagcaaaaggaggcgtagagacatggtgcaagcctcacgtgctactgagttagttgagaatgaggtgggccaagataatatgggcagtattggatcaaaaaacgatttgaaggtgggccttgtctctcaggcccaccagtcatcatgagcattctttcttggaattgccatgggcttgggaacccatggacccaacaattcataaaagatcttgtgatccaaaagaaacccaattacttgtttttatgtgagactttgtcaaagaaggaagttattgaaaagttgcgtgtgactattggttttgatggtgcaatttcagttgatgctagaggcaaaagtgggggagtggctttactttggcgagttgaggaggaggttacagttatggaattagggagtgactacatagatgtgcgtattacagatagtgatgttggagaatggcgattgacgggtttgtatggtgaaccaaatcgaagcttgcgtaagagaacttgggagttgttaaagaagcttcgggataagtcaagacttccttggtgtgtcattggggacct

SEQ ID NO: 213212 - DNA, 518 bp, Cannabis indica
tagtatatagtagttattttgtatgacatatttaaataacaaaattattattatatatttaatattaagaattaaaataaaaataaataaaatctattactcttaatgacattacttaaaaagctagtgggaaaagtattcccttttttttattccttatttaatcaagttcttcattttttctaattttaataatataagtaaataaatttaaaagattaattaccttactattaattctcattacttattagtaaacatactattagtatcactataaaaccttttaaacaattttactacattaattgcttatctttgagtaatttatgatatttatattatacttaataacaaacgaaacaagtcttactgtataagatattagtaattagataaataaaaggtttattgtgattttattagaaaaggaaatttgtttgtgtttatcccacattgttgatgtgataaataatttaagttgtttctatttactgtaattttatcgtttttttttt

SEQ ID NO: 213213 - DNA, 971 bp, Cannabis indica
attactatagtctccttattgtagtaatatataaggtaaaattatggtaggacctaataaaagttttctaccgataggaaatttttttacaattaatatcttgtggttattatgatgtaagatatatactcatactataggactccttgtataactttatacatattataataatattcaatgatatatttattttaaaaagtgatattaataattaaaaaatttattaatttttaattaattttcaccgttatttcacagttgttttttagttatttcagtgttgttttaattgttcagtttcgttgttttacgattgttttataaaaagacagtatttttgtaaaaaatttgtgtgacggtaaaattaggctaattagtaatttttcccccgaactttgacatgtactaaatcatgccccctaaacttttttggctgttaaaaatttttcctgaactattaagattgttagatttaaggacttttatttaattttagtaaaaaaattctaacatggatgaaagttcaaggagcatgatttattacatatcaaagtttaaggggaataatttggtagatatcaaagtctagggagcatggtttagcgtacataaacaatcactgaaacagtaaaattgaatgaaattagacaaaattccttaaatttaacaatctcaatagttcaggagaaatttttaacgacaaaaaaagttcagagggcataatttagtatatgtcaaatttcgggagaaaaaattgctaattagccgtaaaattataaacttttacttaaaagtatttttgtgaaactccaaatatttatggtaggcagtatataattttaggagtaatgattgacacacacttaaatcatacatacttttatacacaatagttgtatatttaattattacatattataatttgtgcagtgggtattgcatgattggggagatgaactatgtgtgaa

SEQ ID NO: 213214 - DNA, 601 bp, Cannabis indica
ccttaggaggggctttaatcttttacagcatcttccaaacatcatcttccatagatgagttccaattaccattgaccgcctgtaagtgattataggaacttttgacagtgaaaaaatcagttggatcctattccaaaaccaagtatcactccgaagattaacactcaaaggcatttgtttgatgagctcaacatcgcgggaatcaaacaagtcctcaataagctccaagtctcattgtctactatctgacttcatgagctgagacactttacaattggctagtgccggatgattagacaccacatacaggttagcctcagacaaaagctaaggagtgttgagcacctcagtagatgaacctagtcctattctcctacgggcaccatctctgagtagcgattgtgactcaaagacactgcgccatataaagctcagattgccacccaactcgacctccaagaatgagcagttaggaaaatatcgagccttatatatccgacccacaagagaatcttggtgcagaagtaaccgccaaccttgcttacccaacaaagatagattatacttacgtaaactctaaaaacccatcccaccagagttc

SEQ ID NO: 213215 - DNA, 1422 bp, Cannabis indica
aaaaactaaaaaaaaaaatcatcgattgttcctggatgtaaacccacaatgccaaatcacccacccctacccacaaccacagacaacctacacgactccaccagcccaaggccagatccatgacacaaactgcaattgtgctccgctaaacctaaacttcgtgatcttcactttgagattgaatgccaaaccatcattgatgcaatttaatatctagttccaatattctagttggaaattaaaccaatcacatttaactgcatggtattaggcactggaaatattactactcaatcaaaagtgataatgtggctaactagtagtgatcttcacttaaaagtggtaagcatgtttggcatcatgatcaatgcttttttagagaccaagacctacttttaaaagctttttaatgatttttgtgttttctaatggttttgttatttaagaaaagaaaagattgtaacttttattattcagaacaatcaaaagcgagacaactcaaggggacaattatccactttaataatacggttaggaatagaacatgatgctcaagcaaaccaatgagcaacaatgtttgttgaccgcctaacaaaacaaagagaaatattctctaatgaagaaagtaaaacacgacactaaatgatcaaaccataagaagaagatataatggttgagctatgaataactttaacaacaaattgacaattcgtttcaactatggcattctttcctcgaaaatccttcaaccagctcaaagcttcctttacccctaacacctcagctagttctacccgtacactacaaggtttacactagttgtgtgcttcagtcaacggaccatgagtcttgagcaacgaaagcaaatccatacctaccctcttcagagaacatatcaacaatgctatccaacaatacttgaggtgtcatactaaagttagaaaagaaacaaatcaaaatagatagactaccatttagaattgctatagggcactaatgctatctaacaaagaattgttgaaggatactaatggtgtataataccacctaagactctatgacaacactagaaagaaagggataccaaaagaaatagtttaatttaagaaattatttttttgtctgtaatatatggtatacattatgtatattgtaatattattttacaagattttttttttcaaggtgtcttactattttgaatgatttttgcaaaaataaaaataaaaataaaaaattatggttatagtattagtttataggggttactatgcacatcatgtaaaatgttattttattttacaatatttatatctaatatttaagtgaataagagaggaaagaagaagaaaaagataatagttagcaatttttttttctctttaattttatgtagatctatgtaatttttttttttttttt

SEQ ID NO: 213216 - DNA, 808 bp, Cannabis indica
ctctgctgccctgaatttaagactaaacaatcatcagatacaaacattaaaacaatgtgattaaagattggcatacatacataatacagttcagtactaatctgagaacaaaaatgcaaaagaaaagaattcaatatcaaattctattgagatacaaaacaaacacttaatatacataaatttaaagtttgtatatacagtgaagcattatctttctgtatacttattgtaaaatagaaagataactgtgtttgtgtgtatgttctttctactaaaattgcctcattaaaatatatcttaaatcttcatccacacaaaagcaacaagatcttatcaaattgagcaaaagtttctatcatcttcatcttacactctaacaaaatcccaaaacccaaatgccctacattgtttctatcattacattaacacaaatacaattcagtacaaatttcctactgaatctaataaacaatcacttcacacaactgttaagttaagcccatataattcagtaccaatttgctagaatgaatccacaagcaataaacaacaactttggtgtttaacaacagaccacaatttaatcttttttcctgttcttactaaactctgacttcttggaccaattcatatcaattcaacaacagagcaaaaatcaatcatttttcttgttcttattaaactctgctttcttggtccaattcatatcaattcattatatatatatatttaaaataccaaaattctatataatctgacagtagtaaaatgatcaagctcactcctttgcttttctataatctaaact

SEQ ID NO: 213217 - DNA, 777 bp, Cannabis indica
tcaatgtggatgctgctatgtttaatgacggtaatgcttacgggattggtttagtagcccgagatagacatagccttttggtagaagctcgcactgagtactttgtttggtagacttaatcctgaagttgtcgaggcgattggagtgcgggaggctctcagttggattaaaaaccgcagctggccaagagcagttgttgaaaccgactgcttaacgatagtccaggccatttgaagctcaattcaaatgatctctctgtttggtcaagttattcaagaatgcaaacaactcatgttagagttggataatgttaatgttttttttcgttaaacgatcagcaaatgttgtagctcatagtttcgctagagcttctcatttatattctggttgtatttttggttttgaaaatgttccaaccgatttgttaccttatttggtaacggagtttgatggttaataaaactataatttcccattcaaaaaaggataacatcattatttgatttctatattatttgatatcattgaacaggcaataaagaataaagatgaacaaagcttggactaaatttgaaaggttagtatattaatgtaaagtgtgtgtacatatattataagtttatattattattattattattattattattattattattattattattattaaaattcatactaaaataacacattttaaatgagacttcttcaagaaattatgtagaaataataattaaaaaatctactgtacaataataataataactatttatc

SEQ ID NO: 213218 - DNA, 657 bp, Cannabis indica
atatctcaatcaaaataaaactaacacaagaactagccacaacctcaaacaatatttacatttttcaacaagctatgcttactatcaatcatgtattagaatgtggacaatcaccaacccaaagcacatatgcctcaattttttttttcaagcaagcaaaataaaattaaaaaaaaattagttttccaaaacatgtttaagcacaaaattctcaaatatgtgtgagcaagtttaaaaataaataaagaagagttaaagaagaactcccctagtcaatgatgtgcaaacttgctagtgtcaacctccacaagtgcgttcaattccatttgactttatgattgcacctacaagagagaaaaagaaaagaaagagagaaaaaactacgatgcaattgtcaaaaccatttaacatagcatatactgaaatttaaaaaaaaaaaaaaaaacgaaacaaagacaaagtttagaaagcctgggttgcctcccaagaagcgcttgatttaaagtgaccttttgagaagcactcatcaaagagtggcttccgcccatagagagtggcatatgccctcacatatgggtcttccttttcaacgccctcaagcttgacgagatgtggaattgaataggccaaattatcaacttgacttgatttcgatga

SEQ ID NO: 213219 - DNA, 539 bp, Cannabis indica
aaataaggtttaaatattttttttgcacgactatttttttcttatacgcatgttaacaactgttttaattttatttttagcattataaactattaagaattttctaaaaatttatgggtgatcctaaataattacaatgtatacaattataaaaggaattggactattttttttaaatgccgaaatagatagcagtctatcaaaacatccttttaaggggtgcactacaagttttgtcgaaatagatagcagtctatcaaaatagagttttttgcggctaaatctttttacctatcactctacttgcacttaatcctttaagctcaaattttgacagtaaaatcttcaaaactactaaactggtagcaaatttaaggtgtcatccattttcgacagttaattgtcaatatagactgcttatgtgtacacttttgtacatgtgtcacatttatattggtacacctaatattattattcaaaaaaatataacaatatattatttcaaaattgataataatttttattttataattttattt

SEQ ID NO: 213220 - DNA, 740 bp, Cannabis indica
ccaattttctagtagtgatagtattttaactaaactttcgtaagtacgcaattagtagaagagaatgagatattatatttgtaatgatttttatagttcttgagagaactttcaaaacaaaaaaaagttgagagaaaaactgttatggattatagtttagtaagaatttttttattatttattcataataataataataatttaaataaaaagatgaccattccaatataccctcagttacaattattattcatctctcttattatttaaattagacaactgctacttaataaatttggacatattatgggtgtgtttaaaaatatttttttaattagttttttttttaaaaaaattaaaaagtgaagatatttttaaaaatcatgttttataaaactatttaacttttctatttttttgaacaagaatctaaattttaaaaaaataatcactttcaattttttttaaatagttctttttatcaatattttggactctgaccccaacttagactttggaaatcgaaccccgacccgacccgaccccagacttggacccgcctccagtcccgacctcaaactcgaattaaataaaatcaaaatatgaaatttacaaaacacacttcactacaagaattgtcacttttgcaggcacatttttgtgctggcaaaagtttagcattgcgctggtaaaatgaaatttacttctgatatgttggaatcaacgttggtattagaatt

SEQ ID NO: 213221 - DNA, 1339 bp, Cannabis indica
ttattaaaatactcaatgtgtctaatgcaatgcaaaaataaaaaaaaatagttctaattaagtttaagaagcattgagtgaatgttattgtattatctacaaaattttaaaaattgtggtgaccaaaaatgagtacagactactttcaaatgactataaaattttatttttagttacaactttaatggagagactagaaagagaaatagttaacattttcgatcaatgtgtttgaattcataactctaatatttggcagcataagtacaatatttgtaaaattattatttttagcggcttaaataattaatgtttgtaaaactgtaattttatattagtttgtcagcaatgattccgttattgtcttaaacatgataaaaataagacctatattctaaatcgttaggtcgaattggcctattttacatctaatttctcatatttttttttaaagaaatttatataaaaaattaatgaagttaaaattcgatacaattttattacttagttattatcaaataaaatacataatttatttttttttatatgtaatttaaatttttttaaacatcccgtgcgaaatttaacaatatgtataaaatacaattggctaaataatggtcctcgagtatttaattctaggcatcaaaatatctactctctatcaaccctaaatttattgcgattaaagcccgaccaaattaattcattaggatgcatgtgcttatatgtggtttcatagtttagatttgaggcactactctagtacttaattttggaagactttttttattggtgcttaaatccagttttctcattactattttagttgaggaatgcatatgctaaagggtaaggatggaaacgtttggtttggagtttatatgtttgataaaataaattttaattattaagtagtttgtgtttttaagtggttttattttttaaattaaaatagtggtaatgttaagaattttatattccttttaattctattcattctaactcaactcacataactaactcgactattataaaagataacatactattattgatctaatttataatcgggtttcatacattttaattaaatcaatattattgaaaattgttaaacacttgtaacatgtcacaacgttgatatcgacaagtgttacatctaagagcatctccaaaagtaattgcctgtagaattttaagtgattgcctataaaagtataaaatgattgttaaacattacatatgcaataaagtcatcattttcaatacaattttatcaatattattatttatatttggaaatacacgtggaattactctatttttttctttttta

SEQ ID NO: 213222 - DNA, 944 bp, Cannabis indica
gtaatttaactattttatgtattttttgatttttatttacagaaaatacggtccttttatgttgtaatcttgttgaatttttgttatttgtatgttattttttgttgtctattttcatgttactttatgtagttttcttgttgtatttatgttgtttttgtgtttttttagaaaaccgtaaaaatgtaaaaaaacattctttgaacgtaaaaatgtaaatattttataaaaaaatggtgtcttatgtaattattccatttaaaaaagacacaaaaacaataacaaaacttacaaaaatatagttgtatgattctttaaaattttatttatataaaatataatttttgatgtacttttatgtttaatgtataaattctattaaatccaacacatataattattcatgattatagtgttatcaatagtggaatataatcatgatcatatttttcaaagtttatgtcccatgattcatcaatgtactggatttacactaatgtgataattagcaataaagcttacttataccttagataagtgttatgtcatttctagggtattggtaaagtatgctagtatcgaatgtctagagtatacatcggtctggatcgatattgaactcataaacttaccgttgtatttttctaagtcaatatcacttagttgatcttaattagatcaaaagatcttaatcctgatatggttaggttcgatctcaattgtgttatttatgttcctagagttgttcattagagctgaccaattggatcggtccaatacttacatcttgagaatatggtaatacaattgagtgggagtgctaatcatagataaagaatctatagcttctatctagacatagaggagaaatgataatttcttttgaactttacttaataaagataaatgaaagagctcttaatttagtaattatattactttat

SEQ ID NO: 213223 - DNA, 754 bp, Cannabis indica
atgaaggcttctacgacaaccataccggggccaaagcctatccaagaagatactctaacaggggtacttctagcgaacaatggtcgaggactcgatggactatgtcaaaagatgtgacaagtgctagagattctcaacaattctaagagctccacccaacaagctcacgatgatgcagtctccttggccctttgtagtttgagggatagacctaattggttaactcccaaaaggaaaaagaggggtacagtttgctgtagtcgtagtagactacttcaccacgtggatagaagctgaacccctggcaaaaattacctccaaaaaagtccttgacttttttgtcaagaacatcatatgtcgattcaaactttcccaaaagattgtgtcagacaacgagaagcagtttgataatggcatgttcactaatttctacaacagtcatggcatcatcaaaagcttctctgttgtggtccgtcctcaagcaaatgggcaagtagaagctgtcaacaaaaccctcaaggacaccttgaagaagcaccttgaggaagtaaaaggcaactggcctgaattgcttccagaggtcctatggttgcataagactatcgagaagacgaccactgggcaaactccattcactttagcttatggatatgaggcgatgttacatgtagagctagtgccactatctcacaggagaagaacctatgaccaacaaacaaataacaccctgttggcagagtcccttgacgaagta

SEQ ID NO: 213224 - DNA, 1241 bp, Cannabis indica
cccagacccagacccaaaccataaattgtaccctgtgtcccgaaattgaaatttgaactgtaagcggaccttaaaccctaaaccctaaaccttaaaccttaaaccctaaatcctaaactctttacacttccccctaaaccctatgcccaaaaccctaaaccctaaatccctaaacaataaacccaaaaccgtaaaccctaaaacctgacctagacacgggcccagacccatacccatacaaagattggagcccaggacccaaacccggactcaaatccagacccgcacctagacccagacttaggacctgaacccagacccaaacccaaagcagaaccttgtcctggacctagaccttgattcagacccggatcgggatatcgacaaaaactcgaatagggacctagactaagaccgggactcgaacccaaactcaaacttgaacccgtattgtaacctagactcagaccgaaattcaggatccaaacccgaacttaaacttagatctagaacgggaactaggatcgagacctagatgggggacttgggcccaaacccgaacatggacacaaacctggaccaaagatccgaacctagaagggggacttggacccaaaactaggccccgaaaccgggaccgagacccaaaactcgacaccaaactcgagacacgagacaagaccttggacctggaacacagaacctgactactgggacacaaccccgaacgtggaccaaaaccgaaacataggatgcggcccaagactcgagaccagaactggaataacatggacccagatccgtatccagacccaaaccaggatccaaactcgatcctaaacccagaattagaatcagaccatgtttgggactttaacacagacttgggacagtaacaggatccaaacctaaacccaaactcaaaccagaacccacaccgggacttagaccctaattgggacctgtgacatgggacctaaaccaagaccgggacttggacccagacccagacccaaaaattgggggccggacctaggacctaagaaccagactcggacctgggatccgaaactcggacccacactaggactgggactcaaactcggacccgaacccaaatcgggacttggactcagaccgggacttaagacctgaactcgaaccgaaacacgaacttggacccagaccgagacttaggacctgaatatagatggggggaccaagaaccaggaattgggccc

SEQ ID NO: 213225 - DNA, 501 bp, Cannabis indica
cacactccactactacaaatatctctattcccgtgtgtcctaaaaaaatttttagaggaccgtcgctaaaataattaagtgagtgtttaaaattatcgagaaaaattgagtattctcgacggctttaaacattagtgatgtattcctgacggtttttaaacgtactttaaaaattgtgaattttttttgaaggggaattgtcaacagttaaaaaccatggctaatactataggcaacgattttaaactgttgctaatagtataggccacgatttaaaatcgtcgcctatagtgttattcttgacgatttttaagcgtgccttaaaaattacgaattttttttaaaggagaattaccgacaattaaaaatcgactgtggcccatagtatatgccacgatttaaaaccgtcgcctatagtactataggccacgggttttaaccgtcaacaattagttcaaatttaaaattttgcaaataacgcattttctctcattccaatat

SEQ ID NO: 213226 - DNA, 713 bp, Cannabis indica
tttaaaagaataaaaaggcacttctcaacaccttcagttttggcaaaaccaataattagagaaactttactcgccacttggctatctcggaaaatgcaattagtgcagcaatagtgcaagaagagggaaagcaccaacaaccgatttactatgttagtaaaaggttactaggggtagaatcatggtatccccctcttaaaaaacttgcttacgcctaatccacgcatctcgaaaattaaggccttacttccaggaacattcgataaaggtgttaactgatcaacccctgagacaagttttatcaaaactagatgcttctggaaggttgataaaatagtcatatcacccacgaacatccatcaaaggccaagccttggcagatttcctgataaaagggataactccacatgagaacccacttattcggcgagacgcgaacacttggaagttgtatgtggatggagcatcaaacgagcatggtttgggtgtgggggtgatactaattttgccataaggctttaagtttcattatgcattaagatttcaattcaacacttcaaacaacgacactgaatgaagccttgatcgctagtttaaagtagctgaagtgttaaaggtcaaaaatcttatatgccataatgaatcacaactaattgtaaataaattccttgaggaatattaggctaacgacttaaaaatggaaaaatacctag

SEQ ID NO: 213227 - DNA, 772 bp, Cannabis indica
catggtttgggtgtgggggtgatactaattttgccataaggctttaagtttcattatgcattaagatttcaattcaacacttcaaacaacgacactgaatgaagccttgatcgctagtttaaagtagctgaagtgttaaaggtcaaaaatcttatatgccataatgaatcacaactaattgtaaataaattccttgaggaatattaggctaacgacttaaaaatggaaaaatacctagagaaaatttggaagaacttggaaaagttttattatttaagaatcgaacaaatcccaagagaacaaaattctaatgccgacgccttagaaaaactggccttgcagaatgaactggatgaactaaacttgttaccggtagaagtgttagacgaaccaagtatatgtcaaaaggaagaagttgagatgatagatagctcgcccacttggatgacacccatagttaactatcttctcaacgggaaacttccagcggaccaaagcgaggcacgaaaactcttgtatacggtgcctcgctatacgatagtagaaggcaaattgtatcaaaggggctactcaatgcctctcctacggtgtgtcctccccacagaagcaaacgagatcatcaaagaaatccacaagggcttctgtggagatcatgcaggttggcaaagcttgtccaaaaagataatttgacaaggatattactggccaacaattaataaagacacgcacgaatttgtcaagaaatttgataagtatcaaaggttttcacata

SEQ ID NO: 213228 - DNA, 511 bp, Cannabis indica
tctctccccctcacttcttcttcacctcccgcactcactgtgcactctctctaatgcagagatcccccctcttgccctcattgtgctctctctctctcaggcgttcatccgctgccgtcgaccttggagaaccccgagacgtgagacccaaacccttgagaacccttctccctctcaggattgccccactcggcctcaatattctcccgtgctctctctcttgctcttaatctcgcctaggcagagattcatcgccgttgatagtagcaagcggagatccatcatcactcgagtataagttttttgtgccctcgatttgagttttgatttgactgtgatattgagtttaggttttgtttgtagttttagtttttgattttgtttgtgataaacgatttagggtgatagtgattttgattttgggtggtggtttaggattttttgattttgggtagtggctgtactgattttttgtatatttttatttctggttttgggcagaaggagaaga

SEQ ID NO: 213229 - DNA, 646 bp, Cannabis indica
ttagcacataaatttagaaaagacggggacatgcctaatcacttagggccttacaatttcggtattagagctgtcgggtttttcttcaaagaccatcaagatatgtacaatcatcattagagataagctcgactcacgatttagtaagtctttacatgttttaagtgttttaatcagttgagcataattagaaaagagtgataggaagcatgttagtagtttaatatttgaataagagcatgtctaagtttctataaatcggtagttagaatacaattttgaccgcttcctaataggtttacttatgaatttgtaggcttgtcctatagaatggacgcttggaaaaaataagaagtcagggcaatatggtcgaggctggtagtggttaggagggttggatttcttttgcccctgtaaccaaagaagagtctgttggagggttcattgtgagggttatgttaattcaccacaagatcggcaagactgagagcagaggtttgcaaaagtgcaagccgaagtttgaggcaagacgagtaaattcaaaggttgttgcaacaggggttcttttgttgcacatcctcctctggtcctgttgtttccagcagaacaacatcttgttggtaaccagatgagccagcgtataaag

SEQ ID NO: 213230 - DNA, 724 bp, Cannabis indica
aaactataacgaaatttgataattgatattttttgatgagggaatctctcaactacttgagaaaatatctcaactactttgagggaatatctcagccaacttaaaatatctaattgaattaattaaataatcaatcaactcaaagaacaaaccaatagggacactttactatagggtagtcacctacctggtctgattaaggtaaggatggtgtcttttgtcttaacaatttttttcttaagtttttttttttctttagtcaacttttgtctttcccccctatttaattaagtttaacaattatttatttatcacaaaaaataaataattaccattttgccaattggaaatatatttttccaaacaacattacacaactttttatccccgacagtgtttcaaggtggcaattcgagggccatggacctattacttctaaactctaataaactagattatttattaagtctcatcagtcaaattatctttgcttattaattccatgattattccactataaaaatggaattaaacgcttagtaattatagaattatatttactgagttttactgcagtgtctattgatataatcaattccagtgattagctctctttgtgtcagttcgtaattagttttggtcaaattatcgtcttacccttcttattacttctttatcatttagtactatattcattagtgaagtacaattcagattccatctg

SEQ ID NO: 213231 - DNA, 1025 bp, Cannabis indica
cattctcacgaatattaatcagactagtgtccttggagtatcttgattcttgagtctttctcttctttgcagcttcattttaatgaaaatgagtcacgaagtatagagggatagacagaatggaacctacacaagaagaagaagctgtgagcgaacgtgggcgatccatgacaattctccatctagtttccttctcttctcttgatttcttatgctcttatctatgtctgtttaattatggatttaattatgagctaaactccctatttagagatgtgatgtatattgtttgagattatttcatggattaatattagttaattattcttttttccttgattgtgtgatttattcatctttgtgtttaatatatgtttaagtttgatcaccttatgcatgattcatggtcctaatgtgaaatttaaaaattagtgaatgttaagaatgctctaaatgaataaacataggttttgatgtgaaacgtaggtatttacatagcttatgtgaattttagattattgcttagtacaaattgtatgttgttctattttagagatgcagtagtatgcaattcaagacctttataatgtgaaaagagtttaagttaatttataatctatcatcacataagaggaagaagaatggtttattagtattaacaaatagattatcaaattaattgaaattatatccctaatttcacatccattgttaaaacttttatttgtttgttttatttcattttttatttagtgtcaaaatttatttatttgattgccaaatagaaacaagaatttaatttattggtacgtaaatacagtcctcgttagaatgatttcacttacctaagtattccttgttaaaacaatacgtatacttgcgtgttggatttttcataacacctagtgattccgttaatcaggacaatgggctagaagaacagttcttcgaagacagttgttatacccgaaattcggctatcaaccaaaagctaacacatgcacttcaagaggaatatgaatcaa

SEQ ID NO: 213232 - DNA, 1488 bp, Cannabis indica
ttttctttttatatttatgtattcttattattttcttattacctatattcataatagttttatacactataaaaaattaatacttttagtgacaacattttagtcacaatataaattacttgtgactaaaacatagtatttttttttgaaaagactaaaacatagtatttagttacaagttgttactaatttagttttagttacaacaaatattatgactaaaaacacatttagtcataacaaattgtaatttttattaatttataattagccataacctttttatttttagtcataaattttattgtaactaaaagtaaaattttttataatgataacaaattcaatttaatccctagttctattttctaatcaactttcaatataaattttaattattaattatttaatccaatatataagattaaagtacttacccaaaaatccttttgcaacatctaaagcaatttacttctcataaatattattattcattcattaaagaacacaaagtataaaaaatatttattccacgagtaacatatatatggatatatagtgagaaacgtcactctaatctccaactccaaaccctataattggtcaataacttcacggcccacgcccatattttaagcaagtaccttaaataaatcatcttataaatagtcaataaagataaataatagtgttaaaaatacaaatattaatagccactacaatattaataatcaatcatatttaatttaatatcaattgaagttgaagagtagacggtccaatgcaaatttaatgagccagaagtggaccatcatctttaaccatatgacactccataactaagtatggaaaacttattgacaattttttattaacaactaacttttcaaaacagggtcatatatattgactttgccactataacattaataacagggtcagtcagtaaagtattatagtgaaaacagagagcaagattttaggtgattataaatgtaaaactaagtaatacatcaacttttcaattcaattaatgtttggattaatatatgtctaactaattatttacttttacagcctgctcagccaaagaaaatggggagaccaccatttgccaatccaactgatgcaaccaagaaaagaaaggaaaggttgataaagcaaaggcaaaggtctcagctaatgccaatatttagggatgaaagctttttgttgtaatttggtgaactttatgccaatttaacatatgaacattaactatgttatctaatgtatctatctaattttcatgtgtggcaatgtggtggacttgatgtcattttgtgtccatccttttgatgccattaaactatgttatgtattttgtttaaaaagcacaagtataaggtctttttgaaactttatgtatttggataaggatttcaatgtctttattctgtagggtacaatttatgtcttctgatgaactttgtatctgatgatgcaaac

SEQ ID NO: 213233 - DNA, 491 bp, Cannabis indica
cattaatcttaatactattatcgcttggagctacccattactcagccccttctactgatataaagccaataaacgataatttattacctaaattttgagcaagtctatattgttaagatagttttttgctaatgaaacgatgctatccgcaaccacaactttattttgtcatactctgtcattccttgcattccaaatggtccagcacaaagccaccaacaacttgattcgatcaacgtctagcaccatatgatacaccagttcgaaaatattgtttaaaaaatctattgtatacacatgatttttttttttttttggataaatcaatgaattgtattgcataaaacgaatttttttacaacctatgcgcacccaaagagggccgggatctatttacaattgttataaacttttacttagccacaaattttagttataagctctacaatagcaaaaactaaaatctctatcattgtctcttaatccttttc

SEQ ID NO: 213234 - DNA, 1215 bp, Cannabis indica
tatgctcaatgctatttctccattcatgatcattcatagacttcatactattgaaataataagacataaaatattaggggctttttcatttttacacttcaaaacagttttttctgcatttttatgaaattctacatagaaacccctattgcaactagcgctgcaacctaaattggaacaaaaaatcgtacagaaacccctattgtaactagcgttgcaaccactttagaaacccaaaccgtaaatttgaaaaaaaaaacttaaaaaatataaccatataatcaaaccgtaaatagtatatgggataattcccaaaaatattattaattttttttattattcaatatatataaccatataatcgtataaattaagtatattaattttaaaggaatgtttccattatgaaaatataataataattattattattattattaatgaaaaatataattaaataaccaagtataacattccaaatataagaatatattatttaaaagataactattataaagattcctaatttataaattaaatataaattaagtatgtaaaataatttattatattagatactatagtaaatgatagaattggtgcgttttcacctatttcacacaaaaattaaattttctaaaatgaaaataaaagtaaggtaggtggtcttgaattcggatctcctcaaccataaactagtggtacaaccattacaccaaattaaattatttaatattatttggtttacaatatatttaaatagtttataattagtatatgttaggtttcatcttattatttcgtttaaatgttcacatgtcttttttaaattagcaaatttaccgtgtaaaatttgacaactatcaaatcgtaccccctgaaaataaaaataaaaaatattcaacattcttttagtaaaaaatcaatttagatgttaaaaaaatatattaaaattttaaattcaaaactccctaactttatagtcttaagcgaaataaggataaaaactattgaactgatactgacgagacatatgtcagcttctatttacatagtcaaaaagaagatatttactcgttcaagtagattaaatgtaatcatatactgcaacctcagattacatatagcagccaacgaaaagaataagaagaaaatgcagttcaagttaagcagttatgaattattatcccacatggaattaaataaaacgtgaga

SEQ ID NO: 213235 - DNA, 809 bp, Cannabis indica
tacttatccgcctattcatcctttatgcctctcaaggatggggtgagccatccccacacgacaccaattggctcttcgatctgaagtcaacccccaagcagagcaggtcggggtacttcaacctctcccaactggatgataaatggctgaaggttaccgtagaccctgacgttagcaaaatatggcattttgtacacgagtactacttcgtgatgagcatggagaccgtccatactcggttccaacatattccgtcgtactgctgccctcttttaacattgggactcatggaaaaggaacaaaaattctccaactgtcagaggatgctcggaatatcactttgttgaccactgaggcaaactttgtgaagtacaagctttacctggaggattttctgccaaagcccgtgaaggagaagaagaagaagaagtccaagccgaatcgagctgaggatgccgagcaagagaaagacctcattcaactcaagcgtgaggctaagttgaagggaagtgctagggccaaacagtatgctcaagaatattcagagcatgagcagtatgctcaagaatattcagagcaggagcagtatgctcaagaatattcagagcaggagaggccgagcaagaagatgaagaaggctcccccgatcgagcaaacaccaatagaacatgctatcaggattagcgaacctactgtggctgtcacttatctaccctggtagaggaaaaaggaaaagccatcttggtggagcaggaagactcttcagatgacgatgccccatctgtaattgtttgggaaaatgcccctgc

SEQ ID NO: 213236 - DNA, 680 bp, Cannabis indica
agcttccttcaagacccctcctaggaccagctccaaggatagctcgttgtttgccccggacagttggtcactaaccttaggaagtgatcggtttagatagtactgggacatatctttacctctcttggcttccatgctcagcgccacgattgtcgaaggggtcctagcttaatcagacccgtccgagctcccacctctggaactcttggacttggagaccttcttagttggaagctccacaacatgtcgctcctctgaaaggtcaatgacctcattaactagtgccttctccttggatagagtctcactgcctttagacttcttggctggaggagacaagtccgagctgtctcccattctctcctttaaggcctagagcatcttttgagacatttttgcacagattaaacaatgcagttagaagcagacataacatatgtgaaagcataatttaagagaagtaagtccaacttaaagtaccctacacgcgagtaggggtattttcccaaacaagtacagatgggacatcatcatttgacgagtcttcttgctccaccaggacgaattttcctttttcctctataggggtatatggttgagcaggcaaatcaggttccttaatcctgatagcatgttccactggtgcttggttggtcgagggagctttcttcttcttcttg

SEQ ID NO: 213237 - DNA, 507 bp, Cannabis indica
ggaccaagactcgaacctgaaccgagacccagaccacaccctaacaaggatcaaggacctaaaaacggaacttgaaccagaaccagacccggaccatggaacaggaccgggaccagaacttgggcctgaacccagacccagactgggaccaaacccaaacccgaacatggaaccaaacaagaactcaggaccaagacttggaattagggactggaaccggacctataacccaaccaaagcaagaccagaatctgaaccgggacttgagacccgagacccaaacccagaccttgacccggatagggacatggactcagatcgggacccagacccaaactcaaacctgaacccgaactgaaacttcaactaggacctaaacttattacccaaacccaaaccgaaacctggacccagaccgggatctaggatccagacctcgatggaggacctgggacccgaacccgaacctagacctagaattgggccaaggatccaaacctagatggg

SEQ ID NO: 213238 - DNA, 685 bp, Cannabis indica
agcatgtagaattcatgcaaacatcaatcacttcaaattttcttatattgatactaatcagattgtaaagtgttttatttagggcataaaacccaacaaatatatcttactcaaatatgttgacaaatatagataatatgtcgataacctatcgatataccgtaaagaaaaaaattaatgttcaaacaatcaaataacccatttttgatttttcagccgatatcctatcaatatcctgtcgacatcctatcgataatcagtttaaaaatatatcctactcaaatatgtcgacaaaccatagataatatgtcgataacctatcgatatacagtaaaaaacaaaaaaaaaaaaaaattaaatagttcaaacaatcaaatgccccattttgattttcagtcgatatcttattgatatttcatcaataacactaaaaaacacagacacaatggaaacatattcaacatctacaatctatcactagaaagagaacaaaatttacaaaaattccactaatctcaacaacatgcaaaaattggcattcaaatctatgaaaaatttattttcttttttcataaaaaaatcttacctttgactgagcttggtggtggtggcgacgggatggtcggcgtgggttcaagtttgttgttgggtattcctgggcagcgaggaagagggaaagacagag

SEQ ID NO: 213239 - DNA, 544 bp, Cannabis indica
gtttttttttttattttctttccatactaaatataaaaatttattgtcaaaattttcggaagcagttttgtgtaatgtggctcacgataaaatttctgggggtcatagtttgataaaacatgtcattcggttagacaatgagctttcctgcaggttcgaggaggtattgccgccgattataattagaaaattctacaatgcacttttttaaaatggatatattgatgtatccttatctgttttagcatccaaaataattttttagttaattttttttttctcatggtcatgtacgttataattatttaagacatcctgcaaaattttaagaaatttgaaaaagtttaacacgccgaaaactacgttcaaacagtatattgcacgcgtgactattttattttacacgtgtgtaaaatagactatttgaacattgttttctatattataaattattcagaattttcttaaaattttgtaggttatcttaaatagttataacgtacatgatatggaaaaaaaattagactggatgccaaaacaaatc

SEQ ID NO: 213240 - DNA, 637 bp, Cannabis indica
aaaaagaaaaagagttttaataataaaaagtgataaagaatgagattcatcaacttcaccacaaaaatcagatgaaagaagtttgatgatcactagagccaaattagccagggtgttcagaaccaatctgtctcatctttagctgcaccatgacgaggactttgaggccattgatttagaaaactcaatggaatttatatcccaactacatggggtccctttggtttcatatcacctttggtcctttactaagcataaaattttatagtaggacttaatatgatgttagcttaaataattaagtttgaaagattattaattttaacatatattatggaattacaaaatgtgtgtagaatgatcacaaaataggagttgcgaatcttttaatttgatgatcacttgaatatgttactcttaccttttttttacttttaaattagtaaaatatgttactaattctttatgaatgtaaatgtacgatagctattgaaaatatagttgttgaagacttgatttattcatttataggatgtataaatgattcaaaatcaagtaagagtggtttggaacactttggagaagaattggtcaaagctgaaaaaatagtgacttagttacttttttttcagcatac

SEQ ID NO: 213241 - DNA, 945 bp, Cannabis indica
cagaagtcttcagtctttttcagtactaatacgactcatcacatgaaagagacaatatgcaaccgcttgggtattagagaggctgaagaaaatagcaagtatttggggcttcctagttcaataggaaggaataaaactgcggcttttagctttgtggtggaaaaggttcagaaaagaattcaaacttgggataacaagtttctttctagagccgggaaggaggtccttattaaagcggtagttcaagcattgccagcctacacaatgaatttgttccttcttcctgtgggtatctgtcaacaaattgagagtgccattagtagattttggtggaagtctaatagttccaaaggcattcattggttaagttgggataagctcaaggcacataaggttcatggaggcatggggtttcgcgatattcgggactttaatgtctctttacttgcgaaacaagggtggcgactcttgtcttgtgaggaatctctagctacgaaagtatttaaagctagatatttcccctctggttcattccttattgctactttaggaagtaacccaagttacatatggcgtagtgtgttggaagcccaggctttggttcgatctggcgcaaggcgattgattggtgatggtactcgggttagcattctaaatgacccttggcttatggatgattttaatccgtacattgagaccgatagtccatgtctctatgggcaaatggtgagttctctaatgcacattgacaagctggaatgggatcaggaggtgctctcggatgttttaaatgaacgggacaaaaggttggtttggcgtattcctatttcggcttatgttagggaggcggattggtattggctaaaggatgacaaaggcatgttctccgtcaagagtgcgtatagactgcaacaagaaattcatggtaataatcttgacattgct

SEQ ID NO: 213242 - DNA, 1028 bp, Cannabis indica
gtgtctttagtctttgtaaaacgatctgctaaaaggctgctcattgtgttgctagagggtcttgtttaatgtcagagtatactttcagtgagcttgatgctccttggtggtgatcaccaaaaattgtataaggctctacttggagaaaaatatcttcctaattctttgtctaagaaggataagaaagagattcttgcaaaggctcatagtgcaatcatattgaatctcagtgataatgttctgaggaaggttgtaaaagaagccacagccgtagggactggctaaagcttgaaagtctatatatgactaaattgttggtgaataaattatatctaaaacatgccttgtattcgttcaagatgatggaggacaaatctattggagaacagattgacttaaaccaagttgattcttgatcttaaaaacattggtgttaccattaaagacaaggatcaagccttattattactcagttctagattgaaattgtttggctattttaaagatacaatgctttatggaagagaatcgattacactcgatgatgttcaatccgtcttgaattcaaaagatctaaatcaaaatagtgagttaaagaactctggaagtggtgatggattgtatactagaggtaaaagtgagaaaagggaaagccacaaagaatcaaaaggaaaatcaagatctaaatcacagtctgatagccgaaagaacgttggatactggatttgtaggaaaatggggcatgtcagaaagatgtgtccagagaggttgaagtcaaatgatttgagatctgaaggagatgtagcagtaataagtgacacatgactcgactagtgctttgcttgttacctttgagaattttgattctgaatggatcttgaattctgggtattcatttcatatgacaccaaataaatcttggttcgaagaatttaaacctgaaaactatgggactgtgtatcttggtgaagtcttgtaagtggtgagagttgaaactgtaagattgaaagtttatgatggcatggaaa

SEQ ID NO: 213243 - DNA, 704 bp, Cannabis indica
tcccctgtctccctctccactcttggtgttatcaatggaaagtgatatgaagatcagaaagagaagtgggtagttctttcggcaagcatcggagataacgacaggtttcaatcatcaacttcttaagacgaggaaaagctccaccttccgtaaatgaccactctttcaacttctccaaattttcaattacaaggtctccaaagtgtaaagaataagggctttgttggtattgcaacagaagaagaagaaccataaaactctgaatctattttctccacaccacaaaaactaatatgaagatatttgagacaaggcagctgccccaacgacggcaagaggctgcaacagcaacatataaacttcaaacttactaaattagacaagcagcgaggatctcccatccaatttgggaaactgtagcctttgtaatgccaaatgctaagttccttcaagtttggatgaggctcgagggcaccgaatatatctatttgtttgtgcaactcatcaacttcagcttcacgattatgattccatgccaaatctagctgactaagagacttcttactctttaataatggtgctgcagcatctgaaacttcctcaagcctaccaacattcacaatttctagtccgaaaataaaaagactcccgtgtagatcttgaaactctttcaacaattcaataccaccacaatctctatttct

SEQ ID NO: 213244 - DNA, 610 bp, Cannabis indica
gtaagattggcgagacaacaacatctcggaataaacagaatacacaatgaaagttgttcagaatgagtatacaaagagcttgcagctcattgacccacatacttgtgagtaagagcttaccgctaattgatccacatattcgtgagtatgttcaaagaatgacaacaacattcgttcacctcgctttttacgcgttaaagtaactggctcgctaattccaaatgacaaaagagaaccgtgagaagcattgtatctctacacttagtatttttcctacaaaaatagtaaagaaagataacatggactcggcgagaatcatccagcacagttagcataatcgtctatggataaagacaaagagcggttgaacagttgtttaatattatcccatgtgcacaaaaatggagcgtggggaatgtccacgtttcatgagtggttatgaatgaatagatcccaaaggaataaatgtcacactatgtacctgtaaatagggacagaacctagggtaaaaagggacggccaatctagagaaaaataagatattattactactaatatcattgtattccatattcaggtattattatctctaataagattgactcgtgga

SEQ ID NO: 213245 - DNA, 659 bp, Cannabis indica
ttccatctcttcatccattgcccctctccatttcctggaatttgatcctttaatggcctcttcatatgattgaggttcattattgaccattttcagttcactcataaaggcatatgcaatgtcttcatcccatatgttaaaactgtacttaggattaggtcttggtacccttctgcctctgtccctgaccagttggtagtcccccaagacttcttgagtcccttcatcaataaggccagtgttatcatcatcaggttccacctgaacctggtccctaggctccacctgaacctgttctccctgattctgttcaggtgtgttcactgtttgttccacctgaattgatccagttccttcatttgcagtgttgcctgcatttttagtgtcttttgtacctgcactaaggttagatgtaataggcaaacaaggaaaaatatcttctttaaatattacatccctgctattaattgttttgaaacctttttgttcccaaacccaaagcctatagcccttaactccttctagatatcccagaaaaacacatttcatagctctaggttctaattttccaacactttggtgtgcatatgctgcacaaccaaatactctaaggttagaaagattaagaggtttactagaccatttttcttcaggagtct

SEQ ID NO: 213246 - DNA, 697 bp, Cannabis indica
tggatgcatactcaagttataatcaaatgaaaatgcatgtggctgaccaagagcatacatgttttcaaattgacaaaggcatctatttctacaaggtaatgccttttaaactgaagaacgctgaagctacctaccagtgaatggttaataaaatgtttaaagatgaaatggggaagaacatggaagtttatgtcgatgacatttatggtgaagtttaagacttccatgagccataatgaagatttaaaagaacctttttccataacctgagagtatgaaatgaaactaaacccaaagaaatgcacttttggagtttcctcagggaaattcttgggtttcatagttagttctcacagtattgaggtgaatataaagaagatcaaagctcttcttgatatgccttcacccaataatcataaggatgttcagaagctgactagaaggattgctgcacttagcagatttgtttccatatcaacagataagtgcatacatttcttctatgtgcttcgaggaaacaacaagtttgaatggataactcagtgtgaagacgccttccagcaactcaaagaacacctaacaaaggctccaatattatccaaaacaattgagggagcgtcgttgttcctgtacgtagtagtgtcatatcatgttataagtatcgcctttgtgtgagaaggaaaggtacaacttcttg

SEQ ID NO: 213247 - DNA, 820 bp, Cannabis indica
attttttgaaatttgagtttttttttttttttgttgaaatgcatcacattgacgtttagtgttgttaactcttattatacagttccccatgacccgactgcgccagcttgtctccaccaatcaatataaattatatcattacaaagtttttttttttaaaggaaaattatatcatacaatatattttttttagaaatgctaaaagaagtaaaggacaaatcatagtgcatagtatttttgtgaaatatattattactattggtataatttaatagtgagtctcacttattttactttaataagtattaaggatcagtcctgagttgaaatggttcataggaaaaaaaaaattaagacctttactatgaaaaataaatatttttaaaaattattcaaaaaattatatatatattttgtaaaggtagtttttttattttgcgttctagggccggccctacaagtattataaaaaattattatccaattataatatgatactttatcgtggtgctaggagtaggcaccataagtacctcatagtaatatttttttctttttaaaggaaaattatatcatacaattaatacatgaaattaaaccttttttttgtctaaatttatcgtatttgtgacactctaaaagactattatttttagtgataacattttaatcataacatagtttttttgttgattaaatgtgacttttagtcacaacaaaaaacttacaataattgtgactaaaacataatatttaaatacaaattgttataatttagttttagttcaaatattgtgatacatttagtcacaataaatta

SEQ ID NO: 213248 - DNA, 659 bp, Cannabis indica
catttttaagttaatgtgtcaaccagtcaattcaaaaatattttactaccttaattagtagagctatagaaaataaactcagtaactttttgagtgttaaaaaattgtaaatggttataattaaattgagagtaagtaagctgtgtgtggtagttggttaaagaagccaaaattgagatttttatatatactgccaattactcaggttcacatttcgagttttgtaatctatactcttccctgtcctattaacaaaagtttaacgtacacataacagatgaatatgactttctgcctgaaaccaagagatgattagaaagtagaagcacagctagaactttcctttgtttgaagtaatataatagctaatatctttattacatattaataattaattcaatagatgaactttccaaagtatttttgaaacatcatgggatatataaatgctattaatactttttgtagaaattttattccttctttgccctacacacagcaaagtgattaatcaaatccccaaggtcaaatctgaccatttacccagtcaaagaaagcttttgactttcggatattataacccaaaaatgacagctcccttcctatgagttataggtcgtttatatttgttgttcggaaaccctaaaacacctttagac

SEQ ID NO: 213249 - DNA, 607 bp, Cannabis indica
ttgatctaagatcaactagatgatatcgaattaaatagatattacttaaaaattataaaataaaataatatatcatatataatcaaacatatattaaaataatttatcatgcttttatttaataaataattaaaggaataaaataataatactaatttatactaaataataatattaatattttaaaaatattgacataacttttttaataatttaaaaagaatatataattttattatcatattatttatcttagaatatatttaagtaactatggcttttttcatttttatacttgaaaatatttagttttttgcctttttacgaaattctacatagaaacccgcattacaactaacagagaaacataaatcgcaacaaaatccgtataacaactcacatagaaactaccgagaaaactactttagaaaccaaaactataaattttttttaagaaaaagttcaaaatagtatatggaataattttcctttttatttaatattattttaaattttaaaagtttatgtatgataattctaaaactaattttaacacataaatttttcatataagaaaatctataaataattttgtgataattctttc

SEQ ID NO: 213250 - DNA, 689 bp, Cannabis indica
ttttatgatatattttttttcttaatgctaaaatattgataaaaaaagaataactaaaaaaattataactaattaaacaatattagattgaataataaaaatattttattcaacaattatatgtgatataaaaaattaacttcatgataaatgaaaataaaaattaatagacttatttattagacaacaataaaaaaaacgattcctaaacaatgtgagtattttttctaaaacatttatcattaaatttttttcataagatgataaactctcccaaattaataaaaataaatagaaaatcatataaaggggcatttgatttattttttctttcctttatataaatatataaataaattgggagcaaaatcatattaacaaaaaaacaaaaaattccaaatcaaaaatcaaagttgatttagatttaggaatattatcttaattacatatcattactaaattatcaattagtcaggatggccgagtggtctaaggcgccagactcaagttctggtcctcttacgagggcgtgggttcaaatcccacttctgacaataaaatttcattttatttttagtacgacacgtcgtttatcgaatttgattttgttctttacataaaataaacaattatacgttttataatatatattagaaaaaaaataacccaagtcaggatggccgagtggc

SEQ ID NO: 213251 - DNA, 875 bp, Cannabis indica
aacagaaagtttcagggaaacaggggtggctgccagggccacgggtcgtcattccgatcatatcccgagtgcccaaaatgcaagaaacaccatccgagtgagtgtcgggccaagacatgtttccagtgtggcatggtgggccactttatcagagattgtccttaggctaagaaagaggagcctaagaagaatactactcagaacccgtggcgactttttaccatgactcaggctcacacggatgctagtccgtcagttgtgacaggtcagttgtctattaatggctattcttatactgtgttgtttgattcgggaactactcactcttatgtgtcgagtatagttattgaaagtttccataagccatgtgatatttatgcttcggagtttggaacccttttaccctcgggagaccttattgtatccactaggtggattcggtctttgtccttttggattgacggttgtgagttgaccgcaaatctaattgaattgcaattgtttgattttgacataatcctaggaatggatttttaatctaagtatggagctacgatcgattgtaagcggaagatggtactgtttgagcccaatagtactaatacagcaatattcgtgggtaaggttcagggggcacgcataccaagaataacattgttgaaagttaacgactggatgagcagaggttgtttgggattcatagtcactgtagtggacaccagtcaacctgtgacatcagggcctgagaatacaagattggtatgcaagttccttgacgtctttctagaagacttaccgggattgccccctacctaggaaattgaatttgttattgaattggtttcaggagttgatccagtatctaaagcaccata

SEQ ID NO: 213252 - DNA, 1048 bp, Cannabis indica
gcagctgacagaaactccaattccctgttgtcatggcttaattccaatgcttctcggatggatactgagaagctaagccgagttgtcatgctgtgttgggcaatatggtcggccagaaacgatttgctctggaagagtcgggttcgaagtgtaaaaaatgtggtcgactttgcacaatctagtcttgaccagttcttgaaagctcaaggcaaaagcaacttaccttccctgtcaccttttaaacccggtgatggttcagaggtctggattaaaccggctgtaggcatcaagttgaatgtcgatgcagcaatttttgaaaaatatttcaagcatggcttcgggtgtgtgattagaaatacggaaggcgagatgatttctgttctttctggtgctaagcaaggcaaagttgcaccagaaattgcagaaattacgggcataagagaagccttaagttggctgaaaaatcacaattactctcacgctgctgtcgagtttgatagcctggtttgtgtggatgttattcgaagcaatgagaggctccattctggtttcggatttattgtggaagagtgtaaattaattcttcaaagtttgttaaatgttactttatgttttgtcaaacgttctgcgaatcgtaccgcgcattttattgcccggcactctttgtccctagctgaacgtatgttccctattaatagtgttcctttggagttgttgtctatccttttgggcgatagcccttcttaataaagaacacttcttttcaaaaataaataaataaataaataaataaggttatgaaatagtgaaaaggtaattgaattattattgttgttattattaagtataaatataaataaataaaatataaagtcttaacaaaaaaaaaaatagatagagtaaataagttgtaacctaatgctttaaaactctgctttatatatatatatatatatttatatatgatgtatactaaataataataataacattaaattgataataattcgtaaatagtattactttattaacatttaatccacaatta

SEQ ID NO: 213253 - DNA, 517 bp, Cannabis indica
gtcaaaattcaagaggaaaaattgctaattaaccttttttttttttttttgtaagaattaagtaatacaaacaattaaaaaatctgaatttgaagttatcttcatcctctcatcctctttaactccatcacctcactgaccttcctggtgttgatggccaacccactgccactactccgatcgacctcctccaacattgacccagctactcttctaacgtctcccgcttgcaacgataagcgagttgaatctttgtgaattaacttataggtgaaattaacattgagtctatagacttgatagattaaagaagtgtccttttcttgagtactaccaatttttaacttattttatagcttatgctgggaggataaatattcattgaaaccaatgaataagtgtagagtctagacttgataggctgaagaaggaaaaaaaacaccttataagtttaaaaattttgttgtacataacattttggacaaaaaataggttttgcttaagtatgggctgacca

SEQ ID NO: 213254 - DNA, 914 bp, Cannabis indica
caagagttaatttgagccattagattaaatctaagactataaattattattcctattgataagtattttactcaatccttaccctctttaattttttcatttttttttattttagtcactccccctctgggtctctcactatgcttttaagtagctatgggagagctcctggagtatgttccttcattcccagcttggtagggcacattcccaaatcccctatcgttcgtatactatatccgtagtccactcacttgtttcataataataaattaattaattgcaaaatattcatatacggttcaaacaagtgagtggactaatacagtacatataaatattttatagtacatatacagtttatatacggtacaagtttatggcttaattttttttattacaaacatatgcttgtaaaattctaaaattataaaaatacacttatctcagcaaaaaataaataaaaaaatgaaaaaatcaaaccccttgacaactataaataaactataaaacaaccaaaaataataaaaaaaaaatctcataagaactataatataactataaataaactataaaataacaaaaaaaaaaaaaaacggtttattttttttactgaaaatgtatgttgagaaatttaaagatttaaagaataaaaataaaaaaaatttctgtgttgatattttttgtaattatttttaaatttttagtctgttatgtaaaatttttaaaattttatttattgttgatgaattgtggcagagattgtaaacatcaacaacaaataatctaaaatccaacttctctactctatgttttaaaatacattattaaaatgacattttcttgtttttcatcacacacttttacaccacaccatatatatatatagaaacgattttgtcccgtgatgtact

SEQ ID NO: 213255 - DNA, 852 bp, Cannabis indica
attgactggtgttaggtgttgaaactgtaagagaatggtggttatcaatagaaacatgttggtcagaagtatgagaatgcatagaactttgtggagacatttgagcagaagagtgtatgggatggatagctgacctattagaaatttgagtagaggcagtaggaatgattccaatagttaaaaaatcattagagtaatgaacaggtgtagcattagtagtagaatgtttttcaaagggaaaggaattttcatcaaagatgacatctctagatatgtacattctaccactcgagtccaaacacttataccttttatgattgagactataacccaacaaagtacatggggctgacctaaactccaatttgtgtttattatagccttatgttaggaaaacaagcacatccaaaagttctaagagcttcataatctggtttttgcttaaatagaacttctagaggtgtttgattcctaagaccaggagtaggcaacctattgtgaatatagacagcagctctaaaagcttcatcccaatacttaagtggcatagaagcttgagctaacaaagtcaacccattttcaacaatatgtctatgttttctttcagccaaaccattttgttcatgggtagtaggacaaggatgtctatgtaaaactccaagtttattaagaaaaggtgtaaagcttctatattccccaccccaatctgtttgaagagcctttagtttagtgccaagttgcaactcactttcagctttaaaactttgaaacactttaaaggcatcagatttatttttcagcaagtataaccaagtgaatcgagagtatacatccataaaatgaatgtaatac

SEQ ID NO: 213256 - DNA, 1211 bp, Cannabis indica
tttcagtttatacatataaaagttctaacatactaggctttcgaactaaaagaacatatgaatgaatccacttatcaatgactatcagtcaattatcttccaattgaaaataaggacataacaaccccattattcaattaagaataaatagaactaagcaaacgaccaaccatagcgataataatcgtaggagacaatcgcaccataaactatggggccaatagaaatataaaaaaccctcagatctaaacatggataagaagagtcatgctactaacactaactgctttgagccgatagagattacctcattgcctaaaaagaaacaagacaatccactgtaattactgagaaaagccctactatgataacaatatatagtaaggtggtgtatgaacaccattattgaaatttaaaaagaacaaaataaaattaaacttaaataatgacatattaaaaacacaaatgccaccattgaaggtgtattctttcttaccacgtgtcaaacattgatgtccacgtcactgggatcaatttcctggtcaacactattaaccctgcagaaaatgttgaagtagttaatattcttaatctcctagtataattaatcaaggtgaaacgttcaataattaaatattttacctaagcaattattctatgaagcatataatttatttaacttagataaaacattaaattctatggagataaattaacttaggtaacaaatcaataaagcatataatttatttaaagtaggctctatttctcatcacaattcaaaatacttttgacattattaaaaattataattcatcacaaatacttagaactagggtcgaacctgagggtggggagagctaggcgtgcacctcgggcccccgtacgctcacgacctcaaaattatgaaaaaattattattattattattatatagataaaatattaaaaaataatatttagtgtagtggtaaagagtcttactttatttaagttaaagggttaagggatcgattcccaacctctactttctatttttttttaaaaaaaatatttaataattattaaactatatgtaggggcccgacaataattcatgttttaggattttaaattaacctttaactaaaaagaaattactccatgatcacaacaattattataattgaaaagtaaagagattagagagagaataaaagaactagaatgaa

SEQ ID NO: 213257 - DNA, 530 bp, Cannabis indica
taaggggagttgtagatggtgagtggatcagttattcccaaaggtccattttgcgctctgctcagacttgtaattcgcactcacagacccctgttgatgttcctatcttagggagatgtagaaaatttagaagaagctttaaagttaagaagggtggacccgagatgaaaggagcaaactggtggtcaccaatgcttggaattcaattgggcacaatttcgcctcaactaggatgtttaaaaagattggtgccacttgggttgcgctgttacactagcattatactcaatatggtaaagttgatgctactattaaagagttggagtgtaagcttaatcatgtgcaaaagctgcttattggctctagagactggaaagtggagtatgaggtccgcaaaaccctcaatgaggccttaggaaagagagaaatctattggaaacaaagagccttggtttcgtggcttaaatagggggataaatgctccaaattcttctttctctctacccttattagaggtaggtgcaacacta

SEQ ID NO: 213258 - DNA, 759 bp, Cannabis indica
ataggtttttaactttttataaatatgtgtggattggattggattggttacttttacatgtcaatcaacatctaatctgcacaagtgcggattttaaatttttcaatccaatcaaatccgcacaagtgaggatatccgcactttgcagattggattggattggatcgtgcggattagattgaatcagttattttatgaacacccctagtactcataagagcatccttttgtctactacgcctaagcgttcagacaaaaatttgcctctattctcagtattatacatttttacatatacatttttacatcaagcttcgaagggtccataaaactttagtaccctatcttgatagttaatttacaggtggcccattgagatcgggtcccgaattttttttttttaattttttttaaaaatttctaccaatgtcggtggtttcgtgtgtaactgccgagattggtatctatctcggcagttacacgcagaaccgttaagatcagggtgccgagtttggccaattttttagtagtcatgactacagtgcaagacattttgaagtggatccagatgaataaaatgtgaagatgtaaatgctagatttatgcagcaatagtagctgctgccgtttatgacatttggggatgtaggaaccaatgcaagtattttggtatcaaagtgtgtagtgctttcattgttaagcaaattaaaattgagataagaagtaagattcattttcagctatcaaaacaactttctgt

SEQ ID NO: 213259 - DNA, 582 bp, Cannabis indica
gtcactctacttttcactctctatttgtattctctttgaccttttatttaaaagaaaaaaaatcacttgtcgacctccaacccctcctccccttctttaccatatgctaatttgcaatttaacattatcttcatatttaattactatttattcttttatttgtctaatgtttagtattgtgccaaattttatgacaattatattttagcttaatagagttaagaaaaaaaaatcatctaatgtaatgttaaagttcaaaaagtgtgttaaattttgtattattgtatatttattttgaatttagtattaaaatggtaaatttgacacaatataacaaagtggaaccatgtgaactattatgcaatatgcatggataaacataattttgagttactttttatttcaaatttagtattcatattatattcaaattatcttaataattggtgggagaaatatgaattccatattcaaattcatctaatgcattggatcacatttcattatgataattacatttatattttattttaaattatttttatctggttataataatataaccacattcaaccactttag

SEQ ID NO: 213260 - DNA, 598 bp, Cannabis indica
atatttagattttatttgccacaattaaataaatcactaatgaggaaaggtttcggcaagaatcgccaagaggtcttccattggcctggctgcttcaaagagaaataaacaaagtgtcagagtggccataagaaagtgtgcacatgaaaataaagcgataaaactagtcctaccctgactatctaactcagccctagcaaagtcttgcactacaatactagcttcatcatccccaagaaagctgtccgaggggaaaaaccagctggaagacagataagctgagtgatccagaggaatgggtgcaggaggtccggaacctatctgggaccggcctaagaaatgacctatgttggaaaaataaaaggcttttgcctgatcgccccaccgagtagggggcatcctaaatctaagaagacgctcgtcaaatcctataggcctacaccgggaatactcttgggcagaaggaacatgatgaaccattaagggagacttaccggatctgaatgtgctagcgtctggggccctaatattgggaaccgggaccagcaacctaggccgagaaggtgtctgctctctgcccgcctccagtcgaagggtc

SEQ ID NO: 213261 - DNA, 631 bp, Cannabis indica
ataaatataatgtaattaaattaatggctccattccaatattcatacactccaattatagggcccaattatatcagccgcctcccactatcactcttctctattatccttcattcataatttcattattgctatcttatacaatataggaatgttttaatttcttgtacatttacttaggttgacatttaattttcctaaaggtgagatattcattacaatcaaacataaggtttatttgattatcaaaatcctattttatattattggatttgttaagatttggtaactgcctaatgtaaagcttattttattattattattattattattattattattataagttttagtattaactgagatgcgttgccaatcaaattcaagttctcaagttttttcaattattttttctttaatttcgttgcagggtagatgcatatatctttttagggtgtacgagtaaatgagataatttttctaataataagtgctgttttttcttataaaaaatagtttgttaaaaaaaagtgctgtttctttattttaaaaaaaaaaaacgatttcagggtcttaatatcatagcacatacgatcgagcccaaattaatatggtaacgacttttttttttt

SEQ ID NO: 213262 - DNA, 557 bp, Cannabis indica
cataattatgtattatgtttaccaagatttttaaaaataaatttaaaaagagcttaagaaataataaaagttataaataaatagacagagttttatgtggttcacacattaataagccctaatacacaagtccgtatattggccttaaaaggctggtttaatgtattacagtggtgtttatagtggaaaacctaactctatactcttggtttctcttgagagattttgacagagcttcaactattacttcccgccccccttcgtgtggaaataaatgggtatttataggctaaagtgtgggcatgcgcataccatgaaactgtctagggtttttacaaaaagcccactactgtagtaaaatacatgaaataactgactattgggcccccaagatggttcttcctcatgtagagaatcgtccgtacagtggggtgttgggttttgtgccctaaataaaacccatttcaatataatcagatttactaattaataaagatcagaaatcgctttatgatgcatggttcacataatttatttcatgattatgtttaatgtat

SEQ ID NO: 213263 - DNA, 930 bp, Cannabis indica
atccctgattcgttgtaataccactcggagatgttgctcatggtcctcttctaattgagagtacacaaagatgtcatcgataaacactataacagagttatcaaggaaatccttacatactttgttcgtaagatccataaaggtccctggatcatttgtcaatctgaatgacatttccaagaactcatagtgcccatatctggttcgaaatgaagtctttaatatatcctcttcaaaaattctaagctgatgataacctgatcgtaggtcaatctttgaaaacacagtcttcccgtaaagttgatcaaacaaatcgtcaattctgggcaatttttacttgttcttgatcgtcagcttattcaattcctgatcatcaatacacattctaagagaaccatccttctttttaacaaatataatcagagctccccaaggcgataaactgggtcggataagccctaaatcaagcatcccctgaagttttatttttacctccttgagttctgtggagccgttctatatggtgcttttgaaacaggttctactccaagtgcaaatcaatcacaaaatctatttctcattgtggcggtaatccaggcaactcctcaggaaatacgttgagaaattctttaacaacccggactacttcaggcccaaatatttcgggtctgctggagtcaatcaaaaccgctaaaaatcctacacatccactgtctagcaaatctctagcccttaagactaaaataatcaggattcgagacccctaaaaagatccaacatagacaaatggatctttgcccttcgcctgaaaagttaccatttttcgcttacaatcaatgttggccgaatacttggatagaaaatccatcccaagtatcatatcaaattttcctaattccagctctactatgtcagcacttaactccctat

SEQ ID NO: 213264 - DNA, 600 bp, Cannabis indica
tagagtaatcgaagatgagtcatgaagaataaagagagaatgatcagatttggaggacaagaacccaaaagtgattagacactgatgcagcctttcgaaccatgcccttggagcctgcttaagaccatataaagctttgtgaagcttgcaaactagattaggttgagtagtgatttcaaacccaggtggttgtgtcatgtaaacctcttcatgtaaaatgccattgaggaaggcattgttgacatctaaatgtctcataggccaattattgttgattgctagggtgagaacaactcttatagtgaccggtttgactacagggctgaatgtttcagtgtagtcaaatccgggttgttggtggaaacccttagcaactagccttgctttgtacctttttagagaaccatctggattttccttgattcttaggatccatttacatccaattggttcttttcctggtggtaatggtacaacagtataggtgtgatttcgagcaagggctagaacttcttgtgacatagcttgtctccacttttcatattgcatagctgacttgaatgtctttggtattttttcagacaagtaggtctttggttt

SEQ ID NO: 213265 - DNA, 532 bp, Cannabis indica
caatattttatgtttttacagaatttttttttatgtttttttacggtttttcctttagaacaacacgaaaacaacaaaaaaactacataaaagtaacatgaaaataatatctaaataacatcaaaacataacatacttataacaaaaaatcgacaacaaattaactgtacaacaaaaaaagaccgtattatctataaataaaatcaaaaaaatcgtaaaaatatttaaaattccgtgaaaccgtattttttgtaattttttttgttgttttttgtgtatttgtgaataatccctttttttaaatagttttctaatgcaaaaactaattgataacaattcgaaagttcatacaaaaaattatatacataagttaatttgaattaattttaattaattaaataaacatttgtaatgtaactatatttctgaccataatttacatcaataaattatttttatgaaaatataaaaagtacaactgaatatgcacatttataatttttctttttgaaattttgaataatttattata

SEQ ID NO: 213266 - DNA, 512 bp, Cannabis indica
tcttaagcgtccaagtgatactcgttgggattcacattatgctacattggtaagctttattaacttattctctcccataactgatgttcttggaacagtagtagacgatgctcgagaatctgaacaaaagtttgaagcaagtaatctgatgggtttgatgtcgacatttgattttatatttagtctacattttatgaaagcattgttgggcataacaaatgaattgtcaaaagcactacagagaaaagatcaagatattgcaaatgccatgaaattagtggaaatttgcaagaaacgattgcaagcaatgagagacaatggttgggattcctttcttattcaagtctcaacattttgtgctaaatataatatatgttcctactatggatgatatatatgttgtacaaggtcgatcacgacgtaatgctcaagaaatgacaaatttacatcactttcgtgtggaattcttttatgctgttattgatatgcaacttcaagagctaaatgaacgt

SEQ ID NO: 213267 - DNA, 1367 bp, Cannabis indica
ataactcacgccctttcttgtagtggtaaaaaatcacttttagcacttaactaagttaccctttgaccactttcaaaaaaaaaaaacaagaacaagttaatacaccaagaagttagtcgatttcaatgtcaatcacttccttatagttttattaaattaaatatcatagaagatctagaatcaatcccaaatacccttttttttccattaaaaaaaacaagtctaaaagaatgcaaatgcatgatatgttgatggatcaagttaatagaaacaagcaaaatgttacatgaagaagtcaattgatagggtgaagattgactggtttcatactaatggtaaattacacaacgaattctgaaaaacccaaatcctatccccagtccacaaaaggaagacttggatatccaccctctggaggaggctttaacgatggaggtagattgccccatgatatccccattctatctctgaccgtatcacctggcaaaacccaataagggaagcacaactgtctcatcaagcaggtagaagaaataccaaacaatggaatagtagaagaaatagcaaacagacaagagaaaaggttgtattattgaatgaaaaagaaacaaacagtgtaaagatcccttaggacctctgttctgcaatgcagaaagaagacttaaatcatgcataacactactctccccttactcacctacatatacctatcctattcccacacattcaatactaccctcaatacatgactcatcaccttttgttgctcctctactcttgtgttctactcatcatggggtctaaaagctagccaatataaaatgatggcaactgactgttgatgagtctaagcataatgctcttaaccacccctatcaaagttagaacaataaaattccaaaattatttggccaagcaaagaaaaagaaaaatagtataattttttacctggcctcccttgagaattgttcaaattttggactgtgttctttggatgcaaatacttgcaagaatccccatattggcaaattccctataacccacccccccaaaaaaattaaaaaaaaaaaaaaaaaaagttaaaagtaatataatttgggataatcgaagaaaaacgcaaattctagcacaaacccattattcagagagcaattgaaaaaagaagtagaaagtggaagaagatgcaactgttttaacgaagcggttacagacaccatttccgaaaccttctgcgtaaacttgattttggtctgcaatcaatctcaaaccaaataaataagtatatagaaattacacattacatagcataaatatagtagatatatacctttgaaggagtcgtaccagagagctttggtctacgtagg

SEQ ID NO: 213268 - DNA, 544 bp, Cannabis indica
tctatctatctatctatatgctattttctccctttttaatgataactagttggaacaacacgtgcgagaaagaaaatatataacttttattaatttgttaaatcagccaaaagataaaactaaagataagactggacctcaataggattaatatcacctttgttgaacactcgatctaaaaaaaaaataaaatgctatagcaaaactatgaccaaccgtgttagcagatcgtttaatcaaaaataagaaaacattgtttaaaaatagaagaaatttacgacaatcttctataataatcccaaaaaaagaaagcatagacaataaacttactctaaattttttagataattatagaatactttaaaattttctagacatgtgaaaaatacaataaaacatagacatttctagaaaacttcagtttagatgtttctagttatacatgcttaagaaatatgtagaaatgtatggataaaattcttgaactagaaagatctagagcaaataattctagcctcaaatacttgaaagctagcaactataa

SEQ ID NO: 213269 - DNA, 651 bp, Cannabis indica
aatacatatgctactcttctcattatcaattaattttgtaatagaacttcattcacattcctatctcatgtgagtatttcttttatatttttgtaaaatttaataaaaattccaacaccccgttatcagattgaaacaaaaaatgtaagctagtggtttagtaaaggtttcttaaaaatataatttagagaattcaatattaaactaattttagtaatatgattaaattattgcaaaataatacactaaccaaattaatgttgagcacaaaaaaaagtcaaaatttattacaaatataaataacaaattcatattatttatcatattatataatgctaaattcatgtgatattattcgaaaataataataattggaaagtctatacaaaatgattaatattaggtcaattaataaattatttaaataatataaatccaaatctatttattgaaaattgagtgttttttcttaaaaaacatttattatcgtattaatcaaaaataaattaataaaaaataggcaaagtgaaaattatttactacaagacaaaagtgttgaaaccagttcgaatgattttattaaggtcaatctaatcaatgagttgccgccacgtcataacaccaagcagtcgtcgcagtgttcgcgcgtgc

SEQ ID NO: 213270 - DNA, 668 bp, Cannabis indica
ttaattacaaatcggactgatatattacatcaataaatccctgaaattatggaatttgattacgtcccacgtaaaataaatacagtaattatttaaaaaattacacagctgtgattggtccgctttaccgggtcaatgcatacgtgtattaaatacgttgcaaagcgtgttgttttgggacatctcgctggaaatatagcaacaataaccgtggtagcaagctagagcttttcctatgtcttttcaaggttgataatgtaaatctcatcgcttctaggcttgaagacataacactccatcttacaatcacagtccttagtgacaagatgaacttcagtagtcaacatcgtattaatgtcatcttctttcaaagagagttgactcgtcggagtagtgaatctcaatgaaagatgcttgaagctagattagtaaagataccaagagtatgccttctcatagcgagatggatacctcaccattcattgttcaagttcattcaaccgttatgcttagtttgtataatgtacattatatggtaagtcttttaacagtaaacatgtctcccctacctctcttcatacgaagcgaggttagtgcctcgctttgtacttctgcgttgaatgttttctcattaacgcttgagacaatagtttgtgtatccttatctc

SEQ ID NO: 213271 - DNA, 648 bp, Cannabis indica
agcagtcggattttgagtcccaagcagtataggtataaggatttttgaatgctttcttgatttgaaggaggatttttttgtcttttgggcggcagcgctcagctgagaatgaaggcttgaaaaaggtggagaagaagataagagtgaggaagagtgttgacaatagctttgaggcttccatattgtctttgaaacttttttttttctcttttgtttttggtagagggtgtgggttggaagatgttgagatagttctatttatagtgtagcaaaatcttgctaaatttgaatatgtaaatgaacttaagataatgggaaatattttgttaagaaagaacaaaaaaaaaaaagataaaatgcatgtggatagaatatgtggcctagcctatatgcatgttttttattatgggatactctgttattaagtatgcatatttgacgcgtcaaaaaaaaaagtaaatgcatatttgtataaatagatggccccgactcttaaaggtagtcactgtcaaagcatcacatatccctattcaatttaatattatgtctcatttgtaaataatataaaaacttactaattacatacctaatataaatactccaaattaaggacatttttataatggttttgccacacccacggaaaat

SEQ ID NO: 213272 - DNA, 853 bp, Cannabis indica
aagtacagagaaaaaaaaagatacaatgaagagaagaagaagaagaccaagaaggagaaaaatgcaatcacaatagagaggacttgagctcactaactcatttgttttgctctcctctttaaatttgtatcatcttgtactctttagtgttctttttaactccatggatttgctattttttggttttgtgtttttaatttcatatatgaactagggttgaacatcgggcgggtttatcgggttttaggttcgcgggtttcggattcaaaaaaataaaaccgaacccgaacccgaatagggcacgggttggcatgtttcggttggccgggttggcgggttgacccggtcaactcgttaaaaaaaataatttttattcaaataattatatccttttttttttatttattaaattaaacatatataatatataaatttattcatcaaatctactattgaagaaaagaagcattaatcaattcaaccaacaaacaaacaacttgtagacccaacttcttccttgtcctccctacaaagaggtctttggatttgaccattccaggaacatttccagaaacggttgtgaatgtgaaatgagccactgcctctttcctcccaagtgaaaccattacagctgcctttggtgtacgaggctcatacttttccaatttgctttctttctcaccatccattattaacttcaagttcccaccatccgtgtgtgtgtgaaatgttagtgttaattatgttaggttagggctgctgaaatgtaaaaatgttttaggattttttatttttaatttaataatttaatatatataaactgtaaataaaaaaaaaataaaaaaataatata

SEQ ID NO: 213273 - DNA, 750 bp, Cannabis indica
aaattaaaaaaaaaaaacattaataattttaaaattttcacaatttttcaaaatagtacaattaatttttgatatataaatctaaaatggtgttctgcttacattaatttaaatatattatatgagcaaaacagtagagaaggaaaagtcattattaatttattatagtaattacgaagaagatattaaatgaagaaagtcgttactacacaaattattttccacattgacatatacgtagtggccgattcaaaattattattattgttgttgtttttctttttgtaacaaataagggtgtacttttttttttttttttttgttttttttttcctataatataatatgctaaaatatattaaaagtttatataaatttgtagttttatagtattaaatatactttatagaaaaaagtaataataaaatgtctcggttcaatagttaagattctaaatacaagtattatttgtgaaagtcatatcattatctaaaactttccacattgtcatataaacgtgagaatattggctactataataccatgtgagttgcctccttagtattatggaattacattttaattccatattttaattatttttatataataaaaaaatcagaaaattgagtttatatgctcatagagaaagaagatagcgttgaatctggcttaaaagtcaaattggtttgaatttatggttcaataattaagagatttggaatttattattgatcacattagtcaatg

SEQ ID NO: 213274 - DNA, 565 bp, Cannabis indica
gtggaaggttcccattttatttctagctacttggctgattttcacatgccctaattgctagttactgcatgcagtttcttaacgtacccacgtggcttataaataaaagttaattaaattacacctcatcaataaacaatactgttttattagaaaaaaaatataatatttaaggtatttctacaatatattttttaaaagagatttactaatctattatctttatttattttggtatctaaaaaaattttttagtctaatttttttttcatattcgtgtacgttctagttagttaagatatcttacaaaattttaaaaaaattagaataattacaatatagaatgtagtgttaaaaccgtctattttacacccgtataaaataaaatagtcgtgtatgcaatacactatttaaaccttattttcaacgtgcttatttttttttttttgaattttctataattttgtaagatatcttaaataactataatgtacatgacaatgaaaaaaattgactgagaagttatttcagataccgaaatagatgagtgcattagagcatccct

SEQ ID NO: 213275 - DNA, 553 bp, Cannabis indica
tcatacacactctctctaatgttgtaattgttaaaattttatttattttgaaactaaaaaaaaataaaaaacttaagaaagtttggactggctaactcgaccaaattgtcggtagggttactaattttttagtttaaattgggcgggttgcacttagaatttcgcaacctgatgtttacattgggttagaaaatatgtagtataaaccgaccaaatcaatcgatgtacaaccttagtgtctagacacagtgcatgtggcgcctcttatgtcttgtttaagataaataatgtgtattttgtcttgacaatttttatcttaataacttttgtctttctccctatttaaatttgaaattttttttattacaaaaataaataattactattttaccaattcaaaataaattttttcgaacaacattatacaacgatttattccttgacaatgtttctaaatagataattttaactataaaaaaaaaaaaaaaaaacaaaaattaagagaactaaattactatctatatctacttaatttgtaagtaagtaaagtaaa

SEQ ID NO: 213276 - DNA, 780 bp, Cannabis indica
aacaaaaaagtgatacaaatttactttcgaaaaatgacccttttaaaatctgtaatgcatcagacacaacatcagaacactatcggcacccatcgggcccatcacaaaatagagtgtcaataccacaatcgaaccacaccgttaggccacaattgcaacccataccaaaatcaaagttacccaaacctatatcggaccaccatcgggccccaatcgggcccatatcgagcttttatccctgtacctaataccaagtaaagtatcgaactaccatcggggccacatcggaccccatcggactagatgaaaaaaattgcagaacccaagaaaaatacaatgttcatagacaacaaccatttgatcacacaaaataataaaataacagtaacaaaccacagatcaactatcaaaacaacattctaaactaaatgtaacaactaccaacaaaattaaacaaaaaaaaaattgcccattgaagttgtgtataatgcttcgtccaaaaaaatgagtgaaagaatgtagtgtaatgaaaaaaagtgaagagaatgagtgaagagaaatgaatagtagatttttttttttgtgggtttttgtaaatgctcggatgaagagaagagaggatataacttatttgtttatttggtgagatagaaaaatggtaatgtaaatgggaaaagtatgttggagataatatatttattggcctattttagaaatattaggtataatatgtttaagggattaatttttccataaggtaagcataaatgttctatgata

SEQ ID NO: 213277 - DNA, 510 bp, Cannabis indica
aagcatcataaatacccgtagttgtctggattcatagaaagtagaaccctgaacaaagtagcaccttcctcaaagcgaccaagctttactaaaagagaagcctcttgttctttaacacccaatttatcaaccttgaaagacataataataaatggtaagcacttgagatatgcacgctcaagacataaagctcaagaaatatagcagttgaaacttactatttttggctcttttttgcgcaactcctcaagagctctctcgatggaaccagattcttctagcaaagaaatctgaaaaataaaattgataaagatcgccattagaaccattacatgggaccatatgacgtaacaagttttttcatttgaagtgcgaaacgtagagcccattgattcgaagcgcaccaaactagaagaatcgtaactaacaagaaaaagtaaattactgcattcataaacataagtatttatctcttaaaaaataataaacatatttatatatatgtgtgtg

SEQ ID NO: 213278 - DNA, 954 bp, Cannabis indica
tgcaactaacggctcacctagtgatagcaatgactcatctaacaactctgagaaccaatctcatgcatctcaagttcgaagtcgaagtcctgaagttcataatcttccaaatggacaaagaagacatttcgaagtacctctaacttccccactgcctaaagacatgattaccattacccggtcaagtgtaaatggttggagatttagtattcgggctccgttaacacctcaacaagaagtttacctccaacgcgtgcacaatggtatttcagcaatagagagtgcaatggaatacatccagctaaatggaattactgcagaatccatgactcggctgttgattgtagtagagacgatgcctgaacagttgcgagatgcggtcagcattttccgccgtccaccctagtcttctttatctgttgagaaactattttggtataatagagtatgattttggatagtggtattttattattttttgctaccactgtagtcttataatcgcttatgccaacagttaggtttgatgtccttttgatatatatgtatgtaactatatatatagtttgtaattttattttgtgttctatcttttttattaatgaaatttaaatttgttttattaattgaaatctaatacaggaagtcatatactacaacaaaaaactctttccatgacataagattataactttttcaaaaaagtattatataataatatagtgaaataggcggtattatgagagatgcaccacaaaaaagaggcgggtttttttccaaataaaaaaaaataccgcaaactcaaaaagaatactattaatgtatattttctcactctcttgtattttaataaaaaataaaaaataaatttcataaaattatatgcccaacacaaattttttttccattacttgtaaaaagaaattagtcgccaaagataaagcccaaataagt

SEQ ID NO: 213279 - DNA, 497 bp, Cannabis indica
aacatatgtgtcatttgtgtaaggatcaaactgatgagttaacttagggactaacagacttaaaaaaattgtgaccttgggaattttaatgccaatttttgaggttggggacttatttatatcaaacataagttaaacataaatttttaggacttatgttgcaaatttccctttatgttataatggattaatgaagttgtacagttcaaatctcaaaaaactaaaatgaggatttctcaaagaatcgaaaaactattttgcagatcaataagaagggcaaagattctagatcttaacataaacaaattaacacaaataaaacaattcattgaggaaaagctttagtattttcatttgtatcattctcaaggacattttcatttcagtccccaaggaaaaatatttacatggtaatggtattggcattctttaccatttacaaaattgtaacaatcatttatgttagtagttattatcaatctatactcatcatcaga

SEQ ID NO: 213280 - DNA, 832 bp, Cannabis indica
ttaaaaaaaaaattaaatgtgacaacccattttaaattagtatttattgagtcttatttatcactttttttttaaaaaaaaaaatagaatacagaaatgtgacaagcaacatcacattaaaaacttttattaatttttttaaattaaaataaaatatataaaagatggcataaaattaaacaggtgtcaacatggggatacacacaagtttcatactattttaaaaaagacagtataaacaatgtataataaaaaagtaataaacaccgtgtcaagtaacaaaaaatatatacatataaaaaaaatttatctatatactatattttttaactttttcttttcaaatttacggtttgaatttttaaagtagttgcaataggggtttctatacgattttttattgcaattgctgttggaatttattttaccaggatcttagatctactcacaagtatgttgattaacaccctaaatatgaactttctaaaacgatgaaataaacacatataaagtttaggaaaccttacattgggtgcagcggaatataatgactccttccgttcagatatctagcccttgattcctttctgtagcagagcattatcaatatctgaacctggatctctttctctgaatctttgatgctgaaactccttttgctgaaagtctttcttcacgatcttcctcactatgattgaggtatcacttgctgtgtgtgggcactactcatacactaagaatttcgaaatctcaatgaggaagagagagagagggtggcggccaaaggtagagagagaaaaggctcaggttttctgattcagaagtgtagaaa

SEQ ID NO: 213281 - DNA, 1052 bp, Cannabis indica
ctaaaatgtctactaacacttctctgtcttctggttttcactctactggaccataatctgttattcctcgatctgaccaagcttcaccaattcaagatcagcaacctgctgatctaaatatcagtgcttctacaattgatcttgctcctactgctcacttgtctgctcccaacagtgcttctgcaactggtattgttcctgcaactgctactgacagatcaagtggttcatcaagcaatccctcctcatatcactcattgcagcctcaatctacttcagtttcagatcctccaaccaccatagctactcccactgtccctgtcaataaccatccaatggttactagagccaaagtgggaacctacaaaccaaaagtcttcttattatcaaaggaacctctcaccttagctgctgctttgcaatcaaaggaatggaataatgctatggaaactgaaataatagccttaaaaagaaacaaaacttggattgttgttcctcttcctcctggaagaaaggctataggttgcaaatgggtctatagggaaaaagaagggaaagatggctctgttgtgcaattcaaagctcgacttgttgcaaaaggttttttgcaacagtatggttataattttacagagacatttagccctgtggtaaagccaaccacgattagagtcatcttaacaattgccttatcttatggttggaacataaggcaattgaatgttaacaatactttcttaaatggtgatctaactgaagaggtttacatgactcaacctcctggctttgtggacaaagatcaccctacctatgtgtgcaaactcaacaaagcattgtatggattaaaacaggctccaagagcctggtttgataaactaaggattgctctaaaaagctttggttttgcctcggcaaaggctgaccaatcttgttctttgaataacttcatctcacactacttttgtcttggtttatgttgatgatattattcgtacaggcagttccaatttagcaatcactactctaatgtctgatcttcatgccacttttgc

SEQ ID NO: 213282 - DNA, 636 bp, Cannabis indica
gtaagtagggatggcttgaatgattgcctttataagaacttccttcccggcagccgagaaaaaatatcctttccatccctttaacttattccataccttattcttaatgaactcaaagtgttgcttttttgttcttccaaaaaaagatggtagcccaagatacttcccataattatccaccaccttcacccccattatacttgctaaatgagtccgaactgacatattaacattacgcccaaaacacatctccgatttatgaaagtttaccaactgcccagacgcttgagagtatttttccagcaaccctttaattcccttgcactcatcctcattcgctgcaagaaacaccaagctatcattcgcaaaaaaatagatgcgacaccgacactccctgccttccaaagacaatcccatgtaactgccccgattgttcagcatgttgtatcaaacacgaaaaggcttcagcacaaagaagaaaaaagaaaaggtgatagtggatcaccttgtctaagcccccgttgtggaattactttcccttgaatttcaccattaatgagaaaggaaaactgaaccgaggtaagacaactcataatcttagaaccacaaagcatgtaccccaatttcaacatcatc

SEQ ID NO: 213283 - DNA, 763 bp, Cannabis indica
aaaaaaaaaaattattttaaaatgtaaaagtaaaaaatacatttttttaacatatattatatttaacacaccttttatatcaccctcgaaacattattttgtcaaaatatagtaaaaatatgatagcactatatttttatgttactccattaaatatggtctaagttgatcttgaagttttttatttttattttcttttaatagatttaattacacaaaaatatttatctaattattaaaagggaaattatttttatattttattttttaaaatttacggtttagattgttccgatgttttctacatggattgttatatagattttggttacaatttaagttgttccgtgaatttttataaaaatatttgttagaatttggaataaggtgaatgatgtttcatcttaaaactaattggcaataaatgggaggagtagtccgttcctcttatgtattctattatcttttcattcattagcgatgtgagactatctaataatattaaaaaataaactattttaaaatataaaataaaaaaaaaaaacccacacattaagaacatgtttagctgtgttttcagtttttaaaattgtatttttaaaagtgagaatagaaaataattttttgtcattttaaaaatttaatagtgtttggtacaaattttttaaaactatttttaaattttttcttattaaaaaaaattaatatgttagcaccataccatgatataaactcatccaggtttaggttcgggtatggtttc

SEQ ID NO: 213284 - DNA, 542 bp, Cannabis indica
ctgcgtaccaaacgggccctaactgttccttagaaatatatagtgagaaccatatatagtttaattgggttaataatatcactctctatgtgtcccccacgtctcttatggaagagggtagatgccctttcgctagcttgttttattattccttcacaactaaggtaaggactaaaaatgcttatgtaaatctttggtcaatattggccatattatatctttctctctccctctcctataaacaacatgaacacttttaatctttaattttcctttggtttgatcctagctatagctaggcagcaataatatagtagctttaaggtaaggatgagataaaaacaaaacaaaataaaagtagtatatagtagtggtcctaagaaggaataggcataaatatatatatagagagagagagagagaaagaagtagtgtactaataataacatatgttgtgggtaaaagtagaggacatgaaaagatgtagtaaaaaaggatggccattggcacctggtgaagagaaacattattattattattat

SEQ ID NO: 213285 - DNA, 903 bp, Cannabis indica
gaaagaaagaaacagaagaagagaaaagaaagagtgaaacagagcattttcattaatagagaaagaagactaacttcttatttcagggccgtctcaaggtattaagaggagtatggcgaaatttaaaaagggtattttttttttttttataaaaaattaaaatatatatattttttatttttgctaaaagatattatttattattaaaattttgacacaatataattaactcttttatcttcatataataaataatttttaggtaatgcattgaaatgctacataatctttccaaattttaaatcaataccttttaatttttaaaacacccaaaatgtgaagatgacaggaatcaaacacagcacccaccaactaacattaacctctcttaccaattgtgctatatgtttttttatgaaaattattgaaccaaaatttatacatatacatatattatatttttatttttatatatataatattaattttaatttttcgggggctccaaaattgtggggcctggggtctcagccccgactgccccactctctggccggccatgtcttatatacaaaggaatgcaccacgtgcaaacaagaaaagcaacaaaaaagttgttacaaccaaaactaaaccccaataacagaaataactgactaactaactgttagtagccttaggtcccttaacacaatgacatatttgtacattgcatttgatcatgaatgacagcatattgatgatttcatttcatataaatatttcttttactgatcggttttgttttcaaaaaatataatatttttcttacgaaagtaaatattatttatttttaatgttatctcttcttctatacctttttttttgacaacttatctcttcttcttctacttgaacataagg

SEQ ID NO: 213286 - DNA, 907 bp, Cannabis indica
acttttatgtagtttctatagaaaatcatacaaatataattaaaaaaaaaaaaatctttaaacatgaaaatataattttttttacaaaaaattatattttatgtaattatcccaataaaaaattctaagcttctaatgtcaaaaattaaaattatgtatatatatgttaccatttattaaattcaataaaaaaaaaagacatgatacatatataaacagggcaccactaggaataacaattagggaggccaaactataatagttagttataaatattttaaaatatattattaaattaataattaaaatttaaatagataatgtcactcttgtatattaagaaagtcatctataagtaaatatatgttaattttttagcaatttttttttattatacactaaagtgagcaaacaattacttaaaaaaattatattatatcttgttgtgaagtgtaaaaataaatttgtggtagctgtaaaactaaaagtgtaaaagtaagagttgctactacatacacaagtaaaaaatctatcattttctaatttttattttctaatttttattaattattacataaatgcatggtatgttattttttataaatatactactttttttttatgaataccttaattttttatttaacatctagatttttgacatttgttcatgctcactattctctcactattctttgaggtggaaataataataataaaaaaaaaccgatacataatatatatatatatcccgcatctgagtattttattcttccaataatactgcattgaggattctataacttttgttttaatgttatgataattctattttttttttaccattcaatgctttgattttaatttgactataagggggccactaacaaatgaatatataactact

SEQ ID NO: 213287 - DNA, 548 bp, Cannabis indica
ataaggagatttcgccacaaattgctcttttaaaaaatattcttttgaaaaaaaaaaaaaaagtagtgcatgtaaactaaggaatttttagttggacaactttactttggttagggactacttaaattaatgaaaattataaattttaatagattatttatcacaattttaatgtgtgtgtgtttgttttttttttttttttggaaagcttaatgtgtgttctttttaaaagaaaaaaaaaactcataatattatttaattaattatttgtggcaaagctaagagaagtggtgagaatggattaggtctctcttccctcttcttcaaatcaaaaattgaatggacaacccaacaacacccctaaccacacaacatctcactcaccatttctcctaccttctttaccttttttattcttttgtttataaatatataatataatttcctaaataattgaaaatatctaaagctctaattatgttagatttttctcctttttccattgggttccccacctttacaatacacaataatataaagaaagaaac

SEQ ID NO: 213288 - DNA, 560 bp, Cannabis indica
ttttttatctaaataaaaactcattaataatttattttactccaccattaattttttaaaacaaagaaaaaaaaaattatgaaccggccaatagaatgataatccaaataaatttactttgacttttaacctaaacaaagcttgtgtgttgagtgttgactccaatgattgattaatataaaattatgggttgcttgaattttacccaaactataaaattaaagtaataagtaagggtaagaaatgaaataagtaagagattaaaaaattaatcaaaatatcaaccttgaatttgtaacccccaaccattaaaaaaataaattgtaactccaataagcataatacatatacagtcattcagtttttttaatgatataatttttatttcatccaatattttttacaaaatagtgaaagttattgttgttttagttagaatgtgcaatgaactttctatgaacaaacccccttttgatttttcgcaacaagattagcaaggcaatgtttcaacctattacaaatgatttttgtaatagttttgtaaaccatattataatagg

SEQ ID NO: 213289 - DNA, 1325 bp, Cannabis indica
gcttcatcttacaaagtgaaatcttatctgatttttcatgggaccaaactttggtatccacacatctagtaaaaaatgaaggctaattaagatttttgttcgtgttaaataccaaattgtatcatgaccttctatgttgttaaaaaaattactttgaactattaaaattgttgaattcaaagatttttatctaattaatgtatgtttaaagtaactattgtccatataccaaagcatgtctcgtgaacttccattcacattaggcgtccgttagtaaaattgaataatattgaactgaagtctatgaatctaataatcttaatatttcaaaaggaacttttaacgacttgaaaaattcggagacacaatttggtacatgctaaaattagaggagggatcctaattagccaaaaataaaacatcttgagttcgtttagtacgctgtattacatttattgtattgtatagtattatattgaattgtgttttatgtaaaattatatgtggtattaatttttggggtaaatactattttggcccttgtgttttgtaaaagttaccaattggaccatctgttttgttaaatgacaaaataaactatgtattttctaaaatggtacaaataagaccttgaattgattttctgtcaaaataaaatttaataataattcgatctaaaggtgttatgacaaaactgtttacattttttgtatatgttcgtttaagaattgtcttcaagtttgttatattaaaaaaacaaagttgtcaaaaattaagcctaaggtcttatttttaccattttagaaaatagaaggtccattttttcatttaacaaagcatagggtccaaaatggtatttacctttaatttttgtgggtacttaaatatataatattttagtatacattaaaatttagtataatattatataaaaatatgataaaaagatcaatataatataatataatatgacataacaaacaagccttttattatttatagaatttaatttaaattttacaatagggtttttgtagcaaagctaagagcatctccaatggagatgcaaataagtgatgcaaatacaaaatataattcactttgttaaaagtttactccaatagtgtgctaaattatgatgcaaaaatttcacataattaaaagtgatcaaaatttgcatcacaatatagcatgatgcaaaatttgcattaaaatacatgttatgctttaatattttattattgaattttagctaatatactcttttgcattaaattacttgcattattattattattattattttattattaaattttaaattt

SEQ ID NO: 213290 - DNA, 381 bp, Cannabis indica
agtttttttggccttattagtttaatttcttcactgagtactgcacatatagatatatacacatatacacaataactttgatgagaagagtgtacatatgcacgtatttttttttctttaaacatatattttcacattatatatattaagttaattattagttataggagaatcaggagaggtaaagaataatatgagacattatataaaaaaatcaaattaattagacaaactattaacaagatattaatctagcacgtagtggtgtttggtggattgatttggttcataatttttttcaaactaaaccagtaatactggttttttaaaattcaaaaaccaaatatttaaaaaaaaaaaaaaactcaaaaccaaactaaa

SEQ ID NO: 213291 - DNA, 747 bp, Cannabis indica
gtgagttttatttttatttgtttgtagatataatccttaattggatcccttaacttggttaaatgattgcattgacgaaccgcagacaagacacgtggagtcgctatcgactcaaaatggaacgaaatgcaatttcacgtggttgggatttgaaagatgaatcgtctttatgttgccacgtcatcatcccaactatctccagctacgtctactatattgccacgtttgacgcggtccctcacgttagacccgatcatattcccacttcagccgtcggatcacatttttgacggcagtgattaaaatttaaaaaataaaaaaaaaaggattttacaggtgagatagggatggtggaaaatataaagatatgacttaaatttaattctaaaagcacttggaaacggtcacggtggatacagctaacacgtcttaggctattaattcatgtgtaatgggcaaataaaataaataaataaatgtattaacttatttgtgatgggttgtccaccccaaaacgaagtcattaataatgtttggttggttctatataaatataatgcccatcacaataattataattttactttttatattaattaaaaaaaatacattttgatatttatgtgatgcccaattgcccatcatatttttttttatttaattctcacaccattccttcatatgaatatacaggtgcttaatgcaccccaaatgtcattcattagtattatatttttttccattcta

SEQ ID NO: 213292 - DNA, 681 bp, Cannabis indica
ttttaatgaaaaaagtccttcgtgggagtccagagacccctaagaccatgtctaataaatgctataaaaaattaaaaatagtgtaatttcatttttttagtccatgttaagaaaattaattttaaatagtgatgtataatataatttaaatttaacacatactagaaattgtgtcaaatttaataaaaaatttagtatggggctaaattttatacaacaataaatatcacttttatttagttttttttttgccactcaaaaatatgtttaacaactttttacattttttgttttgaataaaatcggcgctttattaagaaatatcatccaagcttgaggatgaaacataacgaggaagattattcaaataaaaactacgatctgactcaaaacgagaagattacgctaacatatgcgccaccttattaggagaccgcttgacaaaattctaagtaaaagagcgaaagctattaataatagccttacaatcaaaaagtacacagccataaggagagaccatgtttttgttattgttcaaatctacaacccaaagtaaggcaatcagattcaagtaccacatccgtccatccatgatctttaatcaaacttagcgcatccttgatgctcaaagcttgaactaagagtggatgaaatataccctctctcttaccacactttcat

SEQ ID NO: 213293 - DNA, 592 bp, Cannabis indica
attactttatatattaattttttaactttttttttttaaatttacagtttgagtttctaagtggttgcagcgctagttgcagtaggagtttttgtacgattttttattgcaatttaggttacaaagctagttgcaatagtagtttctatgcctaatttcgtaaaaaatacaaaaaaaaaaaaactattttaaagtgtaaaaataaaaaaactcctttatatatatatatataattgttgttatttttgtataaataatatttttccttattattggcaaagtgtttaatgtcataacgatataatacccaataattaattaataacttttttaatcttttatattaatttttttatttatcattagcaccttaaggtattgaattaatgccatatcaatatggtacttaataattagttatcaacttttttggttaatttgttgtcttaattagcattttttttatttgtgtgtgtgtttttttttttaaattattttgttaatactttttattaaatatttttttattaccattattgttatgtgtcaccttaaaatatttattattcatactgattcacatacacaataa

SEQ ID NO: 213294 - DNA, 637 bp, Cannabis indica
atgagttgatcgcgtcaacccagccaacccgatcaaaccaaacctgtaaacccgcgaacccgaaccatttcacaggtcgggtccgagtacaatttttttaacctgaaacccgtaaaccaaaacccagtcaacccgcccgatgttcagccctaatcagcactagtctgctcatagtgcatccgatctgcactaagtgctgatttcatatcttggatctaatctaatcagcaccatttgaccgaggttttcggcaaccaatttaataagataataatgagagctttgggataattaatgcagatgatttttacgtggttcgggcattaatgagtcgtagtccacgagtctattgtattaatgagagtatatcttatagagaatgttttcttttttctatgtcttctctctctttttctttcgatccccttcttaatttttccaggggtatttatagagattggtgggaataatagattaggagtaacttatctttgagagccaactatagataagcacaagtttccaaaagatacaaaatagggcatgcactacctacgtagtaggcaacgtagatgtaaggtgagattagtcttcatccatccttgattgatgtgtttcttcataatggagctgtcac

SEQ ID NO: 213295 - DNA, 536 bp, Cannabis indica
aacaatgcccaaaagaggtatatgaaggaaatataaaatgagcagtcattatttgctccagaaccttccaagaaggtaaaaactgaagaacctccaatcatattcacgaaggaagatgagaagaacgtgaggtattctcacgtcgatgccagttggtgtattactatctagctccgaccaaagtaaaaggaataaagagggtgttggtagataacgagagttcagtgaacatcctttacagggaaacactgaagaaaatggggctcgaaaaagccaaattgagaccttgcatggtgaatttatgcggatttactggcgacagtatcgccaaccaaggtataatcgagctagcattaaccctgggcaaagcacccttatctaccataattatgcaagactttctggttgtcgcctgccatcagcttacaatatattactgggtcatccagcattgatcagattaggggcagttagttcgatcaaagcacctatccctaaagtttcaaaatgctggaaggtgtgggagtggtgcgagg

SEQ ID NO: 213296 - DNA, 804 bp, Cannabis indica
acacctttgcggcccgatgttttatctgttttgagtaataatggaaagatgttcttgctaattagacacaagtggtaattgataagtttttcaataaacgaagtattaagggtcaatttagaacacttgtgctatgagaaaaacagttgtaaatatgttgtaagaaaaagcactgaattgtcgagagaatatacagtgagtgcggcaaattacaaattttaaagtattgtaaattgttaagattctaaatttctaattataatgataattatattatagtttaatttattataattacaaatatatataacttatgttatattgaacattttttaatttcgttattattttttctaaaatataaatttttatgtatttggtaattttaaattattttttatgtatgtaagaaattttaggttgttaaaaaaatttaattgatgtagtttgctaatataaaattgtaaaaatagaaaatattcaataaatataaaatatttaaaaataattaaagatctaatattatttacttattataatataatgtttatttttttttaataatatatgataaataagtatatattatttaagtactaacaaatttatttaagtacaacaaaaaaaaattaacataaaagtaacaaaaaacaataatcaaaacaaacaacaacaaaaaataagcatataaataaacaataaattaaataagagtacaacataaaaagaattgtatcttttgttaaataaaatacataaaaataactaaaaataatttaaaattacttgcacaaccgtatttta

SEQ ID NO: 213297 - DNA, 521 bp, Cannabis indica
gtcactggactttgtgtatgaaatggtggcttaagattgccatattccacacacttctggttttttggtgaaatccatcttgagattggattgtcattctcttgctaacatgtcccatctgagttaagaaatttatccctccaaactcataacaccagaatgtaccaaccagttttcttctccatacgttcccaaggacttcaaacctcaatttgaattggaaacgaaggattccaaggctgaggagcttccgatcaatccaaaccaagggaaccccgtagatcgttatgggcgatcctaacaagtgattcttgagggtaagtattatcccttgtgaatggtggtttgaaccagattatacatattattatttttgttgctccattaatcttttatttctatctccacaaggatggacatagattttgcaggcaatcttagaggtcctcctcaggctgacgaggaatctaggaggaaagttattgtggattcagattctactaaagaatccaaccatccca

SEQ ID NO: 213298 - DNA, 825 bp, Cannabis indica
tattaattgaccaaataaaccaactgatctagtcaaaaaccatgcatatagtaaaacacagatcctgtggatctttggagtaaagaaagaaaacaaaagaaaagtagtaaaaacccataattatatctttggtgaaaatctatgactttgactaattttccaatttgataagacacgctaattttgcgttaaagtcaacatacccctctctatttgtgttgaaccatatacgcctaatggtatattatttgttagtatctcaatccaagataagaaatcttaaatagatagaatctcttatagtagattgtccacatggcatgcattatatatcatattcacccttattaaatggctttattaacttagaatcatattcatattggacggtccttgagtcaaaagttcatatgagtagtaatttgtgtgcttttttataaaataatacacctttttgaccctactccatcgaggtatatgattatacatatatacaacatattaatttatttttttttttttgtaaagaagtgttctttattaagacgagcaatcgctcgtaaggatagacatcaaatccataggaacactattaatagaaaacatacgttcagctaaggaaacagagtgccgggcaacaaaatgcgcagcacaattcgcagaacgcttaacaaacaaaagcgaaacattagacaaactcttaaagatcttcttgcaatcttccaccacggatccgaatgaagaaacaaacacatctgaactccgaatggcttctgcacacacaagactatctgtctcaacgatggcttgagtgtaagaatgatt

SEQ ID NO: 213299 - DNA, 776 bp, Cannabis indica
ctggtgaaaaacagagaagagagagaatatataaatgtataatatttgaaaatgaaaatgatgcactaaaaataagcatatgaatgtatgtatgtataatgattaattaccaagtacatctccagctttgaatttcttgcctttggtccaactctgaacattataagtccagccagaggtatcaccaacaacataggtagcaccttcaatagtagtactcaaacaagaaagaaacacactcaaaaacactacaataactcctactcctactactgcactgcttcttccctgtttcccactcattcttccttaattcctctcacttttcacactcacaaaatgtttgtcaccacagctttgtttttttttttaacctatttttggttgcttgggctagatgcttaaccccttatttatatatgcaagtttcttttttcttttccttattatatataaaaaataatcttggggtgaacttctaggtaagtctataggacatctctcaaaaaaaatttgtatatttgtacacattttatttatttcgtaaattttgaatagtttatacagttaaaataagatttaaataattaattaaaaaataattacagtgcaacaaaatatttaaatttaattttcgagactataaattattcagaattttttaaaaattttataaacaaacttaattaattacaacgtacactatcataaaaaaaaattaaactaaaaaactttaggctaatatgtaatttttttccccccgaactttgacatgt

SEQ ID NO: 213300 - DNA, 482 bp, Cannabis indica
atatatattgtcttgatatattcatgtcggtaaaaatgcttattaaaaaaattaatgtattcgaaatgtcctcagatgtcaaggagtatcaactgtccaatgagttagttaattctgttagtgataattcagttggtgttctgttaggatcataactgattcttgttgatatttgagtttgttatgtttgctgtataaaaagaccttgtactatactttttgattcaataaaacagactgcattttccatttcatcttctgttctctctttctctcgattgccttttcttcttgactgaatcttcacatggtatcagagcttgtttttcgttaatggagatccctgtttcatccaagggcgcaacatcaagattgaataatgctcagccacaaaataatcagcatgtacctttaccaaaatcatatccagtttcctttaaccagtctctgtctatcaagcttaacgaacacaattttttacc

SEQ ID NO: 213301 - DNA, 543 bp, Cannabis indica
ttgtaaattatggaggtgataagactagtggaaaagttctcaagaaactgttgatgtaaagttttgtgttttttttgttttatatatatctattatttaattaattaatttctcttttatattttgtagaacaaaaagtcatattcagaagatgtgattgacgagacgagagaagtgtgggtggtagatatacattcattacattgtggatcaaaaaaaaaaaattattagttatggcaaatatttagctaacaattttagttcattaactttttagtacaataattattaattttgttatgtatatatgtgtctaacaaatattgtaaattttgagacataatgatagtttagaatttatacttctttttttatgttttattaattgaattaaaataattataaataattttacaaggaaaagatatattatataatatatatagttgtttataattttatatataaataaataaaaattattttttttagctttttattattatttttttttaaaaaaaattaggttttactaacccctag

SEQ ID NO: 213302 - DNA, 580 bp, Cannabis indica
accatcaatgggtaatacccattaagaaatgatatatatgttagaccttattttaattagtacatatatatttagttatatttttagtcataaaaaattatatttttatttattttaattatatgtatatttttagttggataattagtttttttttatgtttattcaataaataaaatttctttttattaaaaaatatttaatttaattattatttataaaaagaaaatatagtattattcaaaaatattattttataattttaatttaattactataatacttttaattttataatatttttttttattgaaacattatatattttttctattttttaaataataataatcaaaatacatttttttggtaaaaaaaaatagataatagaaagattctttttaaatatgtgcaataggtttgaatttgaattgcaatattaaaaataaaacactttatgttatataaacatattatataagataaaaaataagagaaatacgtgtaatgagtttaaatttaaattgtaatatttttaaacgaaatagcacttttattataagggctttttcatttttac

SEQ ID NO: 213303 - DNA, 742 bp, Cannabis indica
atagtagaaaatctacttttggaacaatgttcactcttagtagtggtgtagttgtctagaggagcatcaagcaatccaacatagctcattcaactatggaagttggatatatatcaactttttgtgaagcagctaaagaagcagtttggttgaaaaaattctacacatatctagaagtagttccaaacataaagaaaccacttgttctttactatgacaacattggagcagtgactaattcaaaaaaaaccaagaagccacgaatggggaaagtaaatagagcgcaaatactatatggtcagagaaatcgtacatcaaggagatgtgtccattatgaaaatcacatcagagcacaactttgcagatccgtttacaaagacgcttctagcaaagcaatttgagggacatgtatgcaatatgggattgagaaaaatgcctcacttgctttaagtataagtaggagattgttagaagtgtgtcctaaaagcaagtaaagatatttattattttaatttgaataaaaaaatataatggtttatatttttatatttgaattgttttttttttttgtagaagtatatttgaatggttaattattgattaaataatttatgtaaatatcaaaaaattacatattcattactgagaatgtgatcttgtattagtacaagagaattaaaatcacatgaatgaataaaataatcaacaactaattaaacttttgaaattctttaattggggt

SEQ ID NO: 213304 - DNA, 514 bp, Cannabis indica
cccaacatatctttctctatcatctttgtgtaatatataatatttatgtaattttttttattattattagtaaaagtctaactaactattttattatatgttttaaaaaataaataaatattataagaaaaattattattgtaatttgtaataaaataaaaaataattataaatatattaatatgtatgaatttatttaaataaattaaataataaatatcatatttattttggtaattgtatatttaacaactattcaatcatctagcttaccaaatacttatatacactttttctaactcacagttattttaaaattatatttaccaaacacttttttctcacattacaactacagctgttttttctcacagcacagttatgccaaactagcccataatcactggttagtttcagcatgatttccattatttgtatcttgggcccatattgattaataacacatttgacttggacttggttggtcttactaaattaaatattctcaattaaa

SEQ ID NO: 213305 - DNA, 967 bp, Cannabis indica
tgtttttttttattattatatttcattaaaattaaaatgtattcactttgagtgggttgcccaatatcatcaccatctacttaagtctaacacataattttcattaatttaaaggatataataggaatatcatctataaaagtgggtacatcttaaaaaatatgaaaataaaagtaaaaattaaaatatataaaataaagtgggtatacaatataatttcctaaaaaataattacataaaacattatttttgtagaataaattatatttttacgtttaatttttttttttttactatttgtacggttttatagaaacaacaagaaaactacataaatgtaacaagaaaaagaaaataacatccaaacaccaacaaaaaataatataataatcccatagaaaaaattaatctttttaattaatatttcaaaaatattttataataattcttttcttattcgcaattttatgtttatttgaaaaacttaatagttgaaataattatagtaaacatataagaactttcaaaataatatgaatataataataaaaaaagtaagcatataagatactacattataaaaattagttctttatgcaaattatttaataaaaactataatttttaattactataattatatcttttattttctaccttaatttgattgtagactatatataaatatatattattgattgttattatttaaatatatattagatcttaacattttttacaattttgcggcataaatatttttatattttttatttgatatacttatatgctacatgtttttttttcaacaaattaaagtgagttacattttaattatttctgtcactattaatttgttagatttttattaaaaaaaaaaaacggtatttttcaaacataattacttaaaattttcgatttaatgcatgctattgttttttttttttttaagtttatattacgtaac

SEQ ID NO: 213306 - DNA, 707 bp, Cannabis indica
tcaagactcagaccccgaacccgaacccggaacccctaggacccgagacccgcacccgaacccagattggacttgcttgggatccaaaccccaactcgagatccgggaccgaatcctgacccgaacttaatccctgacccaaacccgagactgaacccgcacctgggttctaagacccaaacccgaacccggacctagactcgaacacccgaactcaaacccaaacctgtgacctagacttggacttagacccaagaccagattgggggctttgacccgagacttggcctgggacccgaactcagattctgggatccgggacccagacccaggaacgaatttaggacccagatccaaacttaggattggaccctaacccaaatccaaacccgagactggaccctgacccagatccaaacctgggaccagacttggacctggacccgatttcaggactccaacctgaactcaataccggaatcgaactcgagaccggactttgacccaaacctaggaccagacccaagactcgaacccagtgttggaacttattttactaggatctaaatttactaacatgtatgtttgattaacaccctaaatatgaattccctaaaacaataaaattaaacacataagagtttagaaaaccttacattaatggcaacagaataatatgactctttttgctgagatctctaaccctt

SEQ ID NO: 213307 - DNA, 540 bp, Cannabis indica
tattttaattaatgataaaatcaggcactctttttcctcttgcggattttctcatgataaggacattttgctctttaagaaaaataaataattatatataaattcttattttatgttgggtaaatatcattttgaactctatgttttgcaaaagttactgattagaacttttattttggtaaatgataaattaaactttgtatttttcaaaatagtactaaatgtcaaaataaaacttaataataacttgatctaaatgtgttatgacaaaactggttacgtaaactgtatctgcttgtgttaggaaaattatctttaagttggttatattaaaaaaaaaatatcaaaaattgagctattaagatacacggtacattttgaaaatacacactacattttgtcctttaataaaacagatgatccaattaataatttttgcaaaatacataatataaaatagtatttacaccaaattctcatgagtagccatgaaaatcaaaaaatgtaattaaaaccccttagggccagtttggcacatct

SEQ ID NO: 213308 - DNA, 578 bp, Cannabis indica
gagacctctaccttacccctaccctccctcactacccagctagcctcagtggtataatgaagactatacatgaaaaatgtcatgtgtcacaaatgctcaaagtggttctgcatttaatttgagataggattttttttttttcaattcaactctaaaacattaccaaagatcaaagtagatgtgcagtttcagactgatcaaacaacttaggaaatagctgtgataacccacaatatgcttcacatatgtgctctctacaatggataaaattaattaaatcaattcagcaatcgagttaatgtgtgaagcctaggcgctccatctccaattgaagctattgctaaataaagccagagtaatattagggaagctacccccaatgtggcagcttgcttttgattccaacaaagaggtttttccacgaaaaattaaaaaaaaaaaaactcaacattgttatggcacatttggtgttgcaaaggatggtggatctgtattctgtaagtaaaatataatacaataaaaagaacatcatttctgtttttttttactaatcataattatcattataaatataccta

SEQ ID NO: 213309 - DNA, 559 bp, Cannabis indica
ttatttcaaatgcatgttcctaagtcattttgggccgatgttgtttctaatgcatgttttttgattaaccgcatgccatcttctattcttcatggtgaaatctactacaaaattctttttcccgataagccactatttcctattgagccaagaatttttggtagcactcgctttgtttatgatgctcatccacgggtaaccaaattagatcccaagccagtgaagtgtgtattcctcggctactcttatctttagaaaaagtataggtgttattgtctcaatcttaacaaatatcttatttctatcgatgttacttttgtggaacatacaccttattgtctcaagcttaattgaatatggattgactgaacaagaagggatggaggcaatggagtatgccaaatggcttgattcttatgggccattgaataggaagtattatgaagagttgagggttgaaccaaaggaacttgtaccatctacagagaaacctccagagttagaagtaaaggtacttcctaatcatctatggtatgaatttttgggagaagacaagaag

SEQ ID NO: 213310 - DNA, 771 bp, Cannabis indica
aattctaaattaaacacaaccaattaatagtgatctaatggctaaaacaaatataaccatgatggttacaataaaaatgtaaccattaaaacctcctccatatatatatatatatactagatagatgttacgtgccaagtcacgtatgttaattttattttagtttttagtttttttaatatcataattttaaaattaataatattcaataatcattgaaatttgaaagcataatagtgatttaaataaaaataaaaattactattatactttgtaatagtaataaaaaaaaattattattcgtcctaaatttatcttcgaaattaatgaaaatgctcatctggttaaactatcaaaacattcaaatttaatttaaaataatatttaaaatttaactaattctaaatatcaaaatttgaaaataatttttaataaaaaaataaacaatatgaacaaatttattattaattgcaacactttaggtggattaattatatatatttaggtttaattaactacatgatgctaaccctggaaacatctaataatttgttatttttttatttaaaaaaaaggtcacccaataatttctcataaaccaataattctgttatatagccacattttatatagaatagatatatataacattgaatggatagtttgtatcatttaaatagctatgtaatagttaggaatgaggtatatgatagatgttaagttctagtttgatatttttcaacttattaaagctaactatttgagaactag

SEQ ID NO: 213311 - DNA, 953 bp, Cannabis indica
gatcatctatgattcggccagctaaagggtaataaagggttaagacctctgataagaagtcttaatcttgttggatattttagtaaaatcatgagtcgtagtcttctaaagggtagtagaagactaaggactggtaggtttttgggacatgattggtcgagaaatgatagttggtaatgtcgaagatggtgtggtgttggagaagatggttttcacaattttctttggaaattacttcaacttcgaactttcatttttcttttcacttttttttttatttcttttgatgagtaatttcaacattggttaactttaatttatatatacagcattacagctccaaccaagttgtagatatgtttaattggtattttttttttaattggaatattatatatagacatagcttttatcttcaacatacattgttattgagtaatgtgacaaacattttgtaacataaggacgtaatttatttgctggtggcatctttctacggcattatcaattagctaacacgagctttttatttattattttaaaacattacaagaaattaatgtaagatttaaagcttcccgcataccgaatcaagatctggtttaacacagtatagacaccaatttttaataggaaatcttgattcccgcatatcgatatatatatattaaaagtggctatctaacgacaatttttggtttaacgattcattttaacgttttgttttttttttatagcaaagttaacgtcgagttaacggaaccgttaacttagaaaaaaaaatctattttttctaaccctaacaattactgctaatgatggggatccgagaaggaggcggctagaaatatttaacatgaaacaatcaaaacataacaactaattattaagaatccccatccctataatcatcaaaatcgattctcactacttcaataaggaaatcgatcctc

SEQ ID NO: 213312 - DNA, 575 bp, Cannabis indica
tttatttttaaaataaagtaaagaaaaatcagattatacaaccttacaaaaagacaaatgtcttaattaataaaattaccatttaacccctagttaaattcaaaagctaaaagattaacaaggctagtttggtcatttccaaaccccgccaaacccgatacatctaaagcctaacaataaaatacccactatggacataccaaaatataccaaacgaaactcactaatggcccacatcgctttccacagcttccgaacacaaccacaaaaattgataaattacataaatagcataattaatatatatattaacttaaataaatttacctacaatatacatattataaataatatttaatactcaagaataaaccctaacttattaattaacccaaagtgttaaatcataagcggtctttacagttatgatatttttccctactctttgcttgctataaataaagatgctaaattggagaggattgtatgcattatgtggtgtatttagtctgaagaacaaaaagaatgcatgattctaagcctaagattgctgaggttatatgtagttactctgc

SEQ ID NO: 213313 - DNA, 843 bp, Cannabis indica
aaagatactattaaattttttttatactattttatttattttttaaattttaattgtctgaatttatagccagttattataaatttttttactttcagtcacaataaaatttgtgactaaaagtaagaattaaagttgtgattaattataaattcattcctatgttgtgactaaaaagtctgtggctaaaagtattagtcacaaaaatcacaatttattatgactaaatgtatttttcaatcacaatacttattgtaacgaaagctaaattagagataatttgtagctaaatattatgtttagtcacaaataacttttttattgtgattaaaagtgacatttagtcacaattttttttttattgtgactaaaatattgtcactaaaaaaacttttttggtagtgagtatacaatcatattataataactaataacaatattttaaaataaaataacaaacatatatattttaaatatatacttatttattacttgtattttgtatttaatttaaataaatatataccacatgcaccacattgcataaaaatatggtttgaaatcttttgggttacagttgttgtttgcattttagccaaaccacgcagtttagtttgatttgcaccacactactacaaaaataatttttgtgtcggtcaacgctatgggtcaacaaccatgatcgatgcaaaatataaaggcagaacttttacttcagctttgcgtcagtggctacttcgacgttaatttgaaaaccgacggcaaaaaattattcttttataaaacaaatttatattatgcatcggttattattagatgttaacattgttagcataagccgac

SEQ ID NO: 213314 - DNA, 559 bp, Cannabis indica
atgaaatgtgtggagctgactgccgagaatgaagaaacctagaagagagatcgattgcgggtgagaggcacacagagagagggaatcgtgggtgagaggggaacgacggggtagatgaggaccactcgtcatccattaacggaggaggaggactgggttaaaatcaccagagctatttgatttggagaagagaatgagtagtgtgtgtggctgatttcacgagggtttgtaggaaatataggtccatcagcctttggtttataaaattcaaaactagtattgtgagtttttaaaaatgacgaaaaaagttaaaatcgacctttataaaccgacgctgaacattaataaactttttatctttttttcctcagttatgttattagcgtctatttaccacagtcacaaataacctttttttagcgtcagttctaaacactcacataaatacatggcttactattcacgtcggtcaacgaaatgaatagtggtgttgaccgacgtgaatagtataatttgtagtagtatcattttattcgttggaacaattaaaaggccaaca

SEQ ID NO: 213315 - DNA, 1051 bp, Cannabis indica
agggcttaaggctcaggagtatgtttgtgggttacctccaagaatcagaaggctggaggaaagagctcaaggaagggtgaaacaagctaggagtgtacccttcagttgggtatatgatagacaagtgagtctctaagttagtaggacactatggttgattcaagggaaagtgaagtgagctattgttactattattaggttctttttctatttgtagatagagcagcagttggtttgggcagttggtaatgtttttttgtttttgttttttccttttctttttgttgtcatgaatgaatggaatgaaatggaatatgggggtaatctttggactaatcttctctattaaatagttttgtgctatgtaagaaaataatgatcattttgttttatggcaattttgatgatgaccaacttgatttttgatcctattatcataccattttgtgcatctttcttcttttttcttttttcacttacagtaatgaataccattagtttcttaatcaagtcttgtgaagtgacattttttaggattatatttgttagtctgtatttgtacaaaaaaaaaatcagtttcttaatcaagtctatgaagtgatattttcttaaataaattggtatattccatctcatactaaatactaataacactaaagtgaggtcatttatactgttcaaaaattatttctctattttcaattcatttacgtcaatcttgttaaagaattgaagctttaatacagcttgttcagtagagtaaaaagtaatttttttttttaatattaaagagttcatttttactttttgctctagacttagaatgagttcctttactaaaatgtccattcttgatacttgatttcttaggcattagtaagttaagatctggtaaaaatatatatataatcacattataatttagactgtctcatcaaaaataaaaataaaaaacttattttccaggtctttataagtacataaaactttataattattcactaaatatatcttaaatttctgattacccagatcttcaagccacccaacc

SEQ ID NO: 213316 - DNA, 1022 bp, Cannabis indica
aaaaaaaaattaacaactcataaatgtaatttgaatgggccacgggtcctcatatcgtcacggccagccttggtgttgggccaagagaataaactctccttttgtggttcaaggtcctataaacccaatttctttctgagtacttcagtgtcaatcttttgaagaaatgcagatataaaatcatatatttaataatattcatttggtctattgtaattttaaaaccatccatttgttaaaatttcttctcgaacttttacatttacattaatttaatacttctattgacttctatcccattttatcatttaaaaggtgatgcatttttataaattagtaattttcctccataaactttgacaaatgtcaagttgtaccccatttaaataaaaatgaaaaaaattcaacatatcttttttctaatataattcttgatttttttttttaaaaaatcattttgaatgattaagaaaattaaaaaagaaactaaaaattataaaattaattaagtgattttagaaaattaattatttttttttattaagaaggtcatttagatataaaaaaagtatattaaaaatttaatttgtgtaagaaatcaatttcgagataatgtttgagttgattttttcaagttgacatattatttttttagtttaatttacaatttttaaaaataatttttaattttaagtgacgtttggtaacacttttattttaaaaattttagggtgcatttggtaataatttttaatcagttttctgtttttttaattaaaaaagtaaaaatatttttcgaaaacatgttctataaaacaattttcactatttaatttttaattgagaataaaaattttcaaaaaaaaaattactttcaaaatttttttaaatattttttttcttaatcaatattttggacttcgactctaacctagaccttgggacccagactctggcctcagcctcattctcggactccgaccacggccatgtccccatacctggacctaaacccgacctaa

SEQ ID NO: 213317 - DNA, 760 bp, Cannabis indica
cgctgaaagaagaagtagatcgcttattggcgtctggcttcatcagggagtcgttctacctaaactgggtagcgaatccggtactcgtgcccaagcctaatggctcatggtgcacatgcgttgctttcattgatttaaacaaggcttgtccaaaggatagtttttcgcttcctaacattgaccaacttatcgatgccactgcaggtcatgaacttctcagttttgtagatgcatactcgggatatcaccaaattctgatgtatgaaccagacctggaacatacctctttcattacagatcgagatttgtattgttacaaggtaatgccttttggattatgaaatgcaggagcaacatacaagagattggtaaacatgatgttcgcggatcaaattggtgaaaccatggaagtgtatgttgacgatatgctcgtaaaatctcaacatgcaaaggaccatgtcatccacttggacgcaatgttcgagatactgcgatgatataaaatgcgagttaatcctctcaaccatttctttggtgtcggatcaggaaaattcatcgggttaaggtgaatgggcaagaaattgaagctaaccccgcgaagattaaagctttggcggaaatgcgatctccgaccaaacaaaggaggtccaaagccttaaaggtaaagttgctgctttaaatcgctttatatcacgttcctctgataagtggaaagaatttttctaaattttaaaagtcaataagaagtttcagtgggctg

SEQ ID NO: 213318 - DNA, 866 bp, Cannabis indica
acgcccaaaaatgttgttttcatcactcctcgatcatactgccatgtgtaagtcatccacaagcaaaactgcattcatcttctgttccgcataaagtggccaaataatgagcaatatcccattcacaatgccctgctccaatcacaatgagtaacaaattcgaactcaacttaaacaaaatcaataaataaaaataaacataaaaattacaaaatatatctttattttctgttttcaaaattaaaaaacaaaaatagttataaaatgtatttttattttttaaaatcaaaatttaaaaataaaaatattaccaaatactataataaatattaaaaaaaaaattcgtgaaaaaagattaaattatatatatttcttcctatcatatcaatccatctaaagtgctttttctccacattaaataaaaccaagaaacaatgttagtacttcatagtgtcactacatacgtcacacaaacatgattcaattcactttatacctttttatataatttcttttgtttttattaataacttgtacattgaacttgaaattggactctataccccataatattttaatatacttttaattttatataaaaaattactttttaacaaagtacttattatacccttcctataataattaattcatatattctcactctaaaatttatacacttaacttaataaataataataacaatgcatgcacataatatactttttcaattttaacaaaaaaaaaataaaaataaaaaatacaatattaaagatataattttgtcccgttatatatatttatcatatcctatataaaaataaatatatatatatatatatatatttatatatacaataaaaaat

SEQ ID NO: 213319 - DNA, 505 bp, Cannabis indica
ataaacacacttacagcccgtttagtttggtataattatctttgaaatggaatgaaatttaatattttttactttatgtccaaataaatattatggcccaaatgaataaacacactatacactattttttctctctttaatgatttcttactttttatgtttctttattttaatcaaacgaaaaagtaattattaaaagaattattatttatattaattattgttatcccaatttttgtactctgacgtggcatcacatgaatggtgacacgtggagtccacttggaatatctgctcgggaagaatggtccgagcaggacatatcgttggcacgctcagagtgaagtattcagcaatccgcgtagagaaaccattgcatcatgagtgatccgcacaatccctataactcagggatcaatttacgtggatatggcatacacacgatcccactatcagtgtatctagcctcaatcccacgatccttgtattcagcattgatcccaag

SEQ ID NO: 213320 - DNA, 638 bp, Cannabis indica
aataggaaagagcttattattcgtgctttagtgattagtaaacaattgttttttatggtaacagatgctactataagtggcaaccacacggtattctttagtaaaaggccaaagaatagttcgctttgtactgaccttgtggctacataaactaatggttttaattatcacgtatatagtcaccttcatatatataaatatatatatatatatatatatataaatatacattgattatcaactgagatcataattaattggttttgaaattgagtttaccatttttgccgatccttcaccacacacaccaagggtgacgaatacatagcagcacgtacaccgtccaagctgcgcgcagtacgtacgtatatatatataaatatatatatatatatgtaattatatattagtatgcatatataggtgattagcatagaggctttagtatgcatatatatatatagctaataataattaatcaaattttgttggaacaatttagtactcatcttagtttcataccaataatagttgtttggtagtttttaaaatcttatatataatgacttgaaatcatgatatgttgcacaaaaaaaatttgttaaaaattattaataaaatcaatttattatattaat

SEQ ID NO: 213321 - DNA, 1084 bp, Cannabis indica
ctgttgaccacgtaaacctaaaactccttcccaccaacatcaatagcctgatggaataaggagcatcatgaaaaataaacttcaatcctaacagaattgtaataaacgtctgtcactggtaccaacatgacaattgctacagtgacatattttctaaaagaaatagtacagtacccattgaacagttcaaagacccaaaacacaaaactaatatagagacataacagacatagccatggaatagcactaagtaacgtatgaattgaatgaaactacactgttccccatacaaaacattgtaagcaacggccaattaagaactaaccatgaaaacaggaaagatatacacacatagttacaaaccacaaaacatggcaaaaaaatttgaaattccaaatcaacacctatttgaaattgaattccaacaactcaaaaaagaaaagaaaaaagaactcacatttccgtggggattattggctaaggtgccgaatttgatacgagggttcccaccttgggcttcgacacgcctgatctcatcgaccaattcgggcgccagtctaatgatcatggcaaaagcaggcgggttattgcccgccactaaactaaatgactcttcaacggccggtgccggagaaattgttccggacgcgcggtttcggggattggaagctgaggcggagccaccgagtgagaggcgtccggacccagctgaggaagagcggtgagggggaggaataggaaaggacgaactaagtcgcttagctccggcacctcttccagcgccggcgccgcccctaccgagcttggattgaccaccgtacattgagaagtttagggcggaggagaggtggcgtctaaggggcgcgttgagtcccgaaaacaactcaccgtttacacacacctacctggtaatcatatgtattctatatctcattctcccttctttttttatttttttattttttaatttatttgttcatttaaataaagattttataagaaaaatcataatttatttttgttcatatttatgtttttttttcataatgaaatttctcccaattgttctataaaaaataaataa

SEQ ID NO: 213322 - DNA, 838 bp, Cannabis indica
attaccctttttttttatatacaatacttaaccctaaggggttatattaggcttattggggtaatgagtataattagtggttggactataatttaatgggcctaaattatagttttagggtgctcccatgtgcctctaatacatttattaattattcaccatcccattataggtagtagaataaatattgggtcacatagttaatgattgtgattatggtattatattagtccacaaataaataattctaacactgcatatattatagattgttcagtatatatatggttgatgtaaaattcaaaaatcataatgttaaaataacctacttaaaagttacatatatatgtatattttttttacacattaaaagcttttaagaaaacattgtaattataagcttacaaatatttaaaataaaactaaaaaaaaaaaaaaaatacctaaaatttgactcaagtgggcatttactcatgatgggctactgggcaaagtgtcaagtccataaaatttgggcttagtatatagcccaatacatattattacatatatttttttttaaagaaatatattattacatttacaagcattaaaaaaaaaaaggagtaatttgcggcaaaaactcctaactatcaatttacttgcagaaaaccatccaacctcatattttggtaggaaaaccctccaaagtactgttccgtttatatttttaaggtgtcgtctatccagtctcgttaagtcctaattttgcctacgtgacaatgacaggtcactaaaaatttatcctatgtggccatatttacaaaataaaaataaaaactttaagagtaatttgcgg

SEQ ID NO: 213323 - DNA, 613 bp, Cannabis indica
ttttcatatcttactattggatatataggggaaagtaccatttctctatgaatatgcaatttgttacatctataaataaaatatacattaaagatgagcaatagttatatgtaaaatgaacttaaaatgactcgtactgaaatatatttgaaataattatataaggtagtattttttataaaaagttatattttgacgtttaaagagtttttttttttttttacatttttacgggttttcatagaaacaacaaaaaaactgcatgaaaataatatctaaataacatataagtaacaaaaaattaacatgagtacaatataaaaaggctgtattttatgtaaataaaaaacaaaaatcgtaaaaataattaaaattccataaaaccgtatttttgtaatttttttgttatttttatgtatttgtaaaataatctcaatatatttttactaatttttttctttattttaaagatattggtgttttgaagcacttattaataattcggctttactatttttcatttatgagaaaactagaatataatttattttttacttttttttaaaaaaaaattaaaggttgccgttttaggtaactatttttttgttttttt

SEQ ID NO: 213324 - DNA, 530 bp, Cannabis indica
gttcaatttggaaagttttctttctagtgctactgcagagctcgattctaatggtacaaatcagaaaaaaaaaatttaagaaagttttgtacagctgggaaatcatttttgtggctgtctctagggttgttatgttctataaataggacctagagagcaaccaaatgatttatctattttagtctcatatttttatatttatctttgtgagaagagtgttttatttgtaaaaccctagagtgttttatttgtaaaaccctagagtgttctatttgtaaaaccctagagtgttcaactagatttttgttttcttgttataatctcacactattcatagaataggttgaagagaagctttgaacaagcgtaggtctttgggagaaaacttttctaagtctcattttacgaggaagagcatacatcttcaagagaagatttgtttaagccttactttgggagaaagtaagcacacatcaatagctgaagggagtacactacttggtctggtttagagatcagattagcaaggt

SEQ ID NO: 213325 - DNA, 1288 bp, Cannabis indica
catacttccttgtcattgttcaccctaacatcaggagctctcagttctcttgtatagcgaaaacctaccaatataaggtgcaatatgtttctgcgagcaacatagattggattgggttcaatcaaacaccccttactatatgcttctctaagaaaaactctttgtccattccctttggttgatatgtagaatattccagggtgctttaaaagcagttcccggacattaacacccaaagagaaatccctttgaaaatgtgctaatctttcaacctcaaccattttctccactgtcagacacaagaactcgtgaagaatgccaacggctcttttctcataccgctcaatgccaccacaagagcggattctaaccacttctttcgtctcgtaaggcttcacaaaaggaagcctttgccaattcttcaacctgtctctatagccactctcaatcttatatcctgtagggaaattgatggggaaggcatactttgtctcaaactcactcaaccacttctctctatactctttctctctccatttctcaatttcagccaaacccaactcttcatctacatcaccaactaattggacaacctccaagtcaaccagtttgaactcttttgagtatttagaaaggattgattccctgaaatcttcaggcaaacccaattctctcctaaccaatctcaaagcatgaagacgcaattttccactcacagacatcatcaaaagctttttcacacgacgtacagcctccatttccccttttctcacaacattttcctcctcatttaccaaattaagcattttatgagtaaatttgcagcacaagtttcgccttaccgggtgagtaaatacgtcgaacacatgggggaccttatgaagaaactccccaatcccaacgttgatccccacaagatgcctccatcgagacataatctgtacggacacaaaaggaccacgcttccgctgcgtgatgagatggtggagcttgaggatgacgttgagctttctgatttggggggcaactttgtccagctgggtgtctcttgttctgtcttgttctaagcgggtttgcgcagaatctactgcctttttccatctcctttgtgttaaagaattcaaaggtccgaaagaaaaaatgggttgtaaaatggcaaaaccttaacctctgctgcctctgcaatactatcatcgtaaggaaactttacaaaacagcggcccaaccttcctccattattataacccctataccttcctcctaggaaagacaatgtccctgctcatgc

SEQ ID NO: 213326 - DNA, 550 bp, Cannabis indica
attgtaacgggctagaaaccgccaaggcagagccccgactcgactcgcaaaaaaactcaaattgccattcttagagaaaatagaaagagcaagcacttatttaggttaataagtgagaagggtttttttttatatatatataattatattacatattatttatttatttattttgacatagtgattaaaattacttatgaatttatgatgcatatatttgtaatcagcgcaagatcctcttcaaaccaggataacttatcgtctaattgaaaaacatgcttaattaaaccatgagctgttaaattcctaacacgaaccacgtgggacaaagttacttccaaaatttaaacaataaaaatataacgccttcaaacagtaaactcaacacattgaatacctttcccattataattataaactgaaaagttaaagaataaaacctattcagattacatcgggttaattgggcgagtcgaacctagtttcaactcgccaaattaacatattggccagtttataatttagttaggttattttggtttgtattttt

SEQ ID NO: 213327 - DNA, 1043 bp, Cannabis indica
ccaacactctcactagagagaaattttttttttcacaaaccatcttgtatgtagttgagttaaaatatgtatagatgctcttgtaattggtttcagaaattggttaaacaagtatggtggcggtcaagttgattatccctatatagtttagtaatggaacaatcccttaaaaggtatcacgcttattcaatagttttgagtttaatttttcccaatttattttttattttttatttatgtcacaaaatctatttttccaaacaaagattaaagtaaatccaaaaaaaaaaaaaaggtaaatactattttgaactttgtgttttgtaaaagttacatattagactctctgttttattaaatgacaaaatagtccttttatttcccaaaatagtaaaataggaccctgagcttaattttcgatttttttttttaaattaacaaacttgaaaacaattcctaacacgaatagacacagaaaatataaacaattttcttataacacatttagatcaatttattactaatttttttttacaaaaactcaattcatggtcctttttatactattttgaaaaatacaaggtccattttattatttaataaaacagagggtccagttggtaacttttgcaaaacacaatgtccaaaatgatatttatcctaaaaaaatcaaaatagaaatatatacacgtattagttttattccttttatgctctctctcttaaaccttttatgctctctctctcttaaacgaagatgtattgtgggttgacgtatagtgcgacttgttagatatatcgggtcatatggtatgttttcattctcttccccgatcaagatatcctccatttcatccaaaaaaaaagttgattgaattatcaaaaatttagaacgtgaaatgcattgaagtgtagttaaatatattttttaggagagtatacaaattaatattagcaatttaaataatttatagttggcttggttagaccaataaaattaagtacccaggctccatttagaaataaaataattagtaatatat

SEQ ID NO: 213328 - DNA, 711 bp, Cannabis indica
acattagactcctttatatagtgtttaggtgatcacacttagaattcaaactcaccatctcatttctctcatataatgagcattaatatagtttgtaacaactatatttcaaaccatttgaatcctatcatcaaattgtgtaacatctcttttattacacaatattatgatcaaccaaaagaagttacaaaagcaattaactttgtaactcttctccatgttataaagtgtaggttacaattttaggttaaataaattatatgttacacaatttatttaccaaacacctaatacatattattcacataataatatatattactacattttaatctacacttattatattataaaataatataacaatcccccactagattaaaatgtgtaacacacttgtaacatttatttaatcaatcaaaatattatatcaaaatataacaccgctaagcactattctttttttacgttgattatttatatgttaataagcttgctaaaagataatattatatatataggcttacatttattacctacttaattaatttttatattgttattattatattgtaataaagtcgaattgaacaaacattatttttgtcaatagctaacaaaaaaggatgtacctatctttctagctatagttaagtttatcacaaagttgttgaaatagaaagaatattcacacagtttttacggtataaa

SEQ ID NO: 213329 - DNA, 589 bp, Cannabis indica
tttgccaagaatacaagaaacaacaatgacctagcatgaagtatttgactcaaaatcaaaatggatatgtaaaacttctatcatttgccttttgatctaaccttcaaatattaatgactttttcaaggtaaattgatcctcaattttgcatctaaaagtctttgggtgattctgtaatacagtcccttaaaaagaatatactgatgcactctctacttatttcggcaagcaaaagaatttttagtttaattttatttcatattcatgtacgttatgactatttaagatatcctacaaaattttgaaaaattcaaaaataatttacaatatagaaaataatgttcaaacaatctattttacatgatataaaataaaatatcacgtgtgcaacacactatttgaacgtaaaattttgcaggatgtcttaaataaaataactataatttacatgatcataagaaaaaatttaactaaaaaattatttcagatactaaaatagatagagatgtatcgatgcatatcttttaatgaggtacattataaaattttccaaaatcctttttatgttttaaattctatttttgtttcc

SEQ ID NO: 213330 - DNA, 538 bp, Cannabis indica
ttactaatttagtgattatttgtgtagtaaatcatgctccccggacttatatatctgttaggattttattagtaatatttttaggcagatttttaaagtgtttttaaataattttaattgtgttttgtactaatattttacaagtttagtattgaaaaaaatagagaaaccttaaggataaaaatgtgtaaaaaggtcaattaaataaattcttgccgctaaagcaccttgaaatccttcaagaaagaaatctaagagattcggtgtgtttggagctcctaatacaatggaattaaaaaatatggaataacgcctagacataaaaatttaatgtcatagcattaaaagggacaaatttggcagcaaggttcacttttgacaagtccatagatgcgcctcaacattgggattcaatgttgaggcattcgaactttaaatgatctctgcctaaaaatcagcttctagggtttttttacttaatgcctcttatatgtttaagtttattacaagagtaaaaaatttgtatataaattgtgat

SEQ ID NO: 213331 - DNA, 713 bp, Cannabis indica
gcataagagagcttcaggatataagggaagttttcgttcgtaaattaaaagagaaagaggaggaatgtcaaactttgtttgaacgtttccaacacgggttaggagtgatgaaggaggagtgtatcaacagctacagcaactacattgacctccgtattgcacaacgtctcccctctgctcccaaggattctgagttcacactaggcagtgtctgaagtacttgttcttcatctactcataactggtgatttaccaatatggctaaatatttagtgttaacaatctaaaccttcctaagtatgtttcctatgtaatcagctaagaagagtatgttctctttattcagactgatttctaattttgagccccatcttattatcaagacagtataaattatcttcattttgctttcagccataataatttacatttacacttataatgcgatatatgagttagtctatacggcttttcatatttttctgtaataaatattgttaaatttatcagtacatgaaaaagagttaagagcaaacgccaaccagcctttccgaagcagtagacaaaaacactatagcagtaatttacaacatggcaagaaagcaagaatagcaccaacaaagatttgaacaaaaaacataaatgaagcttagttttccaatcgatatagtctaaaaggctcctaattcaactatttcaatgaggcaacaaaa

SEQ ID NO: 213332 - DNA, 608 bp, Cannabis indica
attgcacaaagtgcagttggtgtggctgttgctgcagctgtggtcatcctcagttacttctatgaagttcatagaaaaaccaagtgataaattaatcaatcatttatataattagtacattaatgggaacattattaacgcaaatcaaaaataataagtcctcatttgagatgatgatgttgtagtcttgactcttagaaaaaaaaaacaaaaacttgtggcttttgtttcaatttaatataataaacaataatgtcattattataaatatttatatatattcttagagtactttcaataacttttctagtttattctttaaaatatattactataatatatattaaattaatattatttttattttctagactatttaaataataattttagaatatatacacaatattgataaataaaatattatttatatatcattaaaagtaagttgcattaatttaagtgtatctctattatatatatgcgatataaaggagctgatagatgcctttttttttaattacatttagctaaaaatacagaatctctattataaagagacttttgactgcttacaaaatacaattttattataattttttaaaaaa

SEQ ID NO: 213333 - DNA, 753 bp, Cannabis indica
ttagtattttagccataactctctcgacatatgttagaagtggacgattcaaaatgtgttggagagatgaataagagatatatggattttatggttttgacaagatctaattctgaatgcatcattaagaaaatattccaacaattgcaacttagtgagttgatcttactaactctttcactaagttgttacagggtttacctccgagttgtatggatatatcccgagagtttcaagcattgattcacaagattaatgagccctaggccatacacattgattcattcattctttggctgactcttaaagttgatgtctctcgatccccgagactaagtgtttactaatctcaaaaatcaactctgtcaatttttggggttaacacttgcccctcccaatctacaagaattcttttgagtgttcttgttgactaagtgaatcggggttttgctaggttggagtgcgagccttaccttctccatgtttcttaaggatgttcctactatacatagggttccttccttgcttgagcccctcagagtagtgaaaaattcttcttactttgtctaacaagtctcaagtttgaacctcatctaacccttttgtctctttttcttttggtggtcaagtgcctaagtcaccatgcagtcaaatgaccttggtcaccataaggccaagtgactttgagtcactcttgggccgagtgactctagtcactgagagcctgagggactttgagtcgctcttggggcc

SEQ ID NO: 213334 - DNA, 1054 bp, Cannabis indica
aaaactagaagctgatctggacccaggaacaggaccacggccatacctagacccgaacatggaacaggacttgggacccagaattaggatcgagacccagaactgcacccatgtctcggtccgggacctaggacatgaacctaaaccagactgggacctgtgattgagatccagatcttgtcccgggattcgggaacacgggcttggacaacacccatagtcggtgtcttggtcagggactcagagaagcacccaaagctggaccaggacctggacctagacctagacttgggacccgaaaccgaaacatgaaccagaacgtgaccaacaccctagaatagcactaggaccgtgaccaaaacctagacctggatcgggacccagaactacacctgaacccagccccggaattcaaaccaggtcccggacccagactaggattgagactcaaacctgaactcgaactcgaataccgaacctagacccagaccaaggccctgacctaaaatggggttcggaccttgacatggactaatcttagacacgaaatcgaataccgacccaaagctagatcgggatggaaacacgggacctagacccggacccagatgcagacccagacccgaacctaagacccgaaccaggacccggactcgaaatctcgacccagaccagggatccaaaaaacccatacccagactaggactaagagtcaaaccccgaccccaagctggacccagaaccccgacccggacccgaaaccaaacttgggctcagaatcagaactggaattgtgactaggacccggacctgagactagaaccaaacccaaaccataacccaaacacagaccagaacctggtaccaagaccttgaataggactgggacttgagacatgggacccggacctggacctgacctgttcctgaaccctcgccgggacctgagacctgtgaaccagactaggataccgacctttacaaggacccaaacctgaactttgaccaagattgggaccgagacctggccccgaaccctgaccgggaccgtaga

SEQ ID NO: 213335 - DNA, 656 bp, Cannabis indica
accaatgaaaacccatgtgtatccttatgtacactttgccaaagtggatggaaatctgaatagcaaaacaaaatgagagtgtagaaagtttagcccccaaaaaaatataaataaaacataataaaagaactctttttgaaaatcctgcttaatttaattaataaattgagtggaatagtttttggtgtattatttttttatttttgcatagttatattttatatataaaagaatctacacatgatttcacaaattttataatttaagctatttactaaactattagtatattataaatactaatactcaaaaaaaaaaaaaaatggcaatccatgattggttcaagtcattaaatttttattattttaaaaaaattagttcaaatatatcaataagaaaatgacatgtggatttaaaatagcttaacatttaacagttaggtacctacagggttccagaaatataacttagttattattaccgctaaacttaagtatttatttacaactgagaattaaacttaaatatttatgccgcaaattattctttatttatttatatacatcacaaaagtatatacttgttcgtgcaagttttctcttgtgatcttaagaaaaataagcatcaacaaatattatcatagggtgaaaaataaa

SEQ ID NO: 213336 - DNA, 539 bp, Cannabis indica
tataatcgtaaaatgatcatagatttacactttgtaactgtcatagttatatcgagtaaattaaatgaggttattttataaattttagagtaaatagtggtataagtacttaaacttttgagtttataagcggcataaacccattatttataagactgtaatttttgtcaaatttcatcagtaccgactctgttattgtcttaaatagaacaaaaataaaactcaaattttagattatttagtcaggatggaaatatgcattattagtcacttttaaatcttcttttaataaatttaaaaggtagcatgtattgacgaaaatagaaaaaaaaataacagttttacaaataataagtatttatgccactaaaaaaattattaaatttatgcttacaaacttaaaatttaagtatttataccgttatttactctaaatttagtatctcatgtttagtttgaaaattttatcaagtagagttaacaagagagtgaaagttggttaacatatgaaaatattacacatgatctgtgtgcctcca

SEQ ID NO: 213337 - DNA, 1015 bp, Cannabis indica
gtaagtgttctcttttatattcttctaaaagttaatttgtgctttaaaatgtcatacgattctcaatttaaacgtaattaattaagcttttaatttacaaaaaattatgttgaattaataatattcatcgtcagccaacaattatagtttcccccttacatttttgtcctcgaaattggaacttgtcaccattcttctgcaataattattcccagagaaagaaaacggtaagtaaaatgtatggcagtatgggaaaaaaaaggtgtagaaagtaaaggtaagaaaatggtatatatttttaattttttctgatattttttttggttgcatgtgtatttatttatactttaatttatatatttagtttatttttttttttcacacattagatttaaaatactcttattaaaaatggtagatattgacatattaattatatattaatgattatattatattttcaattttaaaattactctattattaatataattatttatttaactttaaaaaataaattattattttaactaccactaaagcaagaagaaaaaagataaaaaacaaagttaaaagtataaagttataacaataaatttcattaaaaaaataatgtagtaatacaaaaaagatcagtcaatttgtcaaaactaagtaaaaaaaatagtaatacaaaaacatattgaggatgttgttttgcatattacaattaggctattactttgtcattttttttctgctttgtaattatcttcttgcctgttatcatgttgtttattaatttattttagtgttgttctatatttgtttttaggttatcgtttttattttactgaaaaacagtatttttctaattttgaaacattaacatagtacttttgaaaatttggtacagtggaaacatatattaaaaaaagtgtgacagtaaaaatgtaaaagtgacaaaaagaaatggatacttttgtaagatctcttttaaatagctattattccacaaatacacaaaaataacaaa

SEQ ID NO: 213338 - DNA, 1236 bp, Cannabis indica
ccactccagtaggtggcccatcccactcttacacatatagaaactgtgtatcaccaacaaaaattataatggcatccattgggatagaaggaacctcatctacattgggttcccaatcttccggatacgcatcatcctcatcacaatcgtctcccaaatgcgatggatgtgtcgtggatgatgaatgcttttgtaataaacttatcacgatcacaatgtgatccatgataatattcttcatctctttctgacttctcttaaagtcatccttcatctcactctgtgcagtcagaattgtaagttattgggctttggcattctccaatctcttcgccaaccctaggtagtcggcgtcattggctgcaatagaggttgggggcatagtggaagatgtggagggctcaggtgcttctttcggtggtgatggtggaattattttggaattttgaacatattcgacaacctgttttgcttgggtcttgaatacagtcgaatcataagtaccaacttgtgtttcttcgacctcatccaaggccatatccaccgtggagacatcaccctcacaattagacttccaataatcaacctcccaattcagaggatactaaatttgaagaacaactatctcaaaaaagtataaataaaattaatatcgttaaatattgcacaaaaatcgcatccaaatatcaaaaaaatcgcaaaaatatcacagaaaatcgcgaaaacataacataaatcgcaaaaaaaaaaaacatcacagtcacacatatgtcgcacaaatattgcacaaaacaaaaattaaattgcataaaaactcatgcacatatgtcgcacacacatcgcccaaaatggcgcacaaaaataagataaatcgctaaaaaggaaattcgcatgtattcacataaaaaatgtagcacaaatgttgcaaaaataaaatctcatgctcaaatgtcacacacacgtcgcacaaatgtcgcagaaaaatcagataaattgctaaaaatagaaaatcgcatgtattcacacaaatatcacataaacataaaaaatgtcacacaaatatcacatgaatatcgcacaaaaaactctaacacttgcacataaacaaaaataacacatagcataataaatatccaaataataatgataaatagagaaagattcacatacccttttctcaaacagtgcagccacatcaggttgcttcacatcatgcttcgtaaccgaatcgggggt

SEQ ID NO: 213339 - DNA, 1436 bp, Cannabis indica
aagcttgcaaaattgtgggatttgtctttgattatgtgtttgttgattaggttgaattaaagagggtttaaagctacttaacatgggtatggtttcagtgtttttaatctgaaatgttagcttgtaaatggaatcttgttattcaagcttttgggaatgtgattgttgattcttagctcaagttggagcttattatggtttattgttagtatgcccttaaaattcatatttagatgttgaaagagcttgtttaatgtcttattaacctcttgttgtggtggttttaatctgtgatgtttgttttgagttatatgcatgttttcgttgaaatttggtatggttgaatatgttttcgggttgctgaaaatgaggtttcctaggtatggaaaccaggtgccgcggccccactcactgggcaccgtagcctgcctctgttgaaatccttggttttcaacacaggtgtcgcgaccccatgtggggagtgtcgtggcccgcctttcgtttctggacagtttcgaacgcattattcgaatattcataactttgtgatctggactccgatttgagtgttccgagtatcgttggatagctcgttccaagctctatatgtttatctgaatttgaatgcctattttataattatgtggatgtggatttagggattaaccctattttgtgaatccataaatggtgactaggattaccggcactttgtcaggagcacccaaggatttagaatctctacatattcgagacaacaggtaagacagtagttagcacgtagagttaagtgtgatggcactcatgttgaatattataattttgattaattaaaaattgggattagggttattaccctaaagtgagcagttatatggtctagggttattaccctgatgtttaaatgttatgccatgctatatatcttgaaattaagaattatgcgttcaaggcataatttggttggactcggtaattaaaaccgagatgaaccgttctaaggccttattgtatttagacgtatgagcgtaacatgtgggtctatgtcacatagacttaaataggcgtgtgagcgtaacacgtaggtctatatcagatagacaataagtgaaatggctttattacatatgtgaaatgttatttgtgattattgatatctgtactgtcttgctgggcttagctcacgggtgctttactgcgcacgaaagggtaaatcagtttgtgatcaaccatgagtgcgagagcttagcggtgcttgtacatgttcggccacactagactaagcgggttggggtctactagtgatgtattttgtaatctctaattttaccgcttaggtcggcacgtgacttaaacttgtaatatttgtgaaaatgtttatgggaaaccgaaatatgtaacttttggtttatctgtaaagtttaaaattattacaa

SEQ ID NO: 213340 - DNA, 751 bp, Cannabis indica
atgtgtgtgtattcattatggggttgattacagggccagatcaagaccggtgctccttgcaggtcagaacgtctggctaaatacaaccaggtacacatattgttgtgcttagaaattatcttcttcttcaagtgtgataaaacatattatgcactaacaagtttcctttctatatattttggcattgccatggcataacagcttcttaggattgaagaagagctaggacatgctgcaatttatgctggagcaaaattcagagcacccgtcgaaccatactagtatcaagtttcaacgagaccttacttaactcagtattttacatggccaaatgtagttttgttacatcaaatgttgtagtaaataatctgaataatgagactgttgaaaacttattgccagaatagtaatcagagtttttgtttttcatatatctttctctttttgggtcctatatagttccgtattatattcttgaagccgatgttaacttcagagattgtcatgaaagagttttaatatgttcaagtaagctcaagtcaatattgactgaggctaactactaaactgttgagttgggttcaatttccctcttaaaactttgcttgatgatatgtggacttgtcacttggcatccttgaagggagccactcaccattggaaggttaaaaaaaaatcatcattgtaccgttgggaatgtaccgttggaaatgtaccgttgcttgttttattatttttctaaaaaaaagtc

SEQ ID NO: 213341 - DNA, 586 bp, Cannabis indica
acatggattgcactatcccctattaattgtggaaaatgggcagcgtgcttataaggtggctagctgactcaaagatacgctagctttttattgtttttttctccgtacttcacttcttttacacacataatatagatttctatatttcgtgatattatttcttgctacgtcgcttaatattggactggaagatattttctaaaatatttctcccaaattattatttatgactattagaacagagagttagtaattagtctcactactataaaaaatgacacttagcgtcagctaatgaaattaaatgagtgtttaaaactgtcgggaaaaattaaatattttcgaccatcgccatcaaaatctgcgacagtattaaggtaaaaacacgaatttctaatcaaaattatactcgacgattaatcgtcgggtataactcagatgaaataaaaccctcgtcacttaattttatttttttttatttcagctacccacgaacctagatctcttttgcaaacacaacgatgcactaaacctcgaaacccaacggcgcattagtcagatagtcattcttgctatattatgatgt

SEQ ID NO: 213342 - DNA, 1100 bp, Cannabis indica
agtggttcaatgatactagataacttagaagactactgttaatgagatttttgttaactagatttgagcctaaattgtgataaacttgcactaaaaatttaaacagtaaagaaaaaagtaagaacacgaaggttttttatgtggttttgcagttaaaattctgcattagtccacgagtcaatgttattagatttctgatacagttctagggccttctctcttatgaattttttgtctccttttttagtgtaacatgcctctatttataattacgtagtccgacagttaattacatagttgactgatatctttacaataattattccctaaaattgtggggtttgattacataccacgtgaaataaatgcagttattatttgaaaatcacacaacagtgtttggtccacttttactgggtcaatacatacgtgtattaaatacgttataaagtgtatcgttctgggacatctcgctaagagcatagcaacaataaccctggtagcgagctagagtttcccatatctttctaaggttgatattgtaaatctcgtcgtttatgttattgaagacacaacgctccatctaacaatcgcagttcttgacgacgaggtgaacttcaacagctaatgtcatttgactgtcagcttctatccgagagaactgacccgtcgagattatgaatctcattgaaagatgtctaaagttgattagtgaaagtattagaaatgtgccttcctatagcgagatggacgcctcgctattagttgttttgggtttgcccgactattatacttagtttgtatactgtgtattatacgctaagtgtcttaatagccattatatctaacctacatttcttcatgcataatgagattaatgcctcaccttacacatttaatggcatatgatttctcgttaacgcatgagacaacagtttgtatatctttatctcgcgtaagacgttatagtcagcaagttgtaaatatactctgttacttctgcattaatgagttattccattttcaaatgtaattacgctacattcattgattcatattcttcctaatttgacacatttcctcctttgaaatgatagccg

SEQ ID NO: 213343 - DNA, 629 bp, Cannabis indica
ttatagtgtttaagaaaacttgataatttaagtgtaatatgttcttaagataatccaaaaataaactaaaaattcatgttcaaatactaaagaaaacacaacttaaatgtgtgtgaaataaaaaaagaaaattaaaaatcaatctctaaattattgataattgaagataacatctatctaaaagttgtagataaaaaatctctttttcacaaattataatgtgaaatgttttagttaaaatactttatatatctagaacacttctaaatgggtaatacccattgatgggtactaaaaaaaattaataaggtaacaatctaataaccttttatggcaagtttctaataattatttttttaaaaaaattatatttatattaataatggggaaaagtggtgcgaccatttgtgggtgttttcttttttctaggaaaattaaaatagttatattttgagaagattaccagtatacaaaaatgaagaagaaactaatactgtacatatacattttttttttgagaaaatataataacattatttatattgtcaatccctgctgtcacgagtttaaatccatgtttaaattttaaagaaattttggatgattaattagactgtttcaaaaaaaaa

SEQ ID NO: 213344 - DNA, 743 bp, Cannabis indica
gattttcttctaattttaaataattgaaaataaaatgaagcttatctatctatttttcagcaataaaaatcagatccacttaattaaatataacccactaaagacaaaataatttccttggtaaaaagaccattttgcccttcacttagccaaaaagtcataaaaccaactacgggtaatttggtcaattctaaaatctcgactattcttgattcccaatatctaactatactgccccgcgatactaaaaatactaagatgtgattctaatagccaaacaccacgttccaatgttgccaagcacaaaacatgcaaaattatgaaattctatataacatataacatgcattctgaatttaaataaatctccgtaaactgataattcataactaacatgcaagtttcatatttaaaccctatttatctgctaatttccaaattaaagttaagcgatctttacaggaaacgaggtaagattcgtataatgatatgtatatgtgattacatgtttaacgtgcatgtttattaagcttgttagattacattgatagcagtatcaatatgcgtagagttttattggataccgacaaatgtatgtttggctcaagtactatttgaccctatcacgttgatatggctagagtaccgagtataagctgatattatggtcaatagtactgttgtaggaacgttctagactcagtattgcctagggcacatggatagggttacaattgggtgta

SEQ ID NO: 213345 - DNA, 793 bp, Cannabis indica
atataattaaatttaaatttaaattaacacctataataatttattttatcttttatagtacatataatattaataatccatatttaatgataatttattgtggtatgatatgtttttcatcgattgattcggataagtatgatatatttatttatttatttttaatttcaaattgaaaatttaaatgagaagaagaaaaaaattgaactctcttgtacaagccaagtgggaattgagaaaaaatatactatacctatattatacaattatattagcccaccaaaaaaataattaaaatatttttctaaaattcaacaaaattaattaaagacatgtttttaaatacattttttatatatatatattcataattattttaaaatttataaaattacactaatttaaatttaatttgatttttttattaaaaaaaacctctccatatttttattgtttgactctaaacatgagaagaagaaaaaaaaatgaaattcaaataaaatattatgtttgtaataatatatgtacatttaatatgaacggtttgaaaaataagccacaaaaatcagtgcatgacagccatttgatgaggttacttattattttatttttaaattttttaggtaaaaagcaatgcataattaaaatatttattttataaaaatatttattgtcgtcataacatgtaataagtaaatctaaaaataaaataaaataattaaattaacaatgcttaaattgattaggatttgaaacatttagtttacacatttttttttttctttctattata

SEQ ID NO: 213346 - DNA, 512 bp, Cannabis indica
taattagtaattaatatttttttcttcttttataaatatattgattaattattggcctaagtcaccataacaaaatcggctagtttgcaaagaattgtcctcaattttttttttatttatatatacttcatatttttatgttatatgtttttgttaatttcatgtatttttattgaataccataaaaaaaaaaatgaaaatttaaaaactttgaacgtaaaaagtttaaattttttaactaaaaatagccagtataattttccctattatttaatctaaagattatattacaatattaaagttccaaaggaaaactaaaaaaaaaaaacaaaattagcagaatatattcccaaagaatatacgtgatctcccaaactacctaatttggatgtttacgtacgtgtcatgcatattcatgcagatgtcaattgtcattattaaggtcaaatcttaattaattcccaacaacgtaatttggatgttacgtaagtgtgcatgcatgcatgcatcca

SEQ ID NO: 213347 - DNA, 1845 bp, Cannabis indica
cttaaaaaaataagatgtacacaagagatttttacaatagattgatttttaaattaaatacattataagtagttacataaaacaactaactaaaaattgatattagaaaactagttataaaagactagaaggtgtacaataagaaaggtgatgagattaattagtatatattacttgtccttattaattagttttaacatttaattattattaattttattttttttttaatttttatcactttcttatttagagttctttaaaattatacattatcttaaaattttttgggttaagtctataatataagagatattaatcaattttctctgttttcatttgttcggttggtttgtattaatctgcattattattattattattattattattattattattattattattattatttgagaaatttcactgttattatagattgaaatcatttacaacaatagagaaaataggataggaaatttctcctatccaacttatgtcatcatccaaccctaaagcaaatttagctaaaccatgtgctgcttgattagcagttcgattcacatggcttactaaaacttgagggaaaaaggataaaagataacgtacatccataataagattcgaaaaacatgataaatctgtggttaagacatttaaagcagatgaaattcaagaagcatcggtttctatatgaatgagaggtagttgagattgcatcacccaattaacagcatgaaaaagcagccaccaccaaaccattatgatccttaagaatcaccccaatacccattttcttttgctccaaatcagtagcagcatccacgttgagtttgtaaccatgaccctgcggtggcaaccaggtttggacatgcttctctaccatggaagctggtcttgctgcattgtgatcgttagcagtagctactgttctgacaggagcctgatgccgagtaaagtcttcatagaaacgagtagcatactggacaattgctgatggcattcttggatccccaccgtggacaactttgttcttgtctgtccaaatcccccacaacacacataacaaagtttggaaatctgtctgctgatatgtagaagataaatggtgcaaataatcaccattgaacatgctattagcttgtctataatcaatcttgaactttgtatgtttccaaatatctttagcatgtttgcaaccaaagagagcatgaccaattgactcccaattcgacttaccaagagcacattccccagaatctaaaaccttccttttaaacaatgtagccgctgttggtaaaatgttctgaaacactttccaagcaaagattctgatcttagggggcaattttaagttccaaaagtatttccaccaatcactatgctgattagatgttgaggatgcatgttgttcttccaaagatgtagctaaatggaacccagatttgacattataaatgtcatttgttgagtgatgccagattaggcggtcattatcagcaaagaaactcagcggaatagacaaaattcgatcaatgtcaattggctggaagtagctattcaaaagagagacattccaaacacgctcatcagtaataaagctagaaactggcatcgggatagtgcttgaaaagctgactggtttaaagtcagtatagcttggtatccaagggtctgttccactatccacacttctaccattgccaattttaaaccgtagccctttgagaagcaattccttacccacaatacttgccaagtcaaagaggtgaatgaccaatgttgcatccagaaacgaacaattggaaaagtatctatgcttgaggagacgacttagtagag

SEQ ID NO: 213348 - DNA, 518 bp, Cannabis indica
aattatttaaatattaaaaataggaataagtgcatcatcgtacttatttttggagtacattataaaagcatccaatcccaatcatatttaacgtcaattatgtcttgtaacattgatttttttttatcaaatattgaatcttcttttcaaaataaataaataatgagatacaccgttgacatacaagtaaaaattaaatttacttagtactgtatatctctagttgcacatcattcttgtatttcaaaattaataatcatccttatagttattctacttgaaaatagagaaacaaaaatcaaaattatctaaaactggaggattattaagtcaaagctccactacttcattaagatttgttgagttgaacattttgttagtttctttattaacttaaacgcaaatgattaaaatggttaaacttacaatatttgctgcattaaacaaaaaaataatatatttgttgcatgcatataaacatttttcatgtacgtgaagaaagattttccagttggaga

SEQ ID NO: 213349 - DNA, 1200 bp, Cannabis indica
gccacccctggtcggccctatcaccggctagcctttggacagcaccatggccggcaaacttgctccctataagtgtttggctggctagggaaaggcctgtacggttttcagtgcgattctacatgtggactgcgtgatttgggctacaaattgggccctaaaagcccaatggaatagctgaataatatctatgttcaagggcattttggtcttttgttattaactaattaaatatactaacatctagggtttcaagttgtaaattagggtttaggcttcctatataaaggcctaaaatctaacctagaaaacctaagtgagaactaagccactaagtcaataagcctgatactagcctccgagctctaagcctaagtctgataactctgttcctcacactctctcacatgcacatacaagctatctctacacttgagatttgtcaatctcaatttctacattgtatccttaagggtgctatatcatcttccacttatagcgatctggatggtagtaaccctcagtatgaatataactaataggggagtaggtcattaccaactatctaaggggcccgaacctctataacaattctgtgtgtgctttactttcttgttccaattgtttaacatgtggcaaatatcaaatttatacgaccctactgtcagttgatcaatttttgaggtcaacaatatgtaataaacatctttcattaacgtgtcctttaccatgaaagagtttatcatatcacaatgatgatcattagtgttcattaagctctttgattcacttgttaaagtttctcagagaagatgattcttacaacttctattttgggagcttaataacatgagtggttgggagcatgttatacactagtggaatccaagctttcctaacggatcgaatattagtaccttatagtgattaattctttgaatgctaacagttgatttaaatctaaaataagttatagattaactgtttacattgaattaatggtacataaggaataaagagataataagaagggtaaaatagtattttgaacaactctagttatgaactaataattgaagggcggactgcttatattgattatatcaatggactacaagtaacaattctgtaaacataattctatattatcaaagagcgcgattccataattatacttgagtaataatagaattattaaac

SEQ ID NO: 213350 - DNA, 718 bp, Cannabis indica
tttcccccaaatgagtcacaacaatctcaattcacaccagcacaatgccaacaactcatttccttactgagtcaatagctgcagcctactactgatgcttcaacatcagatgcacctgcaattaataattttttttggtaatttcactcatttctcccaatatttggataattgataattgtgccacacactatgtttgctgttatgctacatgtttttcatctttcacagcaacacttgaaaacaaatcagccactctccctaatggagcaaatattaatattgctcaaattggcactgtcatacttaatcataatatcatactttacaatgttctttttattccgcaatttaaattcaatttaatttctaccagtgccctcttagccaattcttcacatatagtttcttttacttctaccacttgttccatttaggaccactcttagaccttgaagattgggacaactaggagatttggatatcttttattacattcaacaagaacaacttttgaattcagtttcttgtaatgtcaatgtaatcaaacaccaatggcatacacgccttggtcatccctctgtactcattacaaacaaattaaataaacaactgaatttccctgttgctaacaaaatttctcataattgtccaacctatcatctgtcaaagcaaaagaaattacctttcatatctaacaatgatttctctaaagcaa

SEQ ID NO: 213351 - DNA, 538 bp, Cannabis indica
ttttttaataattttttcactaattggtatagtgtgaatttttcacctagaaactcgagaccaggctcccataaaaatgacacgtggactcactttcctcgaggagtgatgagctgtcaaaaggagaccacttgagtaaaaatctcgcctgaaccagacttagcgagatgatgtgacactgacagagtctagacgcattattacacctgcatgatgcaagaccgaacaccgggtttaagactcgtataaaccaagatatatgcgatgtccataaaggttttcatgggagttagtaaagattaattctttacttagtgagctggttcggatgacctaacacactcgataacccgataaggcctcacatgtcctaagttatagattttttacaagacatccgtatacgcaactcaaataggacgtagatatcttaaacacacgagactcaattagtcttgtacgcatcttaagcctgcaagcttatgtgagaatatgaactgacaactcgcaccaccaaggttgcatacattgttgtagt

SEQ ID NO: 213352 - DNA, 500 bp, Cannabis indica
cgcactgcgctgtttaggaaaaactcaaactgcgatcgcactgcatagaatttcaaactgtatttttttgcggtgcagaagatttaagatatttgagtggtttgatgagcaaccctactatataatcaaaaccagtttcctgatgaagaaactaatttcttagtgaaaaaaattagtttcttagtagaaaaatcaatttcttgataaaagatctttagtgagcaatttatataaaaattaaatatgcattttaaaaattaaatttaagtatgacataacaaatattataaaataggggaaaacaaactcaaaaacgggtgtagggacgactgacaaaagaaaagatacacataattgttttccaaatccacggttgaactcttgaatcttcttcttgaagcttaatcttcttcttgaagcttccatccaggtgtgtctctggtacgtgatcgagcatctccgtttcgtctcccccctctcaaatcccacttttcaatctc

SEQ ID NO: 213353 - DNA, 675 bp, Cannabis indica
ttaaaaaaataattgctaaaaaatctttacatattaacaaattgcataacattaattaataattattagtaatttaattttaaatataattaattttaattaagtttttaaaaggaaataaagtatcaagctacaagttatttataatttacttttctcttaatttctaaatttatcacaactattcaacaatgatctaatggttaaaaataaatgtaaccatgatgtttacatatttgatataaccattaaaacttcctgcaatttcaatttatattctatttattttacactaattaaagtagagaataatgctcatgaatatgtattgtttatcaaaaaaaaatatatatgtacatatattatgctatgtgggtatatatatatacaaatataatataataaaatttactgaaatagtgattaaactaaaagaatttctttagttttatctatgtagattggattgattacaaattaaaattttatttttagggattttaagggggtacatttgcagatttaaggaaaagagagaaatagatttatgggaaaaaaaaaatctgaaaaagaaatagtgaggttaaaaaaagaaaaaatagtggttgagcttatttttggagttggttgagatgaagaaatgaagtagagatgaagagaacaaagaaaaaaaaa

SEQ ID NO: 213354 - DNA, 593 bp, Cannabis indica
ttatttgccgatgtgggacatttcacagtgaggtccattcgattaagcacttgttttataacttacccagctataattttagcctatgctggacaatctgcttttcttcgaaagaatccagatcttgtttcagatatctttttcaagtcaatcccaggttttttttctttcttaattttaatactgaacaattaataattaaaattgtgttgtacatatataatattctaattttattaataatgatatgtttttttaggtcctatgtactggccaatgtttgtaacagctatattagcagcaatcatagctagtcaatcattgatttctggaacattttctatagtacaacaatcactttctatgggatgttttccacgtgtgaagattgttcatacttcagctactcataaaggacaagtttatattccagaagttaattatcttctcatgctggcttgtgttgctgttactttaggcttcaaaactggtgtacaactcggcaatgcatacggtactacttataaatgctctattattaatgcacaatatatatatattttctattagtactctaaaatatatttgaacat

SEQ ID NO: 213355 - DNA, 573 bp, Cannabis indica
tcctctttgaactctaactggggcgtaattatctacattaataggctacccatagggaggaaatactgtacctctctattctctcctctggttcagtgtgttcttgagatcgactggttgagttccaattctctcaaagactgactagcatagaggtcttcttgtagcatcaacattggttagtggaatttctttatgagcatgttgatctcatcgtctctaagcacaagttgcactatctaccccaacctcattattacttgagaattattgactacgagcagttgtagtctgaccttattgtgcggcagtgtacaggacatattggaagtattgaatctgctcgtcctggtcataaatggctatagggtcttgaaatgctacatcaggctggttgggcatttcgatgtggagacaaaagttctgactacgtactttgcccaaggtgttgccctagaaatacctgaccgtctactgtggggcccacattagtttatggcctaggatttgacagtccgagttgtaaagagtcctagacgtaagtcattggaggaacttctgacccaggctggt

SEQ ID NO: 213356 - DNA, 654 bp, Cannabis indica
aatggttaagaacgttctcaacaaaagtacgacctttataccacatccactaccgactccatactagtgttggtagggccatattatacttttaggagttactgggtgttgtaccacatgcacttcgtacccacttgtactcgtgttggtaaaaccataactacccttaaaataccctctactgtactaacacacttagtcctacaactatttcagtgttagtagtgtaaataataataacatgcattcattcacatacatatatactttatgctaatcttaccttatttttgagttcaaatgtgccggtcaacctgcgtggaacagcagcttgacgctttacaggtcccaatatcacaaaatttgtaaacctaatgatgagagacacgctaacacgcttttcggggacttaaaatcaaaactagagattttcctatcgatgaatagcatggtaataccctaaatatcacaaaaacaggaaaaactagggttcacaaactgccccaaccggcagatcagttccccaactgaatttcagttctgtggggtttcttggggaccaaccgaaatttttgttctaacaggtcccatgaatcggtcgaccggtttagtgcaggaaatcccaaaaatgcttccaacacctcaaatcaaccc

SEQ ID NO: 213357 - DNA, 574 bp, Cannabis indica
gtttagtaaataatatattacaaagtacaaatatttattaacaaaatatcgacttaacctaatcgtagagtgtgacatatggaagatgctggcaaggtcgacctaagttgtttgggagccttagacgtaaaaattaaatgtaggtattttaattaaaaaaattaccgatcaactcatatatttagtttttttttttttaaaaaaaataattcataaattttaaaatagtcaagaattttagaataatatgtattgggacctataaggttttattagttttttttaagtgcatatttttttgagaattgctaaaaattttttcgtgttaaactgctattggtgtaattaagttgcgggtcctatataatttaagaaaattacttttagggaatatcgctaaccaatcgtaagatgacacttataaaaactgctgcacataatagcaatgttctattttttttataatcatttattatgtatattatattaaaaaatatttattatattatatataaggatgatagaaaaatgtcttgttgtgtaatggttcaaactatttaatttttaaagagct

SEQ ID NO: 213358 - DNA, 579 bp, Cannabis indica
tttgcaacaagacgagacttgtacctgttaagtgaaccgtctttgtttagtttaacacgatgaacccatttgcatcctataacatgcatgtgaggttcaggtggaacaagaacccaagtatgtgcctgatgaagagccccaatttcagttgtcatggccttgttccattttggatcagcaagggcagccttgagagacttaggctcagttggtaacaaagactcaggcagggggtgttttgttgccatgaatgactttggtttctgatgcccgactgagatctggtgcgcatatggtgagtcctgtgagtagtatctgtggatactaattctgagttgacaggagcagatgggagagaatcgggtatgggctgaggattaggcatttggctggtgtttaagagctgtgactgagaatttgggagatcaggatgtggtaaattggtaggttcagagatgggaaaggttgagattgctggtgcagagggaatagtttgtggctacgaatgggattttcagtgggtgtaatggttgggacaggtgaggatgtggcatgatttggattgttggttggggagac

SEQ ID NO: 213359 - DNA, 736 bp, Cannabis indica
ctaagagttatttttccaaatattgctattaatgttcaattggtagttattgaatggtaacaataaaacatacaaaaaaaaataaaaatgctcatttacaaatccgtagttgcattacagttgaataatagttgagcaacaaaaataacactgtgtaataaatacaggattcagaattggcaatacatgacttgaacagagaaaagtcgattgtagtaagtttcatttctattgcataaggatttttattattttgtttttgttttttatgataaatggctcgcaacatatataacagttacattacaactttattagagcttttaataagatgacttacaagaattatacttttgtagtctcaggaaaagatgaaattccattcctcgtatttgcaatggacaatttgatgatagaataaattatgtaaattacaaaactattgggaaatttatctcaattaattgcaaatatggtgaactaataaacaaactaaaagacgtgctagaatgcaaccatgaaaatactgaactgcaactaaaataccaagtgaaagaaggacaccaactattgaagataaaggacgatcaaagcctatacttttacatacaactaaaattgaaggaacttgaacatatccattgtgtatgaacgtggtcatcaacataaaaacaaccaacaatacatcattcttggaaatgagaaactcatttgttgcacaaacaaatgcaatagc

SEQ ID NO: 213360 - DNA, 1007 bp, Cannabis indica
ttgactcagtttgattaatagaccaatatcttttcttagataaaaaagaataagcaaattaatttaaaaataattatggttagagcaaaaaatatgttagaatgtgtcataaaaacaatattatgttcataagaatattttagcgggtgaaatttatggcatttagctaaactaaaatttgtgcataaataagaaaaagtgcataaataggagttgtatcgatattatcattaaagagggccttaaaagtacacttaattttgtatatgaaaagaagttgcgtaagataaaattgctcttaataatgtaaaagtgttgtaagtttctattttgaaggagaatcctcttgtagatgtaattgatccagtttgattaatagacaatatctttcttgataaaaaagaataataaagtaaattaatttaaaaataattatggtagaactgtacatgtaaataaattggtggtgaaaatattgaagtaattaattttgttatagctagctattagtatagaaaaattgatagtaaattaaaataatttttggaaaataaatatttatataaaaacaattcaaattaacttttttttaaaaaaaataataataattcaaattaaaaattaatatttcttttaattattaacattatttaatttttttaaataaaatatataattatatactattataatatgtataaaattttaattatatacaagcagtcctatcataaaagtatacaccttatatcataaaaatcacatgatctaaaattaatggtcaaaaaagcttccctaccgataataaatttatgctaagtcctaccaaatagtcttgcccgatatttatagagaaatgctaaaaggtattactagtgcctaataccctactcggcatcataccgctattggtgtaattaagtattgagtctcatataacttaagaaaataattttaaaataataccactaactaatcgtaaaataccacttatgtaaaatgtgcta

SEQ ID NO: 213361 - DNA, 767 bp, Cannabis indica
atctctcggtcagctctcgcaataactcagactgtttttattttttattctagatctactaactatgttttgtaatgactgcatgttggattatgaattaataaaggcaattagcattaattattgatattttataattatatatgattttttatttattgtggaccccactttttagaaatggcattagagttataatttctcaattttggaaattttattaaactataagagtattatttatgctaaatatgaattatgtaatttttatgatttttcgctcagcgacaacgaaaaatatctgatcttataaataaataatatataaatattaaagaaattaacaaaattttaatatctaaccataaataaaaaataaaataatcaatttttaaatttaaacctccaaatatcaaaaattaataataatatattaaaattaatattattaattttgaaaatttgatatttaagtttaaatatattaaaaataatattctattttgaaattagggtttgaaaatcggaaaaatctgaaattgggtgaaaaatcctcaaaaaattggatttgggtgctttgcacccttgcagggcacacacaggctgcgtgcacccttctcagcgcgcgtaggaggctgcattacagccttcgtgtgcgtgctgggtgctagctcgggtgggcgttcagacaacatggcaggctttagacatgcaccgacaaacaccttgtccgaatgcctgcgtgcgcctgtgtgcgtgtggtgtcg

SEQ ID NO: 213362 - DNA, 721 bp, Cannabis indica
tcagtcttttttagaaaattttatatagtaataaatgtaaaaaaaatatgacaatacacatgtaaaaggaataattacataaagcaccatttttttgtaaaatatttacatttttacgttcaaagaatgtttttttttaatatttttacggttttctaaaaaataacacgtaaacaacataaaagtaacataaaaataacaacaacaaaaaaaaaaaataacatacagataacaaaaaattaacaacaaatgaacaaaatttcaacataaaaagaccgtattttatgtaaataaaatcaaaaaaatcgtaaaaatgtttaaaattccgtaaaaccgtatttttgttattttttttgcatttgtgaaattatcccaatgtaaaaatgataaaaggaaaattgaatatttttggaagatccccttataaaaaaaatattcatattatgcatagagtttttataaaaataatagatttagaacaaaagtttacaattttactgttacaatgattttttttacaaaaatactatctttttataaaacaacaaaataaaataattaaaataatagtggaataattaaaaataaccgtaaaataacagtagaaattttacataatacagtacatagtaaaaaacttacacaatattattaaaaaaaattcggcttcacagtagtacgtaaaaaaaattacaaaatttctagggaaacttacaaaaat

SEQ ID NO: 213363 - DNA, 534 bp, Cannabis indica
atttgaatatgtatattttttaattggaatatattttttttttattagagacataattaacattagaattagaaaaatgagtaaataatcaagaggaattactctatacacttttttttttaactttatttttttttaaatttacggtttgggtttctaaagtggttgcggcgttaattgcaataagggtttctatacaattttttgttgcaattcaggttgcagcgctagttgtaataggcgtttctatgtagaattctgtaaaaatacaaaaaaaaaaaatgttttgaattataaaataaaaaagccccaataatcaacgtctgattcacaaattatttcacaaaaaaaaaaaaattaaaaaattaacaatatcacaattaaccttaagaatacttatatttaatttaatactacttagaagacacaacagtagaaattgttgcagtaagttcattcaacctcataacttgagcactcaattattgtgcaagatacgtaactgaactactaacaactctttcagttgcaaaa

SEQ ID NO: 213364 - DNA, 1031 bp, Cannabis indica
aggagatgtgtaatgccattctttctgtccctgttgatcctcataatcatgatactctcatctagagtcatcaccattcgggttgtttcactgttaactctgcttatcatttggcaaattaaaccttctcagctcccggtccttccaatcttgctacctataaacgttggtggacctcggtttggtcctctaatatccctcctaaaattaaacacttttttttggaaaacgttcaaccacattcttccctccaatcttaatctctttcatcgtaagtctatttcctccccttattgctccatttgccactctcatcatgactccaacactcactcccttattcaatgttccaaggcaggtaaagtttggaaaaactcatcttttcatcagttttattttaataatagaaattgtgatattaagaaattcttgctcagaggttttgaatgccttgacaaagatcaattttcttcttttttgggtttaatttgggccatttggaataacagaaacagagccatattccattctaacagtaccactgatttcagtttggagaattctgtcagttgttatttgcaggattacagggatgctcagaaccgcatatccatatcgtctcccacttcccatcagtcttccacaagaatacaagtcccaagaataatgtttcagctttctgtggatgcagctctttctcactctcccaacaagcatgggtacggtgctgctgtaactgattgccatggtaaagtcattgccacctttatggctccttcacattcaggcctccctccaatttatgctgaagttgaagctctcaaccgagcgttactttggtgtcaagcagtccgttttcctattgctgttattgccttcgactgccagaatttggtgcatcgtattcagaagttctctccagatcgttcagccctctcgggtcttgttgccatgatagtctcctctttgtcatcttttccaggtgcttccgtccattacatatctcggtctacaaacaccacagctcacgg

SEQ ID NO: 213365 - DNA, 741 bp, Cannabis indica
attaattttttatataaaaaattgtataataaacttttcaacaatattaattttattttttcaaataaaaaataataaaaatttagtaatataattactcaatattactataaaatatatagaaaaatatacaaaaatttaaaattttaaaaatttaattaattttatgattaattatcactaaacaaaatataaccgcatccgaatcgcggtttatttcttagtcctagaataatttataacaattattttaagggaagaaaaattaatgagaaaatgttggattatcctcttcttaagatgagagattttttgttttcttctttttttttttcttagaaaatgcaaagtacgaaactataattcactattcaagtgtttttcttttttttcctcatgttatttaggtataaaaattaagatcttagggcttctccaatcagatactaaaatcttaaaaatagtagaatttagatataaaattactccaatggaactctaaatgacatcctatatacgtgggacggtgggagtctatagtgtcacactaaaaatagtaaaacaatagactacactaacttttttttcttagtttttaatattaaaataatgtgtttatgattaaatttttatatttatataaatattataatgtaagatagtttaataaaataatataataataaaaaaaattagtgtaaattttaatattgtgattggaatagaaaaaaaattaatact

SEQ ID NO: 213366 - DNA, 421 bp, Cannabis indica
ataactttcaaataaaaaaaaatgacgaaactaatataaatgtaccataatttttaagtaatttgcttctaattctgaaaaaatagggaaattactccatatactatttttttaaactttttttttttttcaaatttacgatttgggtttctaaagttgttgcagcgctagttgcaatagaagtttctatacgattttttgttacaatttaggttgcagtgttagttgcaatagaagtttctatgtagaatttcgtaaaaatgcaaaaaaaaaaaaaaaattgttttaaagtacaaaaatgaaaaagcccttaaaaaaatataaaagtggcaaaagacaatataaataataaataatctaaataaattattttactagaagttttaaaataagaacatttactaacatactcctataattt

SEQ ID NO: 213367 - DNA, 727 bp, Cannabis indica
cctcagtgtcacagacagagcactagacagatttatatttgtttttttagtttttataataagtaacaaaaaaaaaaagtgtagcctaatttatttgtttcaagatttttatgcgtgaggagggttagtaagcttttgcgtgtcttttttccttttgttttgtttgcttttgttagtttgtctcccgttgttgtttgtttgtagttctgtcttaatgcttattgtctttacgtctcaatgaacctcttattttttcccattttgataaccaacgcaaatttatgtgatatttaaattatatgatccaacttctaaatatagataaaaatagataagagagagttttttttttgtttttatatatatattctttataaagtgattatgtaatagaatttttgatttaagttaattttaacaaaatatcttaattatttaactttacttaaagtgaatattctttattaattttataatattattctatatatttaaaaataaaaattatgcagatatttatattaaaaaaattaatttaattatatatatttagtgctgcaacctaatatatatataattataaaattttctttataacagtggtaattataaaagacatttcataatacttgaatgtgtcaaaataagaaagaaggacaatggattgaacataatattttgttgataagattatttgtaatactctgtaatttttttttttttaatt

SEQ ID NO: 213368 - DNA, 612 bp, Cannabis indica
attttaatttttagtaagagtttataacttatacgaattaagataacaatagtgaaaataagataaattttctaaataattcatattttagtcaactaataaaaattacaattaatatttatttttggtgtcatgtgtttttaatcgaagttatataatggcattgataattttctttttagtagttgaactattatcttttattattattattgtttttaaatgaagatacaagtatttatatttagaatttggagataagatgaatgaagttccatttcaaaattaattgacaatggaaggagtaacccattcattctatatatgacaatttatttctacacatgaacaatgtgagactaactctaatactagtagccctatattcacttaaagttcaactgataaaagtgttagctttcactctatccaataattgatcacaagttataatttaatatatgtaaactattacaagtattagatttaaattcaagtaacttaacggccacgattgggaagctcacttaaatctgcatccctgcagtgcgcaggaatgttaatagggcgggtcgaatctgatctagcacgccccgccccgctagatcagat

SEQ ID NO: 213369 - DNA, 569 bp, Cannabis indica
cgtcgcgttccaatgcaactgagaacaattacaaaaaacaagaaatttcatacataacataattaacacattctgaatccaaataaatctccataaatgcataaattatacttaataacttaattccataattaaaccctaactatctaataatttactacattaaaaatttagcgatctttacatgatcattctggttcaggaagggtggcatggcacaaagtttgttcctttaaaaaggaaggggatctaggtttctaagatgtttataaaaggaatattgcagccattggaaagtatatatgggcgatttccataaagcaagactactgattgtggatcaaatgggttcgtgatgtttacataaaaagtcaagattggtgggcctataacgctccaagtgcagctagccgatattggaagtaggtagtagctgtcaaaaaaagatttaaggaagctattaatactcaagaattcattaatactggttataacattgctagaggttacaaattgcttaagccttctcaacaggttgttaaattggtagagagaagtgtggggaaggt

SEQ ID NO: 213370 - DNA, 646 bp, Cannabis indica
cttcttttttttttctctcaaatatgtcattcctcagtaaaattcattattgactagaaaaaatagccaactgactcgaagtctaataaatgatggttaatcactaataaagaaggttaaaataataaataaataaacaaagaacacacataatttatagaggtttcggtccccttgtatatggataatgatctcccctttagttgtattacttgcgcgttaataccgggtagattactaaagaagacaaaatgatttctagtttcaactctcaaagtatttacaaatatctttcaacaaagtgctcttagatgcataagtacgagtatagctcttatcttttaggcccctccccttgtgaatgtcgtcactatttataggggagagttgttacttatggctccgtaaaaggggtaaacatatgataaaatatccctattttttaggatgtagttataatctattaaatgccctttattctcggatagatttgttggatttgagtttgtaggattcagttgttgatatttgaggaagcttgttgaggatgaaataaaggatcgcgtatctttgtccggtatccctgacagtgctagatctggtcggcatgttggccatccggtcaaatctctcgacacttgtctcc

SEQ ID NO: 213371 - DNA, 767 bp, Cannabis indica
tttattccaaagctttttcttggctgatcctcatttctgtttatcattgggatatttataggcttataatggtagtaaaaggccaccattgttgtgtttgtttacaccatacttagcacaatttccaagatctgatttagggcataattacttatcttgtgaagggtttttaggctgtccataggtgtttggtgggatgtgatttatcccttatttatgacttgatggctcatttatgcggttgtcacttgatgtacgggggctcgtgaaattagggaacaactgggcttaaaccctcgaacatgcctggaagagtaaggcattctaatgctctctcccatactgcattatatgtagacacaatatcttggtctttgggtgacacgtcatctttcattactcctctcgtactatccgccgaatacactttacttgcaaagaggaacaaatggggaatgctcgctgataactttatggtatagagttatttttattggctttaaacttaaattgtcatgaaaagagtaatgaaagtgtgtttgtttgttaagtttgattagtttttgcttaattttctatttagaatgatagcttttgagtcttgtgaattgttagtgttagctgtacttatttaactaaatcttgtttgtttgttgtttagtaaagaaaagttaaagtcccacaggaaaggaaatgatgtgaggccaaaatggatattgaagctgaaatctggaaagaaatactgtcataatgctatagcattctgg

SEQ ID NO: 213372 - DNA, 745 bp, Cannabis indica
agttaaaacagtattagtctcgagaagccaaacggacaagcaactgctcgctatcaaagttaacttggctccattctcagtgaggcatccctatgagataaggcttaccatatatttttaatagcgcgttcatcttggcccaataaaagcgggatattcacaactgtgtaaaagcctcatttatttagcttgatttgtaatcaaatcccctgattagagggaataatcgatgtaacgattattgccaacttttgtaaattactgtccactatgtaattataaatagtggctgacaagatcaagaaacgggacgaaaaacaactcatatgaaagaggccctaaaaagaaaaatccttagaaatcggaataagatttatacgtcgactatacagaattttaattgcaaaaccacgtaaaaaagcctgtgttcatatattatttttctatagcttttattctttccatgtgaaattattactgtgaggctcaaattttattaacgaaaacatgggttaacattttggtgctttcattgagagcctctgtgaagaagcttagaaaaagcctcctgacataaaagtgatggatgacaccaaagataataatcctcaagacggaatcaatcatcgtccctgaaaagaaacattatgtccttagggatctatggagtcatcgcatgaactgaatgcaagcccctggaagacccagtattgggacacctggcttgacgggccttggatgagca

SEQ ID NO: 213373 - DNA, 525 bp, Cannabis indica
tctctctttctactgtaatattcatctaaatttagaacatcatatcatttatttataagctccacttaacaatgagattggaaccgtgagtcttattacctgtacattctattttgctgctgatactttctattatgctttccacactaatgtcagagaaaaggaaaagcaggaagctgctaatagaattagaagagtccaaacttctatttgctatctcttaaacttacaaattcttattgttcggggtgaaaaatttgcagatgaatacttgccaaaattgaaaagaaaatattctctggtcgcccgtggatccctcccaagattagctagtacttcctctaccttcctttctaaagatctctgtttggattgacgggagacttggagggttttcttgtagaaaactctctgatgcttaagtcagaagagattcatagcttagactgaaaaagcacaagaaaactagaatttgaatttagtgagagaatccaatttcaaataactaaccctttccttacagtt

SEQ ID NO: 213374 - DNA, 680 bp, Cannabis indica
actaatattcatcaattcaatctaaaatcacatgcttttgcatttacacaacatcataaacacacagtcctggtactttataaagtaccccttaccacacgttagccacaagctgaatatgttactatcgttgcccgatgaagcaaacgataagtaagaaacctatccgcagtttcaggagtaattactcataatgataataactgcttcaaaccctcggtcacaaccgagactcaacaaacatttaattagaatcttgataataatcaaggctataatcattcaaccgctaacatttggccacatacgctgcttaccacttttcttacctcaattcaaaactcaagtgtgcgggctgacctgtgtggaaagatgcttgataatctcgggtcctatgtcacgacaaaagtaaatcaataatgatctagtccaaaacactacctagaacccacataaaataaccaagagttttcaaccgaatcttatggtgaaaacaccctaaaatcaaatacatttttttggctctaatctatgtcacacactatagagcttttcataagcttcgtaattgtatatagaatgtctaaaacggacgcccgagtgaaaagttatggctaaaatacgaaaaatcgaggattcctgaaaattaaccatccagaattccggttggtgcagccttg

SEQ ID NO: 213375 - DNA, 1071 bp, Cannabis indica
acaaagtacagtcctgtagatataaagagagaaatgaaagacaattacaaaataaagatgaattacatgaaggcatggtgtagtaaagaacgagcacaaagtcatctaaatggaaatgctaaagaatcatacaatctcttgccaaagatacctgtacatcctacaaaaaacaaacctaggtaccataaaattaatttttgaaatatttttataaactataaaatttctttttgggttcgtaaatggttgactaacagttgctaaatattactgtttctgaaaaataactgattaaattacaggaacaataattgacatagagaagcaagaaaatgatagtttctaatatgcatttgttgtattgaatgctcctattagaggttggttaaactgcaagccaatcatggttgttgacgacatattcctaaagagtgtgtgtagaggcacattgctcactactaacacataagatgcagaatcaaaaatatttccacttgcatactgtattattgattttgagaatgacaaagcctgggagtggttcttcataaaaatcaaagaggcatttgaggttcgagaagatcaatgcctaatctctgaccgacatgaaagcatcatcaaggcaataagaaaagtgtttgcagaaataacacatggctactgcatctttcacctcttatcaaacctgaaaacaaaattcaagaaaaatgcaaagcattccagaggtccattctttgcaggagcaaaagcttacacagaaataaagtttgaatttcatatgagggagctagacaacttggaagagcgcataagatcttatctagaaaaaattgggcacgagaaatagtcaagatatcattcaaaaattaagaggtaaaacaataaaatgaaaataataaaaactatataataataaaataactgctattgaaaatattatttctgtgttactttagagttttatatcagttgtataaaaaagggttgccgatagaaaactatataaactacaggtactatactatgacttctaatgtagctgaagcacttaactcagcaaatgtagcagcc

SEQ ID NO: 213376 - DNA, 782 bp, Cannabis indica
tcctataaatattgcccacgataaattatacttaattttaactaggtaaataccattttagaccttgtgttttgcaaaagtgactaattaaatcttctgttttgttaaatgataaaatggaccacgtattttctaaaattgtacaaataggatcctaaactgattttttgtcaaaataaaacttaataataaatcgatctggagatgttatgacaaaactagttacatttgctgtatctgttcgtgttagaaatgatcttaaagttagttatattaaaaaaataaaattattgaaaattgagctcagggtcttatttttaccatttttgaaaatatagggtccattttgttatttaacaaaacatagaatctaattattaatttttgcaaaacacagggtccaaaataatatttaaccttttaactagaaatgattaaaatgagtgttgctattagacataaattgtaataaactatgaactcgtaccttctaaataatttgtgattttttttttggtaaatcagaagattcattcaaaatacaaaacattacatcctagcagcacctttttaaaagacataagtgttctctttttctatacaatctatgatttttttttttaaaaagtcacaacactactacaatctaagcctttagtcttccctttttccaatctaatttataaaaaggaaagctaaagggggagaaaataatctgcattgacatttagtaggcggtttttggtaaaaaccgtaaggtatagagtgtatatatatctatg

SEQ ID NO: 213377 - DNA, 769 bp, Cannabis indica
attaatatatcataatttcgcctatatataaatatgctatttagaatttttgcctacaactatattatgtaatcccttacaaatggtccatgaactattcatagtattataaattagttattttgtcaaattttgtcacacatgacaaataaaatgataagatgactgcttagtcaattaccgtatcagcgtcacaagtatgatttaatattaaatgaattaaactaaaagtcaattaatgattaagaaaataatgaaaaaatatatatatggcgttaatattgtattgacgtgaaaactagctaaacaatatgtcttcaatttatttgtcgcgtgtgataaaatttgatagaatgacaaatttacaatactaaccaattttataagattgaaaaatttagagacacaataatgtagaattcatagttctgaaaagacaataaatagcctatataaatatagaaagaagattgagatatattattcctatgtgtccataccctgaaagcatcttcatcagttttgtcgtcccctatatacattgggaggacattattatcagaggtacctaagtcaagagtgcctagcaaatattgcagggcacgacctttatcccaatcgattctaggacgaatctccatgacctgttcatcaacataagtaaatttatataacaaagaaaagaagaaaaaaaaagttcaaaacaagttgataccatgcaagtatcaaaggacaaggacacaaagtttatgtaagctattaacatacc

SEQ ID NO: 213378 - DNA, 508 bp, Cannabis indica
gcaaagttataataagctattgagtttgcagaaggattacaaaacaaaatttaattaagcttatcctaaataaattaatattttgtaaaaactaaatataattcacgagactttttttttgtttagagtgttgtaataatttgatagaccgtctcttttttaatattatgatattcaaaatgagaacacaattacaatccaactagcataaccataacttcagcgacaaataaagttaaaacactcactgtcgaggtttttgcagacacaacatcttataaagtttaaaaagactgctccgaaacccataaacaacagtcataaaaccgcaactcaacatcaatattaaaaaaccaagtcgcagttcaattctaataatttaggatgatgaaattgatgagagattgtatgtaactatattatatattgttgtaaaattgcaactagatatatattagaaatacttaaaacaatcactactatggtaccctttatgtatatatatata

SEQ ID NO: 213379 - DNA, 577 bp, Cannabis indica
ccgatggtccgatgtgggcagtaggggtcggactgttttgagtccgatggttcgattgtctggcgatttcatggggtccgatggtgccacaaattggtggtgtttgggtccgattgctaccaatcggaccttcacaattggtccgattgctagccatcggaccagtgtaatttttttttaattaattattaattatttaatgatttaggaattatgttatttttaatgatttattaagtatttttttattaattattgttttaataccaattaattattatttatttattagtaattattaattattgttttagtattaattattaagtatcgttttattaattattagttatgtttttttagtaattactttttattgttttagtattaattattaattattgttttaattttttattaattattaattattgttctatttttttttactaataattattttatattaattattagttattattttattaagtattgtttttagtaattgttttactaataatttatttattaataattgttttatattaatatattaagtttttttatttattaa

SEQ ID NO: 213380 - DNA, 733 bp, Cannabis indica
aaattgttttgagtaaatatatggtgttttatgattcaagtttattttagtctaagaaaaaattaaatataatggttatacttttagcagtgaagactttacagataaattataattattacattataatataaattttcatattttattatttacttaatttgatactgatttatctattttcttttttgtagttatgttggtggaacagaaacacatttcgggaatttcttttctaatattaaaattttattgtctagttttttggggcatctttttcttatgtaagtcgcaacattatgttgtggcccatgaatagatttagcatgcccttagaatagatagtaagttttttcggatagaagaaatctcttcactattatcttttggcattttctctatcctaaaacggttatccttataaaaaaaaattatccattttagaagtttatcataactggtatttctaatataataataaaatatgtattttataatttgcactacaattaagatgacaaaaaattaaattatattaatttttttgtttacaatagttatgaaatgaaaattaaacagataaaagtataaatgaaatagtttttttcatagtggtgctcgttatagttacaacatcattgctgttaatttttttttttttttaaaaaaatagaattgtttacaatgtaaaaaatagaattcttgatgttgcagtttaccacacgtgttcaaa

SEQ ID NO: 213381 - DNA, 878 bp, Cannabis indica
atccaaatccctcttctaacttccaatcaagcagaaatagaaggagagaacaaggatttaagtgaagcccttgaagcgttggagaagtttttggttggaaaaaaaatagaataagaagatgagtagtaagatattggaaaatgggatttatataataattattaaatattaaaaaaataataaagaattaaattaaaaaaaaaagtaaagaagatgtcacttttgtcacatcccacggccaatcaacttctctaataaaacaaaaaattttaaattttgatgtaggaaaatcttataaagataccggtaagtaaaaaaaatgaaaaacctttgttccacaaagtttgtacttgccgtataaaaaaaaacatacatagtaaaaaagataaaaatgccgcctgccagtataaatgtaataaattgggaaaagttagtaatctatgtatatttccctttatgtattgggataagttgaagaatacctctttttgtttctattaattaaaaataccctcatattatatattttttaaaatatacccactttttgagtgagttgcccaatataccctcactctctacttaagtctagcatataatttgcattaacctaaggggtttaatgaggatatcatctttaaaagtgggtatatcttacaaaatatgaaaatgaaggtaaaaataaaaacaaataaagtaaagtgggtataccatgtaatttcctcttatgtattttcgtaagtggagattacatatggtattttttttttttttgaaaataggcaattttatgtttgatttttttttttaatatagaaaaaattaaaaaaattacttttaatgtagcataataaataataaaaaaaaaaattgagatt

SEQ ID NO: 213382 - DNA, 612 bp, Cannabis indica
tatatatgatgaaaataaaatagtgtgtatatataaacaccactatatatatatatatatatatttatataaaaggtatatgtatgtatattacgtacttattaattattaaaaaaaacaaattttaactaaatggaggaactcatgtaatgcttgactatatgggcatataataatatatatatatatatatgctaagtattttaaaacaaatttaagaaagtactttacagatgaacatatcaaagaaaaaaatggtgaatataattttgtacaaaatcatatatattatgtaaaagagaggagatcatatatataggatatgtgtgtgattcataatcatgtgccactaatctatattcaaaaccccctacggctgaattcgtttatatatatatatatataaatacatttatttagatgcatataaaaaatgtaagcattcagaccgaatgactctataaaattacgtcgatacttccacatattacgggtaacgtaggagacatctctatttttcccccgggaatcccccaaaactaccactgcttacgctttcaattcgcctctgaccatcaaatgaaatgtgaataacccgtcctcctctcttgt

SEQ ID NO: 213383 - DNA, 574 bp, Cannabis indica
tttcaacttatcccaaaaaaaaattagacccttgctataaagataaatagtattttaaaaattattaaaaaaaaatatgtaatttttttaaaggttttttttttatttgggcccctaaaataagtggccctaagtgcgggcctagcccgccttagtccagggccgaccctgagtagcagtctactttggctcttattaacagactaaagtagatggaagaagtacgaaccaaaacaattatgaagattgaggagtttagctctgattcttttagtctaggggtttgatcgtgcaaaatttctaaatttcaggagtttggccgcaaattacccatttaaaaatttactaaaattgcaaagcgggcccaatttcttgtttacccataaaataaagggctatattcaaaaatatgggaaaaattattaaggttatgataaatatggcataaaaagtttatgacactaaatatggcataaaaagtaaatgacactaaatatggcattatctaacaaatcaaactaaaattatgatttataaaacatttaaaagttatctgaatttaagattcataaaa

SEQ ID NO: 213384 - DNA, 652 bp, Cannabis indica
atatctaccaaattatacctttcgaagattgacatatactaaattatggtccctcaactttcatctatattagacttttttactaaaattagaaaaaaaaatccttaaatcccacaatctcaatagttcaaggaacatttttaacgactttaaaagttcagggggcatgatttggtatatgtcaaagttcaagagacaaaaattataattagccaaataataataataaataaataataaaataacaaatataagtgagtttaaaaatataatctaattttttttacaaactataagcactaaaccatactaggtaaggcctttgatatctatacaaatttacaatgtatgaatccactcttcatttttcttgtttacttttttttggtccatataagttgtttgacatttttctttaggctatgatttttttttcctctttgaacttttgacatgtaccaaatcataatccctgaacttttttcgccgttaaaaattctccctgaactattgagattgttagatttaaggactttagtctaatttcattcaattttactgtttcagttgattgtttatgtactaaaccataccactcagactttgatatctaccaaatcatgtccctcaaactttgatatgtactaaatca

SEQ ID NO: 213385 - DNA, 735 bp, Cannabis indica
aaaaataaaaaaacccatatttttaatgggtaaaactcattactataaataaaattaactataaatattcaattttaatctaatcaaaaataataaaagagaaatttaaatttctatacttaattaaagaaaatataaaaaaatatcctcttttacactactatatcaaaaatatatttatatacttaagtcaaattaagattttttttattatttttttatcgatctctttttatttcttttaaccgattgatgaaacaatttcaactcatataatgtaaaaatgagatatatatttctttttaattagatagaaacattaagtataaaaactcaatttttttttaataatatccattaagagtgcactcatatatatatatatataacaaaataattaagaaaaaaaaaaaacaaattaattaccttatattggcttgatgaaagagattgaatgtaatcaaaagaccaaatgggaggttcataattggctgatcttctatgaatatgattatcaaatatagtagtattattagtaatatttgtactattgaccatagtacattggatggggtagcaagcacttgataatgtacttgctcttgctaattttgtagtattaaggattaatgaaagtggagaaaattgatgaactcccaagcaaaacattattataattttggcttattaattacaatttgggatatgagaattttgttgttgcttggtttgttt

SEQ ID NO: 213386 - DNA, 1024 bp, Cannabis indica
ttctcaacacaacttcaccaccccaatattaggattttcatcttgtacatgatcctgaggttcatcatgagcttctgttagaatttgttcaatccccaggatcattagtaggagcagaagcgaaagtaacgggtacagggacataaataccttcttctttgaatacaatttctcttgatcttgacttgaaccaaatgtatcttcaaaatagacaaatatatctaattctatcactttggtggtgtgagaaggagaatagaacttggaacccctcaatccaatagtgtaacctacaaagtagccactaatagttttcgaatcaagtttcttagattgtgggttatagggccttacttcagttttacatccccaagcatgaaaatgacgcaaaattagtttcttacccgaccataactcttacggtgtctttatgccaaacttactaggaacttgattcaagatataagcaacagtctttcatgcctcaccccataaaattttggcaagctagaatgaatcaacatacaacgcactatgtcaagaagtgtgtaatttcttcttttagcgattccattttgttgcgatgccgctgacattgtatatcttgcatcaatatcacattcttgtaagtatttagcaaatggctcggggttccttccactttcattataacgtccataatactctccccctctatcagagttaacatctttgattttatttcccttttgaagctcaacattcgtcttgaaaatcttgaaggcgcatacgaagattcagatttttcacgaataagttcaacagggccatatcgggaaaagtcatcaataaaggttataaagtatttataaccacctataacagatagaacaaaagacccataaatatcagtatggataagctctaatacatctgcacatctgtatgacttactctttctaaccttgatagtcaacttcccttttatacaatcaacacaggcagtgaaatcagagaaatcaagatcctgaagtacaccatcttt

SEQ ID NO: 213387 - DNA, 620 bp, Cannabis indica
agaagacaaccacctttagccacaggagagcaaaattggagtcatcatcgttaatgactacgcatttttctttagccttgttaacaactgatttatgacccttttttgaagctttttttgacaatggagatggagaaagcagaagaagatatatatatataaaaaaaatagataaaggaggcagttggaagaagaatggtgaaggttatggctggaaggtgattttcgttggttttgaatgtgggtttcaaaagggtaatggctggaagttgatttgggctgacatgaatggatatgtgtaagtggcattttggtaaataaaaactcactaatgtttaaaatgagaaataaaatggtgaattaccttattgtagtcttccacagtttccccatcttcattaatgaacgagacaatcatgttctcatgtctccttttctagatccaagcatgaaaataagccttattatcatcacctttggacagccaagttatcttacttctctgaaccagaaaactctgatacatggcagcctgttgttgaaacatagcaccagcatttctctcctgtaactgcgcaaaatcatctgttggagcaacttgtgcattggttaaggcacac

SEQ ID NO: 213388 - DNA, 644 bp, Cannabis indica
gtacagtaagtgcatggtcttatatttataagtagaaactaattatactttacctctctcattgagggtttctaattgatggtcaaatgttttctcggatcctaattcacggcccaatgagccaatccactaagaactacgacctaggcactagagcccaaaagatgagactatgggccctccttggtggcccatactcaacccgacagtcacccatttgggtcttggccctcatctcccttccaaagcaaataatgaaacgtatccttaattaaaaaaaatatgaaccaacaatagcataaatatatattatatatatattatataagatatccttaatgtatctaattatattactaatataatatcactttcgtaatactatttatatatatataataaaccaaaaacaataaaatatttgtgtaaaaaatgttcaatatatttgttaatttataaatggaacttataaataaaataattgtacataaataattgttaaatagatgatatatttgatattttaattcattattattctacgtataatttatatatatatatatatatatatatacatacacgcaacgctatactactctcccaaacgagatatttaggttgtttaacaaaaataacatcaa

SEQ ID NO: 213389 - DNA, 557 bp, Cannabis indica
ttaatgaaaaattatattattatttgatttaattgtgaaattttatgagctatttcattttaagaccatagttggtgcgtcaaggcatttttgtaattttgacctgggaagggtaaaattataatgttatggcacattgtgcttatagactatattattatatagtatatttattttgtctttctacatgtgttttctgacaagtcgatacggtatagtcacaaccgagtattttgggccgaactgaattcagggcccttaatatatttttggaatttaattatggcttttatatgttaaatagaaaaatatgatttatatgtgtgagtggaaatggaaaaatggtcctttgatgtgaatatgcttatatgtgtgtctatggagcaatttggtcatttgaccaaataatgtatattcaacaaaatctgattttggcaaaattagaaaacattttttcgggtttcacttctccctagccacatctctctctcaccctctccgttttggtatttcaaaataattttggaagaaaatgcttgaaattttgggtgtggctt

SEQ ID NO: 213390 - DNA, 525 bp, Cannabis indica
ttgctaagacacgggatgcgtgcattatcaccctgcagatggcgaacccagaatttgcaggcctcgagttttctcggctgatcaccctacaaattcccccttccgcgcgcgtgataggctacatgcagcctgtctcgtgggcagccagctaaaatccaatttttgggtgatttttcacaaaatttcagatttttaaattttccaactcttatttcaaaaataaaatattattttgaatatatttaaacttaaatattaattttacaaattaataatattttttttaatagattattattaatttctgatatttagaggtttaaatttaaaaattgattattttattttttaattacggtcaaattttaaaattttgttaattcattaatatttatatattatttaattataatgttaaatattttaatattaggtatattttaaattaagtgatagtcttatcttttaatttgaaatattacattgaaattaccttataagatgacttaaataattaataaattt

SEQ ID NO: 213391 - DNA, 798 bp, Cannabis indica
ttgctctttaatggtagattttattattgttgttggatgatgtaattttcagttggattatgcttgttatgatcttattaggtgttctggacagtttggagaggtttggaattgttttgagtgagttatgggattttaggctttttctgctgtagaaacggcagattgtttctgggaaaacggtctactgtttttctaggcagaaaacccagaaaaatagtttgttgtttttacagtggggacctgccatttttttgtgtattttttttcttgaaatctcattttttaatgttttctcgatatttaggttttagtcacgctatttatcgataggaaaatttttaattttaagtctaagtccccaaaaagtgatttagcgtatcacttattagttttgcgtatgttgtgacttaggggcctataaactatcgagcagcaattccactcaggttgacaagtacacttgaattcagaatcgaggtaagattagtataatagcatcatatgtgattacatgtttagcgtgcatgtttgtaaatgcatgttagttaacatatcaataatggtggtattagtgtacatagagttacaataaataccgacgaatatatgtttggcataagcactgattgacgctatcacatcggtaggactagggtactaagtataggctatattatggtcaatagtactatcatacgaacgttctaggctcagtctgtgtgggacatgggatacgattgtaattgggtgtatgggcgtaattgggtgtcctcgccttgggctagacttcattac

SEQ ID NO: 213392 - DNA, 814 bp, Cannabis indica
gagggaactgggccctatcttcgcatcagattgcttattgatgttaacaagcctatcagacgaggcattcatgttcgtttttttaagatgggtaatggctagatttcaaatatgaaaggctgcctgattattgtctttactgtggcatgcttgatcacatcaaaaagtattgccatgcataccttcagaagtgtgatgagtctatttccccacctccttgtccttatgatctccctcttagaggtaaagaaaagcctactgaaaggcaatctccttttcaatatcctcaccctccagctataactatcactgatatggatcttactggctttcctcatggaagtcaattccctaatccttttctgaactacccatttagttttactcctctgctgaactctaatgttgcctcggttgctggtctgactggctcttgtcaatcttataatgtcatgatccctactcctgtgaatcctaaccattctttgggattttctctgtcgggttcgtctttgtctgccccgttgcatactgactctgttattgtcaatgattccccgggtttcaccaatcctgaattgacttctgctgctcgctctcttgctgaagctttgccttctttgattctcaactcaagtcaggcctctgccgtctctgtggtggaaacctccttgcctgattctcaagttcgaggtaaaggtttggcgtgtgcttctggggtcaaaaggcccacttttcaagcatgtcaagctaattttgggggttcactgcgctctatgctcaaacgagcaagagctggtgatgttgatgtaag

SEQ ID NO: 213393 - DNA, 565 bp, Cannabis indica
ttttttttatatgattatatataaatatgatttatataataaatattaatttatagaaactaataaaaattaataaaaagagaaaatgaagagaattaaggaaagaataataaaaactaattagagagattttagagcgccacgtcaccgcttcatacttctcctttatatatatatatagattatataacacccaatacttaattggaccagtagagatattgacacatagacagctgctagatactactagtgtcttttagcatttctcatatatacttgtattgaatagaagtatgcaaatttcattgtttcaaatcattaagagtacatcacgtaaactactcagaattatagtagctaagtgcaaccagcatttaacgacgaaactctagccaaattgtgagcaacaagattagcgtttgataaaaattaaaaagacatttttcaaactagaaagaatttgtttgacttggagatgcataacctaaaaatagaaggcaaatccatcaaatttcggacagcttgaatcgtgatcaaactgtccgactccaacaccatatct

SEQ ID NO: 213394 - DNA, 521 bp, Cannabis indica
tgttgggacaacgggttgacaagatttgttgtactatctactatgctagtagaaccttgaatgattcccaattaaattatgctactatagaaaaggagatgttggccattgtattttcatgtgataagtttcggcgttacttgattaggaacaaggcgatagtttataaagactatttaaatcaagtacttgatgactaagaaagatggaaagttgagactaattcgatgggttcttcctcttcaagaatttgaataggaaataaaagacaagaagggcaaagagaatttagtaactaatcatttgtgaaggctgtaattggaggagagctagaacacagaggaggtgcaaataaatgaagagttttctgatgaaacaaccctttgtttgacacttagctcaacaataccatggttcgcagactatgtgaatttcttggctgccaacattacacctctagacatgagtaaacaacaactaaagaagttcttttccaaagtgaagcactattattgggaaga

SEQ ID NO: 213395 - DNA, 558 bp, Cannabis indica
agaattgcaattaatagagccctctgtcaaaacactcaacaacacacacatataagagtgaagaggctatgaattaagtttgaagaactgaaaagcaagagagagggggaagacgagtcagtggtgaaaatgaggggcgggtgttgaattcgagagagagagagagagattaatcgatttaaaagtggtgtaactgagtgagaaattgtcctgtgttatgctaaggaaaatctaaaaggatgaaaaaatggggggctaagagtggtggcaaataaagaacatcaaatctttttgtagattttaacaaataaataaataaaatacaacggatagcatatattattcaaccaataaagaactaactataatagattatcttgctttcaaaaaagaaagaaaaactatagtaaattataagtgaagaagtagtaaatttaaattagagtgtgtttatttcattaattttaaataatggtcattataattaaatataaaagttaaattttattattgagcagttacatttttttttcaataatattattaaatagaaaaaat

SEQ ID NO: 213396 - DNA, 742 bp, Cannabis indica
gtacgttaaagttatttaagacaaacggtaaaattttgagaaattcagaataattgacaatatagaaatcaatatttaaaccgtctatttcacacacgtataaaataaaaaagtcatgtgtgcaacatactatttgaacattattttcgacgtgttaaatttttctgaatttcttaaaattttacaagatatcttaaataactataacttacacgattatgaaaaaaattagactaaaagattcttatagataccgaaacagttaggggttgtatcagtacacccattttaaagggatgtattgtagaattttcctatactattgttttattattattttttttttaaatttacggtttaggtttctaaagtagtttcttcatagtttttatgtgggttgttatacatattttagttgaaatttaagttgcttcgttagttttaatagaagtttctatgtagaattccgtaaaaaagaagaaaaaaaaactctttaaatttattttttttataaatttgacacggtagttaaatattaccgttaaatattaactggatgactattgtatatatctgtgtatatgtaacagtaagatctcgaaattaatacagtaataatttaattggtatttaaaagtgacacttgagaaaagtaaacttagaaagattttaccaataaaaaaaaataagaaataaaaaagttttcaccccaaattcttctaaataaaatggagaaaggaat

SEQ ID NO: 213397 - DNA, 538 bp, Cannabis indica
aaaaaaaaaaaaaaagaaataactcatactaaaatcgaaaaccagtcatatttaaaatggaaacaatttaacattaaaatagaaacaagtagtatttaaccgcaatggaaacaaatgccataaaaaataaaaacaaactcacactaaaatcggaaacaagttatattgaaaatggaaacagtaaccatcaaaatggaaactatagtttctaaaatggaagcaactaacatttaagctcgtttatgtaaaatggaaacaactaacaattaatttcaaaatggaaactataatttgtgagagagaaacaattagcatttaatctaaaaaatagaaaccatttaacttcgaaatggaaagtatagtttgtgaaataaaaacaactaacatttaatctcgaaaaatagaaacaatttaataacgaactagaaactacagtttgtgaaatagaaacaaatatcataaaaaaatggaaacaactcatattgaaaattgaaacaatttaacttggaaaatgaaaataatttaatctcgaaaaatg

SEQ ID NO: 213398 - DNA, 997 bp, Cannabis indica
gtggaaaaaatctgttgagattaaatggaagagtgtaaaactcttcatttctattgtctcctctgaatgttctgaacttgacccaccatggcattcctctatctttcttggacttctccacttctaatgtgttatcaaggaacactgctaccattagaccaactgttgggggagatgagaatatggtattcaagaatgcattgaactgccaaacaccacaaacaaatcaatatgtaaacgacatgtcggttcgatcacaacataatatgagtttatgaattcttacccatccagcatttgtatgaaccagaccatgatgtgaggcagtccagtattcattgaagaattgtgggatagatatgccgaggaacagtgaaagcccagtgatgatgaggtttctcatagaattcatgtttgtgaattgaagaaatgataatccaactgaagctgaaaagcccggcaagaaaatgttacgaaatgaatgaatacattttaagtttatgatataatattatacttcttttgttcaacttcaccacataccaactaggccaaagaggatacaatacagagcagagtatatagggaagggtatggatgcaaagacagctccaaatttacctagcaaaaacataacaaaaaacaaagaaaatctctaagctgattcaaatttctctctataccataacaagtttatttcagaactctagctgcttctctagttcaatacttgaatttactttaaaatctcaaaggttaccgttacttacctaaagtagaaaagaagatcatgaagccagcagaaatttgaacaactctgcggctcccaactcgggttagtccaagaagtcctacgttttccctgtaatacatgatcaaaatcttgtgttaattataatgctgcaaatcaagcattgtgaagccacagctctctgtcttacacagatacagtagaaccggagcatgttccaaaaagaccatcgagcaggacaccaat

SEQ ID NO: 213399 - DNA, 678 bp, Cannabis indica
ttgtacactgatgcaacctagttctagtacttacaaacgaggcaattgccaactaattagttgcgttagtcatgggcgcgcgttagccaacgtgttaacttacgcagatacatcatttggtagagtagtataacctatattcgcaagtttacacataaatatttaaacacgagttctcgcatgatataaagagctcttattatatatatgtggtgttggggaaagacattccctcattgcatatatctatatatatatatatgcgacatgtactcagtattccgtaccacaaaaccaaaagatgttacctttctaatcagaaacataaaaggaatacctgtccaagtccatcatcaatagatacattcataaaaatatacaaaacagttgcattatatatatataggaatatgattttgtctcgtgatgtactttcacggaatgtattccgtggtacattaaatgggtctcgtacattaaatgagtgtcagggtacgtttctactttttaactctaattaccctagatcaatctcagccgtcagatcaaataacttcctcatctgacggctgccgtgcatcacggattacaatccgtgaaagtacaataacaggacaaaatcatatccctatatatattctttggcacgaaaatcattataataacagatgttgttcc

SEQ ID NO: 213400 - DNA, 735 bp, Cannabis indica
attctcgacattaaacatgggattgttctgatgaaagtagacagtggtagaagaaagttgtaccagctttttaatcctgctaccgaacagagaatcactttgccaaccatacccattcctgtatatcgtatttggcatctgtatgttgaatcgaagacggttaaagtcttattgcgttgtgagagcaagaaatattccaattggcaagtctacttatacaccttaggtcagccgcactggagggcttacaatatgagttcccattctaatacctactcgacttcgacttctatagaggcacaaacggtgcatttcctcacgtcatcttataccggaacgggtgaatcgagagaacttctaggcggggagatatgacagtttcattttaaatcagagagaattggtaaatgttctctcattcttacagaggagatgatggcttccaaaccaatgtggtgggataaatgcctctgttttgtacggttgcatttgagtgagaaaatcctcaaggtgaagaaagttgtcatgcatgatcaaggccatttgatgctaaaagatgtgaatctttctttggagttgttgaattagatgggctatttgaaagaatctacttcttttccggactatactaactccaaactgaaattcgtgcttgacagtgtagttcgcacattcaatttgaacactaagttcattgaagaatcgggaaagtaagagtcaagtacataattgtac

SEQ ID NO: 213401 - DNA, 707 bp, Cannabis indica
aagagaaaattttattaatactcccaaaaacgtcataatgaattgtctaaaaaatatgaaatagggaataaaatttcaaactaataattgaaactaaattgttcattaactaaaacaattaattccaaaaattaaagaagataacgagcttcatcttcaacttggacaatctccacccttctgtccaaccatccgactcaactcgctaagataggatccaagtgtaagcagctagagctgaaataagaagaaaataaaaaattgttagtagatccagaattaataacccaaggggataataattctctaaaacacatgagtttataacaaagatagaaataccttgttggcatttcaaaaacttaggacactagggtttccagtggcccttttcgttgaaatagaagcactttcctttttcttattagttgtgttaacaactttaagagggttcttgctattcttccatttcttctttttactggatttcgaagtagaggcaatgtttgcctcaggcttggtcgtgccattagcagcagtactagaactaggagctttagttcctcctttctgcggacctccaataaaattctcaaatgtttgaaagttattgattaactcgtggaagtcaaaagtcaacttgttcatgacataatttgaggtaaagggcaaaaaaggtggagccaaactatttaagatcaaactca

SEQ ID NO: 213402 - DNA, 886 bp, Cannabis indica
atgagaagtgaagtgtgtgagtgcattgagtctcacaagggataggaacatttcattagaagtgtacataatgtgcaactttggtatatgggttagggccccaaggagtacccagttttgtgcgcatggatgaggagtcacacaccggaccatcgtgcgcgcgccaccgtccgaccgtgcaggcaggtgtggtgtcactttattttttttaggagaaaattcatttattatttttatttaattaattaaaatagtttttaaacgtgtttaattaattggtaaacagaaacgttttctcctccttgttttcagcatcgttcccatggtcctacgttttaacgttcccatgatcagagacatctttcttcccgttactaccttctgtgcattccctatataatacatcataatcaacaggagaaatacattctttctcacacagaaacaaaatcctttttagtttatatttatgattatattatagaagtatagctccgatacaatggtattttgactgggttgttttatcctgagaaagaccagtaattttcgactgcttgcacattcttaagtagtgttgcaaaggtcttaaaaagaataacctaatccacaactcaatccaaaaaatttatttaataatatcattcattttttattttcagtagcagtctgtacaacatatcacaaagtcatttttttttatcaagcacgatacttacatctccaactagagttggtcttagttagtagcatgtctatttctgcaaacaatatttgactagcttatgatcttttctttatttcctaggcattctttatgatactctttttttttattattattattaataatgcctggtatatgatttgacttttgaatttgtct

SEQ ID NO: 213403 - DNA, 848 bp, Cannabis indica
ttgttagattgtgaatcatgtcattttctaataacattatcgccttagttcaagccctagagtcaataaatgtgctagtgtttcttttgaattagtcgattctcatgtttggagtccttctcatatcttgtgtaaacctagtttttgttattttgttacttttgtggatgattattctcgtgccacttggttgtttttgatgaagaactattctaaattattctctattttttgtgtcgtttgtactgaaattcaaaattattttaatgtgtctatcatactttgagaagataatgccaaagagtataaatctagttaatttcaatcttatatggttcaaaatgacatgattcatgaaacttattatgttgatactctatctcaaaatggtgtagcacaacaaaaaaatagacatctccttgaaacagctagagctctcttatttcaaatgcatgttcctaaactgttttaggtcgatgttgcttctacagtatatttttttttattaatcgcatgccatcttttgttcttcatggtgaaattccttacaaaattttgtttagcaataagccattatttcttagtaagccaagaattttttgtaacacttgctttgttcgtgatgtttgtccacaggtaactaaattagatctcaagtgattgaagtgtatattccttggttattctcgtctttaaaaagaatataggtattattgtccagatcttaacaaatatcttgtttctacagatattatttttgtgaaaagtacaccttatttctcatctttacctactcctactcgtcagggggagaatgatttgttgtattctatcacatcttatgcgcc

SEQ ID NO: 213404 - DNA, 663 bp, Cannabis indica
aaattttcagtttcagtttcacctatatatatgtcaccattgccatgtatccaattggcttcgggaataattgttggataaattataataaacatgccttaaaatttattaaatataaaacaagttactaagccatgccctgctaattttttgtttctttaaaccaattttatacattaaaaaaaaaaaaaaattataacaagatcagttgcatggaagagcaaaaatgttgctttatcaattttataattttgtatgtttgaatatgccaatgattgaaaaaataatagagttaaattgtgttcatgttttcttttatttaaaaatctgagtttatcaagttattctttaaatttacattaaagaattcgattctgataacaatttttagttagttttgactaacttttgactcagggttacattttttatgtgagctactgaaatttgattaaccaaataaaactgtggtaaaaaatgttggattcagcaacaaaatatatataaattattcttaaaaatatatatatgtgcatattttttttttagtaaatttctcgtaagttagagtattctgacaaatttatatttagtaaagaatcaagtcgttacactatgtttgtgggagggaaaagtgtgtggatggagaggagaggagggaag

SEQ ID NO: 213405 - DNA, 520 bp, Cannabis indica
tctctctctctctctctctctctctctctctctctctctctctctctctcaccaagaccgaccaaaactcaattgtttttgtgggtttccagtattatttgaaggagttttggaatagaaaacccaagggaagccctagaatatctctttttatgattttgaaggttttctttaagtttggggtatgcatagttgtgaattaggttctgttcaaactagtggtgtttagggttagcttttgggttgattttaagttgtttaatgcttgtttttggaggttttgaggtctgattattgagttgagcaagtttgagttcagctcaagaactcaaacttggctcaacaatggtgatttttgaatttctgcatgttttgaggttgtgttgcttggaactagtctattgtgatgttgttaggtgttatggagcttggatttgagtttggagttgttttgagcatgttttgaggttttgttgtcttctgcagtagaaaacaataggttgtttctgtggaaacggtc

SEQ ID NO: 213406 - DNA, 1404 bp, Cannabis indica
aaagatgatattatttatataatctaccgaatacgtactacgtactcatcaaatcatatgaatcatttttcaaaaaaaaaagaaaaagaaaataaaataaattcaatctgtatttaaatataaataatataagtacattacccacaaacttgacacaagacaagttattttaaatgtagtatcttatcataatctcttagtcgactttcatacctaaaaatacatgttggaatattattttaatttttttcatagtggtgtttgttttagttacaagatcattttagtaaatttttagaaaatttcgaataatttatagtgtcaaaaataagtttgaaatttttataaacacacgtggtagactgaaatattagaaactctattttcagtactgtaaactatcagaatttttcaaaaatttacaaagatgatactataactataatgaatatcactatgaagaaaaagctctaaaaaaaatattctgacatatgatttcgggcgtgaaaattgactaagagcttgtaatagaaagttataattagtactcctcttcaaacgcttatctttattctagaacatcttcaatggagatagagattggtgatttattattaaagagcattgacattgggtatcagtaatgcccgacacctttaatagttggtgtcccacaattggttagcgatattctttaaaaactattttcttaatttatatgagatccgatacttaattacaccaatagtagtatgacaccgaagaggggataccgataatacattttagcaattcacattattaaaatataacttaatcttgtaaaatatttgctttatgcaatgtatcaaaagttaattcaaatttatcacataataaaaggttatggatatttataccacaatatgatatattgcatcacaataaatatacttctttttgttgggttttatgccttaaataaaactcatttcaatataatcagatttacttattaatatagatcagaaataacatttaatgttgcatggttcacatgatttatttcatgattatatgtacataatgtatgaattcatctgaaacccttttcacatacttgatcctgtttattgtgctgtcaacacattggaaagtaaacatgactatgtgaataaagtttcctagatttatcagacacagggttttactgatatgataatctacaacaagagtttacttgtatttggagaaatactatgttctttccagaacattggttaaagtaaagctcaggttggatgcatggagtatgcatcggaagggaccgatattgaacttttgacttagatttattaaacttaccgtaatatctattcaagtcaatatcactagttgatcctagatcaaatgttcttaatcctg

SEQ ID NO: 213407 - DNA, 1047 bp, Cannabis indica
aaaaaagaaaaggaaaataaaataaatttaatatgtatttaaatataaataatataagtatattacccacaaacttgacacacaattatatgacaactaattttaaaagtggtatcttcaatctattatcacaatctcttagttaacttccatacataaaaatatatattaaaatattattttttaatttttttttaaagtggtatttgttttagttacaacatcattcttgtaaatttttagaaaattttgaataatttatagtgtcaaaaataagtttgaaattttttaaacatacgtggtagactgaaatattaagaactctattttcagtactgtaaactatcagaatttttcaaaaaatttacaaagatgatactataactataatgaatatcactatgaaaaagttttaaaaaaatattctgacatatgatttcaggcgtgaaaattgactaagagcttgtaatagaaggttataatcagtactcctcttcaaatgcttatctttattctagaacatcttcaatggagatagagattggtgatctattattaaagagcattgatattaggtatcagtagtactcgatacctttaatagttggtgctccacaattggttagcgatattctttaaaagctattttcttaatttatatgagatccgatacttaattacaccaataatagtatggcaccgaaaagggtgctagacaccaataataccatttagcaattctcattattaaaatatagcttatttgtaaaatgtttgctttatgcagtatatcaaaagttaattcaaatttatcacaggttatggatatttgtaccacaatatgatatgttgcatcacaataaatatacttcttttatatttacttttatgttattcaattattacattaaattgtaaatcttttacatttatttattattgatttatataataaaattaatgatcaagtcataatcataattatttttatattttttaataaaatatattacaaagtcataattacttcttttatatttactttta

SEQ ID NO: 213408 - DNA, 843 bp, Cannabis indica
gactacacaaaaagcctgctgcagagggatataacaccaaaatcaacagacaaaccatgggaaacgaagctggacagctcctactgcaggtaccttcatggtaaattgtgatgcttcagttgtttctaacttgaaggggtatggtctggctgctgtgattcgagatgcagagggtaggttggttgcagctgaggtgaagtttaaatccggctttgtttcagttataacggctgagttgttggcggttcagttggggttgcttctagttcagaagatgcaggctaggccgtttctggtttgctcagacaatgtcactgccatcaaccatcttcattcaaaaaccattcctacagccgattggggaacaccgataaaggagattttattttcaaatgtgttagatggttgtaaaggattcatttttgctagtagggattgcaataaggttgctcattctttagctaaatgggctgttgataatagatgtaattctttttggtcagagggtattccctcttgtgctgctgccttgttaaatgcagaaaagcctgaccttgtgtagctcttttgttgctgaataaagtgtttcattctcaaaaaaaaaaaataactttaatatcacccaatttctaacaaaatacaatgaaactaaaaagtaaaatagagttagtgagatacaacagtaattgacatagaaataaggaccttcgtggcttttacagtcttagcaaaatgcccacttcctccatcagatatgtcatcaagatcaacacttgagaacactataatctacgctgcaaaaaaaaaaaaagcgtaatttatttacctctatccataaaacaa

SEQ ID NO: 213409 - DNA, 636 bp, Cannabis indica
atcatcccaaacaccaatattcttattattttcatgtgtttgtagccatagctatagctttggctgttttagtttgttgtgaagaagaatctgtaaagccattggttaagacagtaaagggtaagaaagtatgtacaaaagggtgggaatgtaaggtttggtcagagtattgttgtaaccaaacaatctcagattatttccaatcttaccaatttgagaacctgttttcaaaacgtaactcccctgtagcccatgctgtgggattttgggattaccattctttcattactgcctcagctgattaccaacatcttggctttggtacaactggaaccaaacacactgccatgaaggaagttgctgcttttcttggccatgttggtagcaaaacctcttgtaagtactctcatccatgcataaacaacctttttcttttaaatctaaaatgtgtgacattgctattgatattttttgttatatatatttatagggatataattttgtcctgatattgtacttttaacggattgtaatccgtaatgtacgacagtcgtcagatgagagagttatttgatctgacggctgagattgatgtaagggtaattagggtagtaaagtaaaaacgtatcctaacac

SEQ ID NO: 213410 - DNA, 837 bp, Cannabis indica
  modified_base (764)..(764): a, c, t, g, unknown or other
gaacttgtaaaatgcaagtgacccagaatcataattctgctcagtcacttgggaggcaactatacctgtactaagtataggtaaataacaagctcggaaaatacatagcagtttgcatgtgcaattactaaaacaagggaaatattcatttaaaaagatgataaaagcacgacataaacccgggattaaagtttcctcggtcagctagttgtcttaaaataaaatgaaattttacaaaatttaaaggctgcttggtcatccatattgcattaaaaaaggcccataggccaaactaaaaaaaaaagaaaaaaaagaacagaatgtttcatgcggtaggagtcctaggttctttatacggatcagcttggtcattagtggtcggggtcttagtgttttggtcggtcggagctgtggggttagctacctcgagattttcgttatctttttaggccacgctataacaaagatacgcctccttggtttcaccgaggtaattaaagtttctctctgggttggccttccaaaattcgtagaaaacctctagggcggccgtctccaaactttcaatctccttcggaagcagttgctcccttgtctgcctggatttgacgtcctcttccattttgtcttctccttggttaacatggcaagaagagatcggagacttttcctctcgttattcagaccattaacctccctaaatagagcttcgacattcgcttcaagtggggcggtagatggtatgtcttgaatcttctttgccnctcctcaactttcttgttggcgaccaagagtttcttgttcacctcgtccaactttgcccttgtgcctcagcct

SEQ ID NO: 213411 - DNA, 969 bp, Cannabis indica
gaactcaccaccccaaacttaatttatgcattgtcctcaatgtatcaaaatacaaatataaattgaaagtgaaagagttgagagtttagagtggtcatacctcatcttggagcaatgtcaagagcaacaaaaagataacaacaatcaaaacaaaaagttaatctaaaacataaagaaaaacacatattaccaagaattgatgcgagcaattgtaaagaccgcttagtttaatttggaaattagcagttaatcacgtttaattatgaaattatttatagctatttaaataattatttatactgttattattgaattcagagatgcatttttatgtcatgtagtagttttcataattttgcattccggtgcccggtattttggaactcggtgtttggctcagtaaaatcacaacttagtatgttagtagtttgggacggtttattagacattgggaatgtcgggaatggccgggaatttagaatttcccaaaaatacccctttagtgttatttatgtgattttagtgtggaggggcaaaatggtctttttgccccaatgatattttgtcctttagtgattttattaattgaaaaataaatgttaattgtttattattttggctgaagtataaaaggagtaagtggtcttttatttcattttttttcaaaaaaattcaaaagttagaaaaaaaaaaaatttcaaaaacactgttgttacctaagagtattatcttattgtgccacatcatcccacgtgaaatataaatggtaaaatattgagttatatataagaatatatattactctacttatcatcaagtgatttaatatggaactctccataattctcaacgtagtatcagaatcatatccttgcaggtatattaccctgattcgatagtgacaactacatcttcctaaggccgactctaaaatataatgggtcatcggggtctctcttgatcactcat

SEQ ID NO: 213412 - DNA, 1287 bp, Cannabis indica
ttttttgagctttgtttttgttacttgggagttcccttgtgttgaggtaggctgctattggcgtcatccagtttaaagatgtgtcaatcaattcaatctcttccgagctggtgattagattatccttatcatttatattgttgctcgcaagtcgggctagtgcatcaacagttgtattttcttctcttggaattttcttgagggcatagcttttgaattgtgtgagcaggtcatatattttgcttaaataggctattatattttctccccgagcttcatacttcccaaataaatgattgaccactacctatgagtcgctgcagatatcgatatgttcgacatgaagttccagagcaagtttcaggtcggcaataagagcttcatattctgcttcattgttggatgctctaaacatgaattttactgatctttgtagatgttggccaccaggtgtgacaagggcaattcttgcatcagacagttgatctgtggccaacccaaccacatgtaacttccaggtgggtctgtctttactgttgctcagctgaggttcttgtactagctttgagttatttttcacagtgctctcttctttgcccgtacacttaactaaaaaattttctaaggccttccctttaatcgctgttcgggtttgaaacatgatttttcactggcctaactccactgcccatttgagtaaccgtctagaggcgttaggtttttgtaatacttggtgtaatggttggtcagtgtatactcgaacagggtgagcttcaaagtaaggccttagctttcttgttgctaagattaggcaataagtgagcttttcttttaggggatatcgtccttcagcttcagcgagtcttttgctgatgtaacagaccgattgctagatattgttctcttctctgatcagtacgacacttacaacgggttttgtgacagccaggtatatctttagctcttctccgtccagaggttttgagagtacatggggttttgggagtttcctttttagttcttgaaagcattctcacattcctccgtccattcaaattttttgtttcctcacaggatgttgaagaaaggaacacacttgtctgttgactttgaaaaaaatctactgagtgcggcaatcccaccagttaaactttggacttcttggttttgtaggcgatttcatatccaggagggcttgaatttttctggattggcctcaatacctcaggcgttaacaataaagctaagaaacttacctgagtttactccgaaggagcactttaaggg

SEQ ID NO: 213413 - DNA, 1300 bp, Cannabis indica
ttttttttttaatttcgatttttggatatggaaggttgttacctacaaaaaatttgtatgatttaatgaatgtgtcacttttgttggtagtaattaaatgagagtttggtctgataaaaataacagattcataaatttatggatatgagtacagtgaaaagtgtttttgttatagagatattataaatccaatacagtaatttggaatatacatatttaatttaattttaattatagatatatttaatatatttaaattatatttatgaaactctaatagtatctgactgtaaaagtttaagccattaattattcatgtattcgtatttatttatttaaactagttttaaaataaaaaaaaattaatgacctacactaatcaaaaactattatgtgtcataaatttaactagtagcataagtactaaaaattttaagtttgtaaacaatattatttttagcggcataagtttgtaatgttttatctgtacagactacgttttgaatttattaaaaaaatatttgaaagtaattgtaactatagatttttgtctaaacccaataattagaatcttggtcttataagtattttgtttaagataataacagaatctgtactgacgaaacttgaaaaaaaaaagagttacttataccgttaaaaaaaaacattaaatttatatcaccgacaaagtttaattaaaattttaagtacttataccactaataacttttttatattttatttttaaatatttaagtcacaaattcctctatccaaatagtatctttgttatatatatatattatattttttggtggctcattcccttttaactattattttagatgtattttttttattattattttttttttaattaggatgagaaatatattacgtaatgatgagacagacgtgtggttacgtaagtaatagtatttgtctaaataaataccttaatttgctcttttcagaaatctgaaagtgaaacattttcaagcttttctttcctactcttaatttactactttttttttcattaagactattattattagtgaactaaccaactttgaggtataacggtttataaataatattgatttttttttttgggtgggtcgtactatatattactttattttctgtcatttataaacttaaaatatgtgaaaaaaattcatcacataaccaaaaaaaaaaaatatatatgtatatatatatattttttctacattatttataaacaaaggttgaccaagactaaaaatatcgaaaatctagaccatgcattgtttct

SEQ ID NO: 213414 - DNA, 742 bp, Cannabis indica
aaacatttagggttgtgatattagactattttactctaaattatttatgttacttcatgtttaaacaaggggtaaatttttcatattttgctccaattattattagttgattttaagtgggctgatattaattatgtaattatctattaaaaagtataagctgaaatagataattgaattgacattatcttatgttaatgaaaaatcaaagaaacaaacacatttctctctctctctctctctatatctctttgctttcattgtcagtccatgaagaaccaaggaaaattttaaggttttttttttcctatttccaacctgaaattggaaaggttttagcctagaaatcaaggtctttgttagccaactcaaggtaagtcccttttccattgaaattttcaagtttttgagttaggttttcatgcaaattccgaggttgggttgttgtacgaattggtagtattttgggttagttttttgtagttgtttcttggctgattatattgtttattgctggttttagttgtttttattgagaaagaccaaagcttgaactttcaagctcaaacttgattctttaatggtgaatttattttcaggggattataattactctttttggtttagattatgcttattatatatgtttaattaggtattctggaatgtttgatgtaatttgaggtaattttgacctagattttgaagtttggtatgttctgtagtgaaaaatggttcacca

SEQ ID NO: 213415 - DNA, 687 bp, Cannabis indica
gtggaatgctagaaataaagtgtatcatagcagttccccgctgagaccgcaggatgttctatccaacagtttgaaactggtgaatgactttattgccagcaagttgaggatctctttggaaagattggaggttcttgaccctccttgtcaaccacagctggtgccgaaggattttaattttttctctgatgcaatggtccgtggcagctgggcatttgtggctgttgttgtgttcaacaaggaagacgcctttgtggaagctctcacagccaaggtgtcggtctcctctgctctccatcccgagagtttagctctatgccatgctttctccttgagtctaaagctgaattgcaaggatgctagtttctacactgattgcttacaacttgccaatgctgttaggaattattctatacctgtgtggaacctttctaatatttttctgcatttattttcttgtctgaaaatgaactctagtttaggtgtttattggctgcctcgtgaggccaattcggtggctcacaagcttgcagcttgggatgctatgaacaatgtatctcgggtttgtactgaaggggaattagcaccctttgttgctactggtttctagtttgttgtttcaataaagttctctgttgcatcaaaaatatatatatatatatatatatagggtgactattcaatggt

SEQ ID NO: 213416 - DNA, 994 bp, Cannabis indica
cattcaaaactctaataggagactagtgccaccagttggggccatgaagtagaactggtcggtcatggcttatgggaagtcattgatggtgtttcttacttattttggtcatatggatgctagaaaccactttggccacaatggttcttagcaaatttcttaggagagcactgccaccatttttgccaaaaaagtggcagcggtcgcataagaggatgacttttctcacttgtatttgatacatggatgttggaaataaaatttggccaatgaaactcccactcctatgtggtggccgaccactaccaccaattgtcccaaaagtttagcagtggtcgaccaactggtttccacaccccttggtgacttctttcacttagttttgacatagtattggtgaaaatatatatttttggcaagaaatcccatttcccttattcatggtcgaccactgccactcattatgccacaaagatgacagtggttggctaggcttatttcttggtgaaaaatggtttctttcacttgtgttgcactttttggtgttgagggaacatatttgaacaatttccccttggtgctttctaggtggcgaccactgccatctccagttctccaaaaattagaggtactgccatttccatatggcagtcggtgcataggctttattaaatgtgggttttgtgtcattttgactttatgcataaatctaagccatttcatgcccaaatgagttaagtctttgttagtttccttggcggattgaggtctctagggtaaaaacgttcacacgggcctatgaaccctagtttaggcacacttgggtgtgtgagtcctgataccaaatggttggttaatattttcgagtcctctagaggtgccatgaggccctcaagaaggatgtcttaactcatttgacatttataagtcttggtcaaagttacaagattgacttttttgattcataacaatagctataataataataataata

SEQ ID NO: 213417 - DNA, 596 bp, Cannabis indica
ttttgccagcgtaaaatgaaaagcgctagaaaaaatgactttttccagcgcaataagcgctggtaaaagttagattttagccattgtaaatgtacgctggtaaaactttgacctctttgtcagcccagtttgcgaaaatgcgctagtaaaagttacttttactagcggagtagcgaactgtgctggtaaaagtgatatttcttgtagtgagaagctgtctgttttgtgatcatgcgagtgagaacccctttcaccttttatttgaaatgctctatcaaaagctctctggttcggtgcccctttaccactgaaaactaatgaaatagaaggaagtgatttgttagatgtgttaatcttggtggggcaaggtcttgtgggtgatcaacttcttatgctattggtctattttgctagtgtgtgtgacaccatttgggttatagaaactctttactacgtggtgggagtcaaaaagattatgttggcttcaagaggatatttgcaaaaaattcttggagtttgtaagctgggtcaggtgataaaatagatcaggggttggtgcttgattttggtgtgtcccctaactaaaaaatcttggt

SEQ ID NO: 213418 - DNA, 510 bp, Cannabis indica
tttttagtttcatgttagttttattttttgctgttcttattttgttatgagtcaatttgctaaatgtgagtcaatgtgaaagtaagtagatagcatggttttgaaaattttatttattttttaaataatgcgtgtgcttggtgagattacattcttgcttaatttaaatttggtgcttaaaaagaacatagaatcatataggtaaatttctagcaattgaattggtttatgtatgctaattgtgaaatgtagaaagttatttggaaaattctagaacattctttcttgctacttgaggcgaaataataaatgatgcataactaggatagtgatttagacattctttggatcgattgtgcctttcaagccatccttataatttttatcttagttatcctttttgagctttaagttgattttttatttttacaaattttgagcctaaacaaaataaacccattaatatcaaaaatttgaccctacttacaccataagtggatctttagtttg

SEQ ID NO: 213419 - DNA, 568 bp, Cannabis indica
tctctctctctctctctcattagtagttatcttatttacatttcgtcacaatattaattttgtttttgaatttttctgaaatacaactgaaaagttgaagagtatttttttttttatatatataaattaattaaatctaccttcaaataaaatttaatataaatatgtttatttttatgaatattgtacttaaattatcattacacactcactcgcgtaactaagtcataatttcaaatttaatagatttgtattctttatagatggatgtttagatttgtgggaaagttaagacaaaattttgattagaaaagtataaaaattattgtgaagtgatagggataaaatttgtagaatgactaaaagaagaggtaaacataataaatttttaaaaagaataatatgtagtataatttgctcagttgaaacttgcccggataactatggccattacatatgagcccattcttaaatggatgggttaacagcaaaggcctcactggcccaccttaggcccatttgaaggccttcgggtttggtttcatcttatccttttttagggccatct

SEQ ID NO: 213420 - DNA, 874 bp, Cannabis indica
caaaaaatcactttcaatatttttttaaacagttttttttcttaattaatatcttggactctgatcatgacccggacccaaatcccccacggtcctggcgctgaacccggcctctgacttgaacccaaatccgaccccggacctagacccgacgtaaataaaatcaaaaaatgaaaatgaaaatgaactttacagaacacacttttgttttctgtttttaaaattgaaaaacaaaagtagttacagaacgcatttttgtttttcaaaagcaaaatttttaaaaacaaaaattttactttcattttgtgattaaaaaattaaaaaacaaaagtgttaccaaacggcacctaagtttgtaaaatctactacacaataagtatctaaataaataataaaaaaatgcacactaaaacggttataaaaacctttctaatttataatgattaattattcttataaatatcggccttatgcaagaagtttattaagagagtgagagagagatatggaggattagtttatttttttttaatttaaatatcattctttttgttagataaatttttataatgtatttttttttttgattataagttcttaaactttttttttttttttgttcaatttgaagcatacacataagatgatagttaaatttaaccattgaattaagaatgtaagtaaataataagtagggaacaaaacataacggattatgacgatttaaaaaataaaaacaaaaacaaacaaacattgaggactcaacgcaatcatttaacaagaacaaatctaaaagaaattctcaccaaaagcctaatatataattgcacttacattaatgtactatactttttcaattatcttgttcttcaaa

SEQ ID NO: 213421 - DNA, 551 bp, Cannabis indica
ataagctttactcaatgcgtttaaattcaattacctcattgtgagttaagttagaaagaaaaaaatcatagtagttgtaaattttcgtttttcatcaaagcttagctgaagtaatattctccactatgctaataccattcgaataatagtgtaagagccataccttaacatattatatagttatattgaacaagcatattattcatgtgaaagtaccagttgggatacacatcttatatttccacattatatatatatatataacaacgtggtttgacatatatcctagtatataagtagtggtactttcttattacaattcaagcacaaaccacacacacaacatatatacatatatataataattattcatcaacatgagctagtgacaatattgatgatgtagaagtagtagtagtagtggtagaagcagaggccaaacatgttgaaccatcggtagtaccactacaatgatatgggtaacaacaagggttgaaaagagcacaaggatgaccaagttgacgacaatctgccactttcacacatttgtt

SEQ ID NO: 213422 - DNA, 624 bp, Cannabis indica
cttacgtttttttcgttgtgttcagtctaactgatctggaaagttacttggttcatgattatattaatctcaaagatcttgaattgattagaaaagactttgtactacccggccctctctctctctctatatgtatatatataatcatggtcgatggcagatgtcacctttcatctaaacaatctagagaaattcaagtatatgtgaatgtaatttttacgatttatataagaaaaaggctggctctctttgagaatatatatacttctaaaaatgctgcttatatatatatatatatgatcatgtttaattcattgggcactatattatacttgacttaattagggaagatagtgtctatatatttgattgcttacatataaatatatgtatatattataacacatcatgtatatgctccatcttcagctccggaaaagagacagagggtaccatctgcttacaaccgtttcattaagtaagtatatattataataattattaacatattactaaagctatatctgttatataaattaacaattaacccaagatctatttgtatataacatagaacacaatagtagtatatgataatatagtatgtgtacctgattgatccat

SEQ ID NO: 213423 - DNA, 587 bp, Cannabis indica
catgttattaaagttatatcccttgcgagcatgtgatcttatccgatctgcacaaataaaatctcataattctcaacagtatttaatgtctttctcaatgtcatattattattggtataattaaatcccaattttatataacttaagaaaatatctcataaaatacaacctataaaaataatagtgtactccataaaacatcatccattccatgcctatttatgaatccgataagtgcaagtttggtaactattggacgagtgtttttttattttaggtttgaagtcctttgcagagtatggggtccaccaccacgtccatatcagaaacccaaaaataactaaaatctgtttattcacttgcttaaaaagtcggtgatcataaaataatcatcatcaccataacaattacaatcagctatggtttaagtagcttaatcaaacaaactgatcactactctgagtaaacttaaagctaaacaactgtaggaccgatcgtaggctaacattttcacttcacacgcgaacttcaaaaccaaactaacgacggttgaagcctcaacaaaaaccacctctctctctctctct

SEQ ID NO: 213424 - DNA, 708 bp, Cannabis indica
taagttatatttttaaaaaatttcgtagctacctaaccgttcagtgcgaacacattatttacgtgtcattttttattgatatatttaaataaatttttaaataaaagttaagaatttaataatttagaccaatcaggcacatcactactgacttcacacttaataatcaggtactaacagaagtttcaaaaatataattataatggtaagaaaattaaacttaatatttatcttcaattgagtgttaaaatataaatatttatgttgtaaattattttaaacaaacgatttttattattatttaaaaaaaattgtttgttttttggttttttaataaagaatcgatttttataataaagatgacatttttatttccttttccatgcacgattatgtaaagggaagccaaagttttggtatttcttgtttggtgagtaacccttctctctttctctctctcactcatcactgttaaataccaaccatcagatcggagaggagaggaggagttcactggcaaaaggtacggacgggttcattcctttcatctatttcactcttttgttgttttgttctgagagttgatttaggcattataattatcaaagtaatcatcttcatttaggcataattaatttatatatttgctttgttctaagattcattctgagataaagaaacttccataaatttgtgatttttgcttcc

SEQ ID NO: 213425 - DNA, 697 bp, Cannabis indica
gatgatgacctccccttacccatataccttgcataccaccaattgagttgaggatgatgacctccccttacccatttgctatatggggcattgatctgattgggggcacttcccaaagggtgagggggagccaagtacgcagtagtagcagttgattttttcactaaatggaccgaggctgaacctcttgtgtccataacttggaagaaagttcttgactttgttgtcaaaaacattatctgcaggttttgaattcccatgaagatagaatctgataacagaactcagttcgatggtgacttgttcactgagttttgcaagaggaacaaattaattaagagcttctcatcagtatccaggcctcaggcgaatggacaagtggaagctattaacaaaaccttgaaggatactatcaagaagaagttagatgctgccaaaggtagatgggtggacgagttaccttaagtactttgggctcatagaactattgaaaagacggcaacaggacatattccattctcgttagcatttggttcggaagtaatcttgcctgtggaagtaaacatctcgactcatagacaagagttttataatcaagaagagaaccaagaactcttaaaattgtccttggacctacttgattaaaaacgtactgagtcgctaattactaatgaagcgtatcaacaccgagttacaa

SEQ ID NO: 213426 - DNA, 561 bp, Cannabis indica
ataaatgtgacacgcgtataagagtgtacacataaacagatcatattaacaataaactataaaaaaatagatgacactttaaatttattaacaatttagtttaaagtgttttataatgaaaatttgagtttagaaaaaaaaaataactttataataatttttattttactaaatctttaaattttgttaaatacaatattatcaaaacaccaatcaggtttggaaaagagtccaaaatagtatttattttgtattttttaatgttgaaaataagagagaagggtaaattgggtatttggtaagccaaagacttttgcttagtgtactttgctcttcgctggttttgaggactagggcttaagcggtagctggacgaagaagaagaagaagaagctctgtcaatgggtgcaagcagcgatccgactcaagatgggtccgacgagcagcaaaaacgttcagagatctacacatacgaagctccatggcacatctacgccatcgaactcggagtcgtccgccgcgacaaaagtccgactcgcaatcgcaagcctctcgaacaca

SEQ ID NO: 213427 - DNA, 735 bp, Cannabis indica
tccaagtacgtggtggagagtcgcgatctcttatatgctctgccaaattttctatcttatgatccaagtctttacatgcttcgcgcagggtattaagctcttctaccaactgacgatgacgaatggatgaccgaacagtctcgaggtaggactctatcaatttttttaatatagggggctgctttggaaacacaagacacaatattctccaattctctgacaataaagagcaatatgtctctgaaactacgtattcaaactggagcaatggtagcacaggagtagtcagttgaataaaaagtactttttcatactggaaaagacctttgaagaaggacgcaaagtctttatccattgaagtataacgtaaataaaattgtgatgcttgaggctcatatgatgacaaatgaattgtgtctcttcctactaatgttgttaagtcttcactatgctccaatcctacatgcatcgagctagcatctaaaagaccgcttggaggagttggcaagcacagttcatgagtgcttcgatcagtgtctgtggcatgcgtctaagatagagaaaacaggattgagagctctagagaaacctacaaacccggttgtctgcacaatatacatacatatgtaagtatccatactatactacacatatacataaaatatatatactgaaaagacttccatacctttaaaggcgcaattgtgggaggtaattcatgtgtgatagtacttt

SEQ ID NO: 213428 - DNA, 653 bp, Cannabis indica
accaaatgtgtatgagaaaaaaattatcttgaattaatttttttctaataaaaagtaactaattgatatattatttacatcaaaagcaaccaaaatgttgtttttttttaaaatttgcaaaacactgaaatttctggaagcgagattttttttatttttttcaattttcggtaattattttatatttcggtatttatgctaacgtggcaatcgatatttgtgcaaataattttcttaaaggtatttttataaataaaatcaattttaggtataatattgaaaagaccccaagatatattgagtactatagtacgtaactaatttagtttagttagtaccggaccgtaaaggtaaaggtaaattttttaaaaaacctttttaaaaaaaccggtaaaaaggtaaaactaaactttaatttaattttttagtttttagtaattaaattaaaattaaatttagttaaggaaaagtttttaacttttttacccctttaaccctttttaaattttttaacttacttaaaaaaaaaaagttaaaaaaaacggaacggaacgtaaaaacgtaaaagttagtttggttacgtaaccaacctaaccttaacctaaaaacgaaaaaacgttttttaacgtttttcggtccgggttccggtaacc

SEQ ID NO: 213429 - DNA, 571 bp, Cannabis indica
atgatcagtgtaaaatgcagaataaaactgtaaatcgaacatacatgaagattggaccgaaatactttcaactgttaattttttgagctttgatcccataaactttggatctacaaatgaaaaccaaaactaacattagtgttggtattcagacttccaagctctctctaactctcttagaaaaagttactatttttcacagaataagtagtgagcttggacatcggtacccttcatttataggtgaaatttccattagtatttgtgctataataattgttaaaatattttgagaattaatttagaaaataaaattgtgtaatagaatattaagtaaaacaaaatttaaccatagaatattttaaattacttatcaaataactaattacatattttataaatcacatcaaatttgaaatttgatttagtgaatataaaatattctaatattcttccacttagataacatttaaatttaccatttaagtccaacaattatccttattaaatagtaaacatatgaagtatggcaatagatcctcattatatgatgagtattatttttatatat

SEQ ID NO: 213430 - DNA, 853 bp, Cannabis indica
aataaaactgtaaatcgaacatacatgaagattggaccgaaatactttcaactgttaattttttgagctttgatcccataaactttggatctacaaatgaaaaccaaaactaacattagtgttggtattcagacttccaagctctctctaactctcttagaaaaagttactatttttcacagaataagtagtgagcttggacatcggtacccttcatttataggtgaaatttccattagtatttgtgctataataattgttaaaatattttgagaattaatttagaaaataaaattgtgtaatagaatattaagtaaaacaaaatttaaccatagaatattttaaattacttatcaaataactaattacatattttataaatcacatcaaatttgaaatttgatttagtgaatataaaatattctaatattcttccacttagataacatttaaatttaccatttaagtccaacaattatccttattaaatagtaaacatatgaagtatggcaatagatcctcattatatgatgagtattatttttatatattacgatatatttattacatatcatgtacttaatgtggcactatactaaagcaaataaatcatatgcttattctggtcctatgaagataattttctcatatgaaataaaggtgcacataaatatgacaaaatatcgaaataatagtttcattaaataatttagttgtacaacaaaaactgcgaaagggaaacttaatccatgttatttatgaattttaatttatgttgcagctgcaatcattcaattcagtgttgtgtgcttaatgaccactcacgcttattatggctaatacttaatgttaa

SEQ ID NO: 213431 - DNA, 728 bp, Cannabis indica
tcaaaatttgttgttaattataactttagcttaatcataatatttttaattttataataattctttaaaaatatcataaactttttctatttttcttttaaagatattttttcggtaaccgtaaaagataatagctttacaacaacaattctttaagaaataagtagttttttttttaatttattttattgtttaaaaaggaaaaatattttttgtaatggcgttacaacagtgattttttaagaaacgtaagtaattttttaattttattgtttaaaaaggaaaacaataatagaaagatatttttttacaatatgtggaatggataaaaaaactaattaataatagaaatatttatttttaaatatgtacaataaatttaaattttaaatgcaatgttaaaaaaaaatactaggttatataaccacatttattatattatccaccatcattctctagttgcccctccctctttttctcttaaattttctgtctcactctttctttatacatctttattatattaaatgtgatttgttaacatataaacagttgttctattttaaaacaatacaatttaaattcattacacataattacactaaaagtcaattttgtattactgaaattatttagttaaattacaatactgtaagttatttatcttattcatcactattataaataaaatcaaactctctaagtattgatgattgttttagttcttc

SEQ ID NO: 213432 - DNA, 555 bp, Cannabis indica
tttctctttttttttttttttcatgatatgtattgaaactatgagagaattaagaggggattttggctaaattgataacacttcatattctataaaattgatgattaaagtatattatattataaaattatggtaataatggtgaatgaactatgatatttcatggacacatgaaaattcatagatatataccaggtgaatataatctatatacatataatattttctttgtctttaaattatgagattaaagaaaaaaccaaaacctgtttgatataatttgcaatggattgacaatcagaaacttcatgaagatcaagagctttgtaggctaactccataacatggctttgcattgcctctgtcatatctgtctcacgcaccacagcttttccctccaacatcttaattaattggaaaaataactatcaatatactgcaaacttaatttttctaatgttatatatgcctataaaatacacaacattatatatatatatatatatatatatatttatataaacacacacaaacaaattgtcatgaaggcaaaat

SEQ ID NO: 213433 - DNA, 587 bp, Cannabis indica
gtgtcattttgtctcttggtcacgggtgtagatgggtaattttctttattggaagcagttgtaacaatagaagaggtggatactgacggtggagttgcaatgtgaacagcagaggaggaggcagatttaaatggtgatggtgttaaagttggtggataagtggcaatgggaaggaaaggcctagaagcagatccaatatcaggagtaaatattccaggcaaattggtgacagagaggctgtagtcggtttgcatatcagagtgtgttggtgatgttggtggaggaataaatggtgaagaagtaacagtgtgttggtgatgttgcatagcaggtgcaggtcgatgttgggaagtgattgggattggtgggggcttgttagaatgtaggatagtggaaggtggatgcagtgtggagtttagtgtagacagagggatagttgaatgagagtagttggtagtagggtgactaagtggtgtttgggaaatgattggggcagagagcgattctgcagcagtcagatatgggggctgaggggggccaatggtgtgcaaacgggggattgtagatgtgagagtggtacgggcaag

SEQ ID NO: 213434 - DNA, 649 bp, Cannabis indica
cagatactctcacgagtcatccaggaaggaatagttaaaaaggcgagccatcctagttggcttccctctgacactaaatcttgagaaatttgttgctttgtcctctcggtcaagttttgaaaaggcacacaacaaaaaagaaagcacatctttccccaacacactactttgatatcttttcctcacaaattacgacacatgcctaacacataaaaatttcttcatgtcatctttcaaattgatttttgaaaaaagtcagcaaacaatttgtatttcataacttctaatcttttatgattaatttttgtttttattttttattatgtctttattttcttgcattacactacaaagcttgccacaattacttacacgttccaacttccacaataatgagagtaaaagcaacatcatttttatgttaataatacatttaaagctcaaacgacatgaaaaggactcttctttcttcgggtctttttaaacaagaagaaaacataataaaaaaaaagctgaaaaatcacaatacatggcatttgccttttttctaaatgaaacaagatatttacagacaattgggtcctcatccatgactgacctaaatgtataaatataaggtcttttcttaatggttagtatgaacagcagc

SEQ ID NO: 213435 - DNA, 1185 bp, Cannabis indica
gtgaccaagatatcatcaacatagaccagaaaaatgatgagtgaggaacccgatccatgaacaaaaagagaagtgtcagacttagaagctttgaaacctttctgcaataagctgattctaagtgtgtcattccaaggagcttgtttgaggccataaagagccttgtgtaggaggcagacatgatcgggtttttcttggtcaataaagccttgtggttgagtcatgaagacagtttcagttaacactccattaaggaatgcattactgacatcaagctgagttacagcccagttggaagtcacagccaaggatagaacagtacgaactgtaactggcttcacaacaggagagaaggtctcctcataatcaatccctggagcttgtagataccctctggcaactaatcgagatttgaatctatccaatgaaccatcagcattcaatttaattctatgtacccacttgttatcaatgatatgcatatcggatgttctgggaactaaggtccatgtacctgcctttttgagtgcatgaaactcagtttgcatggagtgtagccatctgtgatctttgagagcagcctgtatagatttaggttcagatggcagcaatgattcaggcagaggatgtttggtggccaagtatgcttttggtttaacaagtatgagtgtttggtggtgctatggcagtagtgatttctgtcatgacagtaggaagaatagggattgtgtttggttcagcaacagaggtgttatgttctggtatactgggcagagtggaagctgagttttctagtatactgggcagagttgttgatgagttttctggtatactgggcagagttgttggtgaattttcaggtatactgggtagtgtagttgctggtatatggggaaaaggttctgtttggccagcagaaggtgccatagcctcaggaacaatgttggaaaacacagcagaaccatcattagagcaaggtttagtaaaaaaacttgcagtaggagtaaaagctccaggagttacctctgtgatgttgctgatgggagacatgccagggtatagaagctcattaaagatgatatttcaggctatgaatattctcccattctggtttcacacaaatatcctttatgaattggagagtaccccaggaataaacattgctcagacctgaaatctaactta

SEQ ID NO: 213436 - DNA, 686 bp, Cannabis indica
tttttttcattgattatgtatgttctagttttttaagattattttacaaaattttgataaattgggaataatttaacataccaaaaatagagtttaaagagtttgttgcacgtgtaactcttttattttatatgtatgtgaaataaactatttgaacattattttctacatagtaaattattctaaatttcttaaaattttgtaagatgtcttaaataattataacgtatatacaactatgtaaaaaattagactatttttttttttagatgtcgaaacaaataagaggtgcatcaatgtacctctttttgggatgcatagttacaatatcatcatttgtaaattttgaaaaattctgattagtttacaatatcgaaaatagagttcttgttttcaaaaaacttcaaatctatttttagaactgtaaactatttgaaactttttaaaaatttattgatgttgtaactataacgaacactaccataataaaaacattctgacatgtattttcagacataaaagttaactaaaatattgtaaataaaagttaacgataacactcctaaaaaaatatataaaataattaaaaaattaaaagggctccattggagggatgagtgccatctccataactccataactccatcctacatctgtttgatattggaatggaaaattgttgccat

SEQ ID NO: 213437 - DNA, 613 bp, Cannabis indica
tttttttaaaaaaattaattacaaaacccaatttcaacggtccaagttggagattgggcctatatttaaaaataataataaaaaaaaattgagtccaaaaaacatcccagcctctctctttcttaaggaaatagcattgtattcttattttattttacattttaatttttactttcatacaaacgcacccctatgccacttgagcaaacttaagtaagaaagaaaaaaaaaaaagacatattgtacaaaccactcctaaaagcaagtgcattttaatgggggggtttttgattaatggatttttctctatcttcttccttcttcaaccctatacagtcagtacccttctttcattaactaaaaaaaaaaaaaaaaaaaaaaaaaaccaagccgcacgcctcgttcgtcgcacagccgccgtcgtcctccacacctttggtaatttttgtttttagttttgatgattttaagtaatttagcttcaataaagcaaaagaaattaattctttgaagctttgtccaggtcaaattttgattattgattctttgatttctgttgatcattttgttgttatgattttgtagtggaatgatacgatatgaagaaatctta

SEQ ID NO: 213438 - DNA, 971 bp, Cannabis indica
ctactgaaattgaagtggattccttggagtttagcttgtgatttcagcttgttgctctaagttgttaggtttgatgttatgtggaattttagctcaatgtttggagcttattttgaagttattaatctgatgtttttcatgtatgttggttgtggattaatgcatgaaattggtattttaaatctctattttgttgagttataattatgggttataatttgtgagtttgtggaaattttggacatgttttggtgtgtttgggctgaatttcgaagctgttttttttttttttgggatttcctgagtttggaacccaggcgccgcggcccgcctccttggaaaatcttgggtttcaacacaggtgccgcggccccatgtggggagtgtcgcggcccgcccccttgtttttgggcagattcgaacgcgatatttgaatatttataacttttcgattcggactccgtttcaggagttctatatatcgttggaaagctctttctgagctctatgtgattatctagaatttgaatacgaattttatattctgtggaaatggatttagggattaaccatattttataaatcccaaaaattgtgactaggattactgggacttggtcaggagcacacagagatttggaatctccacgtttgcaagaccttaggtaagacagtagctagcacgtagagttatgcgcggtggcgcttatattgaatgtgatatttgtgagtaattagaaactgagattagggttattaccctaaagtgagcagtttattggcctagagttattaccctagtaaattgttaatgtgcaaatgttatgccatgatatttatatatattgagataaaagaattatgcgttcaaggcataatcgagttggactctgtaaccgagatgaaccgttctaaggccttttgtatttagatgtgtgagtgtagcaagtgggtctatgccacatagacat

SEQ ID NO: 213439 - DNA, 976 bp, Cannabis indica
aatgcccctaattcttgtagtggcagtctctatttggtctacgtcattagttatttttatttgaaattaaattaaatatatttataagaaaagattataactgtgacctatacattactacaaaaaaaaggctatctttagtgacaaatttttaatcacaacataaagttttttgtgactaaatgacttttagtcacaataaaaagttacttgtgactaaaacataatatttagatacaagttgtcaataatttagtttagtcacaacaaattgtaatatttgtgactaatactttattcacgtacttttaagtcacaacgtaggaatgatatttataattagtcacaatttttttacttttagtcacaaagtcttattgtgactaaaagtaagattttttgcagtccattaatgtgttcctgaactttttagtctgttaaaaattatcattgaattattcacaatattgtaaattgttctttcttttaagtttgatcacacatgagaaataaaatgatgacatagctgcttagttagttatcacatgagtgttatgtcaaaaccacatgtgtaattaatttttaaatttatttttacattatttttttaatcattaattgattttagtttaataatttttaaaatatataatttttatccctaatgtgacaattgattaagcaattatgttattattttatttgtaaactagacaaatgatcaatttataatactatgaatagtttaaaaactatttgtaataggttgaaaagttcatgagtaaaataatgcatatattatagtttggggaacaaaaatcttaaatagccataagaaaataaaatgtggataataacttaacaattaactgtgaggtattcacataaattttaaaaatataacttaaatattattaccgtaaaaaatttaaatttatatatttattgcaatagagagttaaatttaaatatttat

SEQ ID NO: 213440 - DNA, 1005 bp, Cannabis indica
ctttgtgactaagaactcgaagggtgtgtacataaggttaagaagaactgcgactgttggtgtatgtacaaagagctctttagatctctaccatcagagtttgtaagttcaatatttttatattggattagtgatgatagctctcagctggagtatggctagggatcaattcgatctctaagaccataaccaggataaattcttgtctttcttattgctttttaattttctatttaagttagattcattaattatttgtatgagtgtttatttgattgtgtttgatctaagtaggtattagatgaatctagctaattgttgtgtatgaatttctaacaaattagtaaaaattaatactgtttattttgattcttgcaagtcaagtaataaattaattatctaatgagattcaacaatctaattctgattctgatttaatagtaagtaaacacgtcataaattcaattgtaaaaaaaatgaatttcccttaatttttttcctcaattcatgattaactaatctaaggtagaattaatcttaattatgattatcaaattagactcttagaatcgtggagaaattcgctagctatgcctcaagacaccctaacccataatcgattgatcttaaatatgaaatcacattgtgtgaaacagcattgtatttgtactaattgttctatatattatataatatataaaatagtttgcaattacataacatgtcttctaacctaactaatctatattgagtatatcactcttataaatattttcctttgcggacctaacaagcccatttcatccttgtggttaatacacacacaaggattaatgaaaagccaagaacatgcaataatattctttctttctttaattattattaatattaattttattattaaggttttgtgaaattgacatgtacctgattaaactgcaatgtgtatctgaaggtttgttccttctagttctagccatactcaaaggcctaactttcataact

SEQ ID NO: 213441 - DNA, 475 bp, Cannabis indica
ttgtaaattctagcaacaagagactcattgtttgtgattaacctccatccttgttttcccaagagcgcaagattatgatctctcaaatttcgaaagcttaaacctcccatacttttatgttgacaaagcttatcccaagacatccaatgaatccctttttcctttgtatttgacgttttccaccaaaactttgccatatgttgctccataccatggctaatgtccaaagggagtagaaacacgctcatagcataactgggtaaggcttgagccaccgttttgattaggacttctttccctactttagaaagaaatttagaatcccagtttaaaacttgcaaaaaaccttcaataagattccttggatacctatttccaccatgtttatcttcttgactcactatgttgttcaaatcgccaatgatacaccaaggataatctaaccgtgttttgagctcacggatcaagttccagg

SEQ ID NO: 213442 - DNA, 589 bp, Cannabis indica
aatagtgagattattcctattgtaattaaatgacctaaagtatagattgtaagtcatggtatcttgtcttttgacatgcaaagttcgtattggttttgagtagggttgttcatataaaccgaaaaatcgtggtttaaattcggaccactacaattcgaaccactgtaaaccgtaatcgggaaaccatttttgatcgtttggttcggttgcggttcgtaataaatagttaacggttaaaccggaccggaccgtttataatatataattaatttatatatattttatatatgactatatgtataactttgaacttttttgtgtgccaaattttttattgcatgaattttagatttttatgttatgtataacttttgagaatatttttatatcgttatttataggttatagatctgttacttatcatgttaaatatatattttgaaaaataaaattaaaaacttagtaaaaatagtacaattacttaaaaaatatgaataattataaattaacttaaactgtagtttcaaaccaaaccaaaccgttcttaatggtttggtttgagcaatttttttggtccggtttggtttct

SEQ ID NO: 213443 - DNA, 1484 bp, Cannabis indica
gcaaccaataatagaaaaagttaagtacgtttctctttctttaaataggtggaacttaatttaccaagataaaaaaaaaaaatcagataagagtaaccaggtactcttatggtaatcagagggctaaccaattaccaggtaaccaagtatttatagtgttttttctgttttttatctttttttaaaaaaaaaaatcctatatatataattttttgataaaaagtcacatttttacaaacttattctttaaaaatcataaaaataattaaaaaaaaatgtaatttcatttaatttttatttaaagaaaaatgttattaattgtgaaaaaagttgttttatagttgggccattgtggacaaacataagatccactcaaaattattgggccgaactcttgggcccaaaggtatatttcacaatatataccacttttatggaagaaattagtgatcttgtaagagtgtacaatttcttataaaattgtttcattagttttagaaataaattcatagttttatgaagtaataatattcttaattaactaatattttttttaaggaataattaaccaaaatctgatttttgttggcatgtgctttaccatgaatgaatcaatacttttttctgacaatatatatgtattcttacaattgattaattatttaattttgtgatgtacattatattttggaagatatgattgttaataaacaatttagtatatatttgtaaaatcacaaaaagaattatgagaagaagagaaaaaaaaaaggtcaataatttgttatacttttaaaaaataaattattaattattactattgatattcataaattcaatgaactaatacaattttaatatcaaggttttgaacatattaaacttgtattattactattatttaatcattcaaacattaatatagtatatattatagactttttcatataaaaatttcttgaagttaaaaaaaaaaggacaaaaagcaatttctaaagtcaattttataatagtaaagctctctaaaacgaaattaaaatataatataaatattttcacaaatttccttacttaacttgtgaagttaaaattagaaaatttgagcaaaagtgtgatcttaatgaaagacaagcttcacatatattatttttcacaatttatacgatgcccctttaaaagaattgtaccgatacattcatatcagtttagtttgagagatatttttagtccaatttttttctttttatttttttagttgtgtacattataattatttaaaacattttgtaaaattttaagaaattcaaaaaatttaacacgtcgaagataagattcaaacagtctgttgcatgagtgactcttttattttatacgcgtataaaatataatgtttgaacactactttgtacattgtaaattattttgaatttctcaaaattttacaggtgtcttaaataactataacacttatacgactataaaaa

SEQ ID NO: 213444 - DNA, 558 bp, Cannabis indica
agtagttttcaagtcactctccactatgacaaatatgaaataatttatttatttgattatataactttttttttaaaaagaattgttaatcggtttattcaagttgtatgggatgagttgaaatatttttaccccactcagtatatgttgagattacaaaccgtttaagctgaaactaaaccgaataaactgataaaaattacaagctgaaaaacgctaatgaaaaaccaaatcatccaatttgcatatattatcggtcatatattaagacagaccaagcctctacctaaagtccacctactcaaactactcaaaaaaaattgttttttttttctcaaaattatacatcttttttttttggttctttcttaaactaccatatgttctttaaatgtgggttcaattttttttttatttgttcccaaataatgtcaagttggcccttcattgaaactgttttttgcaaatatagtactctttggataccgtataatatcttgagaatgtaaatatagacatgtttatattacatggtacaattattaagacaacactgat

SEQ ID NO: 213445 - DNA, 667 bp, Cannabis indica
gacgtattttatattatataataaaatatatgaaccaattaattaaaatatactaataacaatatattatatttttaagccgcatttaacatttgtagctatttttctcacttaaatagtgcactttatagctaggcgcgtaccacccctacatatgtcaaaacatgaaaggttaatgttgttaacttgttgattataataaaaagagagctcgtataatattaataatgtatgtatgtgagaatttaaccgagaaagaatctagagaagatgagttttgagactgcaaattggatattgattttttgttccttttctatgtgacccatagtgagaatctagtcatttttttgcctgttgttaaggaaaaatgttaatggacaactgaccaatggagttaaaaaatcacaatgcggccgtcttggtcttcccatgtttgccagttactatgtcggaatttattaatttaattaaagctgttcatttaagttatatcatttgtaaataaataattacaatttattgagtatatgctttttaggatataacttgaagatctaataaaacaaacaaataaagaacgtctaatagtgatcatatatattttgtggtttagtggtattatgcaagcaaacaaggtacaaaacaaaactggaatttagaaact

SEQ ID NO: 213446 - DNA, 1037 bp, Cannabis indica
ctaactcttcttttaataccatttcaggcagagcaggtggaaccataccaaaatattttctgattttggtgatgaggaaacggaaaatagtgagttagagtacatggatggccagacagtttctggcaggcggggaaaggcttcctcacaattaaaatctaaagcatctttacagcggtcagttgtgattttatgctgttaatattttggtgtatgtaaagagttgttattttcaaatcagagggttggtaatacatcccaagaatgttattttcaataaataaaggatttcagtaaagtacgtccaatagttgttattttcaaatcagagggttggtattggtaatccatccccagaatgtttaaactgacaattaatgcttagaaatttagccagtagagtctgcggttttgttaattcatctttggcaagcacaactgcgttattaaaaatatttgtgtagttggtttttagattactatccaaatgatagaattccatatagttgcatcctctcatcttgtaatcactttttgactatctgatctttccttgagacctaatacttattaattacttatttttcaggtctagagctagagggaataagaacttgccagggcatttggttggtcaaatagaagatgacgagccacttgacttgcttgatcgacaaagaacaagatcagctcttcgatcaacagaaaacctgaaacgaaaaaatgtatcggacaatgagccagaatttgacgctgatggacgcatgataattcaagaagaaggaaaccagaaaatggaaaaatcctttgaacctgaatcggataggaagagtgaagcaggtagtagacggtctgcaagcacaagaaactcagaagcggcagagacatcagactctggatggggcttacacagggaacgagtatgctaacagaaggctggtggagatttgcagaagaaagacaaactgaaccatatgcactattggccacttgatcgcaagatgatgacgccgcagaccagaacatcgggcatctgc

SEQ ID NO: 213447 - DNA, 820 bp, Cannabis indica
aaattttcttttgttttgtacaaaaattagacttcgttctatacacaaattaaaattctctttttgtgtaataattttttaaataattaattattttgaaatgatattaaattatttttttataactacaagaaataagtatgtagtttttttattcaagtttgaagtggttttattttttggggaatcttcacattgttttttgactctggtgttatttttttaagtaaatgactctttataaaaaaaaaaatggaggaatttagctttttttttttttggaaaatacattcaacctattttacattttactttttaaaaatttaaacaaaaaaaattaaataattaagtgtaataattttaaaataaagttataagtataataattttttttttttggataaatcagaaattcattgcaccacaaacaattttttacatcctaaaagcaccttaaaataaaaggccttgaataaacttttctattccagctgctgctgtacaaacatttaataacaactatacaactttataaactctcaaaccattctctatcttgttgtgtaatttttttcggccatatagacaaaattctgcctttaacaaaccatttaacttgcttgaaaacctcttccacaccagttttttttttcccccccattgatgctcatttcgggtctgccagattaaagtagaccaagggctgctaaaccagcagccttcactttaataatttaagggcaaaaaaaaattctaaaaagtttcttctgtaataataaattatgaaaagttaattaataattataattaatttaatttt

SEQ ID NO: 213448 - DNA, 504 bp, Cannabis indica
gtagtggtggaggaatgtgacgggcgttaaggcacagtagaaaaatattaatatcaaaaccatttgttgccttgtcttgcacagtacgaaaaaggtttgaaatgcattacaaacccaacaatactttattttaactattttttttttaaaatgacactaatttcattgaaatttaaataatatagtaataaaatcaatatatatgtacaatcatctacataaaatagtcaatatttatagggctggacgagattcaattcgatttagttgaaccgaaccaatctaattacaaaaattagatatccaattacaattagtttgacttggatgtctaattgaattggatcggctattaggtgttaatttcaaaattcatcaggttttcaatattaataatattttgtattatttttttctttcctatttttaagtttatataaaaaaattgtgtgtaattggatatttaattacaaaaccaatccaaaccaaattagtaattagata

SEQ ID NO: 213449 - DNA, 529 bp, Cannabis indica
tgcacaattacatcactaatgttcttcgaaatagtgtcaatcgaataactacgctcaacatataaccatatgagactcgggcaagtccatcagctacacggttagcagaacgtttaacaaagcgtaaacaaacatgattcaactctgaaataaatctcttgcaatctacaatgcaacagccgaacagagagttcgtgttcaccgagctacggacagcttgaacagttaagaggctatctaatactgcagtgacatgagaaagcttggacgcttttatccaacttaaacctcttttacaccaaaagcctcagccacggccggattgacacacccattccaagaccccgttctcgcctggaagacatgacccctagaatcccggagaacccagccataaccaaacttgtttctatccgcaaatgttgccgcatccacattaatcttgagtttatttacctctggagcacaccattgctcatccccttctccactatgcattaaaaagaaagagggagtgaaagttttttct

SEQ ID NO: 213450 - DNA, 844 bp, Cannabis indica
ttttttttaaaaaaaaagacattttagtattgtaattttttcaaaaaataattcttcaggtctaacaagaaagattttggagaacatattagatctgaccaaacacgcagataaggatagtttgattcctctgcattatgctgtgatgcctactccgagtaataatttggagattgtgaagatgttgttagaaaaggatgaaagcagtgcctatttcaaagataaaaatggcactacagctcttcacatggcagcttctaacccttttggaggttatgaaatagtgaaggaaattctttcgaggtgtccagatagctatgaagttgttgatgatgaaggcaagaacttgctacactatgctgtgaggaaacaatctccttccacattaaaactcatattagatcattcttcactactcaataattaccttttaaatagaaaagataatgaaggaaataccccattgcttcatgtgtttgccacttcaacaaaatatacagaaaggaattttgaagctttgatgtcccacccaaaagtgaataagatgttattcaaccaacaaaacaaaaatattcatgacatagcccatgatctctataatgttcattaccatgaattcaacaaggtaatttaatttcaattaataagttgatttttttttttctcatgttcgattttatttagttggtgtcaacagtattcttagataaaaattctactgttgttatatgacagagagaattatcaaaaatcttcaaagaaaccccacaataaagagctgtttgagaaagtcatttttcaaagacgacaaacaaatattgacggatactgagaagagaaaagc

SEQ ID NO: 213451 - DNA, 479 bp, Cannabis indica
aagagacttcattaatcaagaacaaaccatccacgtacaaacaaaggcacagccaaagctgcccacaaagaaactaaatgttacactttaacttgccaagaaaaatcctttcgtctaaggctagcttcctgttataaacatagtataatctataaacaacaacctgtttaatctctttaactataacactaacaagtttagagtagccttcaaaaatacaaatgtttcggttagaccaaatgtggtggatacaagcagccaatgtagctgcaatgacagcagcaataacaccggacttcttgctagccaaccaagtagtccaactcccaaagtctctagaccaagcagaaaaacccagccaagagaagatagcatctgtaactttcctagaaaagtctcatttaaatattattttttttctttgatatatatttttttaaaaagaattttctgaacaaaaataattaatggttttcttt

SEQ ID NO: 213452 - DNA, 524 bp, Cannabis indica
ctctctctctctctcattatttctttctcttgagtgttcatttcatcatggctgttagctcgagtgagatcaatggagacgatgaaccatcgtggccgttaaaaagaattgtaagacaaatattatattataatttttgggcaacaaaagaatcgttgccagagctcgtagaaagaggtataggcaaactgctttcaaatatatataatatttcacatgtttaccaagaaaaaaagaagagggaattttacttaaacataatttcctttgttctactttgaaactaggaagaaatattatacctgaaaatctctttctgtcatttaatatccactttctgttaataatctttgaacactttagtttaataaagtctccaatcaaaagttggcaattattgagtaattgtatatgttacgagtgagacaagccactattataataactcatactcaactgaatggaagggaagctgactcaataaacatgattaacagaaatagaaaaagtagtagtacaccaaa

SEQ ID NO: 213453 - DNA, 515 bp, Cannabis indica
aggagttgtaccaccatgtttggccagccaaattgagtccataggtcggccaagatgagcttgtatggttggccagggtttgagcataagctgtccagccaaaaggtgactttcagaccaaggaagcctgatctctacaaggaaaaagtgtacaaaggctggcctccacctccaaaggctgacctccacctccaaaggctgataaaggctggcctccacctctaagggttagcctccatctacagaggttggccatcaccaaagttggacaacacataaaaggaattggccaactcttgacaaagatggcaggaacatgacctgtaagattctggcaggcacatgaccgactagactttggtaggcatatggccggccaaaccgtggcaggcacatggctggctagaccctagtaggagcatgatcggccaaacctcaacctacaaacattgtatggccagcgagcctacatcctgcaggtgcatggctagttagcttttccctggcaggagatt

SEQ ID NO: 213454 - DNA, 1279 bp, Cannabis indica
tcatggaaccagagaacacacacccagagactaaaaagaaaaattcccagaaacccatgacatgaaacacaaccttgtagaaagcaaagcaagtacgaacaaaggaggtacgatcttcaacaccaatgccttttctagaaacttccacaaatgggggacttgttttcccaacaaatataagaaaccaatgaattagcgacctccacagaaggcaacgacacgccagccgagctcagattcgacgacaactgaattgcccagagtaaagggtcgcaacccttttgctgagccaccttggtgagctccatgacactgtgacagagactggtttcgacggagaccgccatgactgagctgagtttctcccagattgattaaaccaaaaccccctaaaaaaaaaaacaaaagaaatacaaaatgtttaatttcgggtattaaggaaagatatatagtagacgaagttggtaggcgagagatgaagcaaggatggtgagagatgagttgagagcggttacgacattgttgggtggtttgagtgttgtgtttttggtaatggtcgaagaattcgatccataaaaattgaaagtcaaactcggaaactgtgctatagtaataatcaatatcactgctagttttttcaactatatatttatatattttttttaaatttagctcctttggtactattttaattttttagtattgaaggagataaatttataatcattaaataaagtaaaaaattacataatatgagattttatagcaaagttataaaaatatggcacttacaagtttgatattctttgatagcattttttacatttaaggctttttatattatttgatatatcacatttttataagataagttgaaaactactattttttattacatattaactaaatataattccaaaataattttaattgataaatactttcttttgtagtcaaagtacaaaatataacttcacataatttattaaaattagaagaggaaatttcactttttggccttaataatacaagtcatatcaaaatttataccctcctttaatttgtacaaatttagtccattgattacatgaacttcccattttaccattttttaaaaaaaaaataaaaaaaaaattggtaaaaaccaaacggtggtgtctttctctctctctctcttccctctctctcgtgcaccactctctctctctaagtaaaaaactagaaaaaagttactacaaaaaatttacctctcttctcgtccgtccctctctctctcctc

SEQ ID NO: 213455 - DNA, 1320 bp, Cannabis indica
tgatgtttatgaatgggaagaggaagtcataaatttagtcttaaaaaaactaggtaattaacattttttcttttgcatataaatcatgttatatatatatatatatatatataaatatgcaacaaatggaatgagaaataatacgtaataatgtatatgtgatataagagttaatgtatcaaaccagtgttgttatcatcatgattattaggagctttttcaagtggttttgtgagaattattaatgagtctgttcccttcttggtgatgactttatcagaattatttgttgaatgatttcctttagagattttctgatcaagtgaatcccttccttctataggcttcacaacttcaggagtagtgtttgttgatgatgttgtggggcttaacatgattggactgcctcttgtctcctcgattctattatttcaacacgggttttcgttgttgaggatgatggtgcttgtttttatatcggtattcgtcgtcactgtattttgaaggattttctttgatcttctctacaactactttctttccattcccatcattttttcctcccatcatagttatatatccaatataacaattttgatttttttagagcaaggatatttgttcaaatgatatgtattatgtgaagttttattatatgtaaatatatatataggtagctccatgattatgatcaggtaattttgttgttagtttttgtatcccaattattaaatattaatgaaatgtaaattattgattattgcatgtgtgtgagagttaattctgccacctacgttattagattaattattagtcaaattaacagtacaaacaaaaaaatattattacatttttctatttacaaaacaaaaagtggtgttatttttagtgctaaatttgtggtcagtattagaaaattataattaatgttaaaaagtattaattaattgcataaaaaatcactatatgcaatgacggacctaaaatttttattatatggaggcttaattgttataaaaaaaataggtgtactttattgaatttatttatttttctgtagatttttttttaattttttgttactattattatcaaatgaaaagaaaatattaattttttttaactggggtctatagcacccacactattgcgagtctctcccattgactatatgtaatgtacgtaagtaattaattgtgattaaattaatttttaagtcaactagctatatggtggaggtttttcactttttcaagactaattaaataaatttttgagatgatgtttgcttaatttagtatttagttaggtatacgtccg

SEQ ID NO: 213456 - DNA, 524 bp, Cannabis indica
cggtagtttgattatttggaggcctgattatctatcagtttgtttgtttgtttacttgtttgtctttagtttttagtcttactcgagggcatgtaagaatctagtttgggggaatatgctaggctatttttagcctaagttttgggtgaccttttgtagttgtttttcttctttcttattacttttggaatagttttacgcttgcttttctctatttcaggttttcgggtttaaaataaaaatttgtcaaatatcaaaaagcggtggcctataaaatagtgaaaattttgtgagaaaataaagctgaaacttcaagcctaaatttgactatattatgtttagatttcgggaaaagtcaagacatagaagctttaaatttcttttttatctttccaatgcatccatatttagcttatttggagttcgtatgtgaaagttatgtgcattttactgagaaaggtcgaagcaaaaaaacgtgttgtcgccgtggtgaggtttttggtggccgcggcgggggactacaa

SEQ ID NO: 213457 - DNA, 778 bp, Cannabis indica
ctgggtccgagtccgagtcagggtccgagtccgggtctgggtcagggtccagcttcgagttcaggtcggggtccgggtcggggtccgatgtctgaggttcgggtcggggtcggggtccgggtcccgggtccaggtcggggtccgaggtttgaggtccaggtcggggtccgggtcggagatttgtgttgaccccaaatcatttgtaaatattataatacaagctaatatggatcatttattatgtattaaataatacaacatacattgtattaaaaaatttagtcgtaataattaatacaatacattgcttaatgcaaacatagtattatttattatttagtataatacgacccttatacggcgtaccaaacgagcccttgatgatttttcccccgaactttaacgtgtactaaattatattcctttaattcaagctattaaaaattctttttgaactattgagatcgttagattcaaagacttttgttcaattttaataatgacaatcagacatggatgagagttcaggagctacaatttagtacatgtaatttaacaaaaagaaaaggcattaaatagttaaataacttttacaacttttttttttgttatatgggtaaatatatctatatattttatgtatcattttcattaaataataataattataatattggattgttcaggatcaaaattctgttgcacttatacaacaacaagagttaattacaaaaaaataatgaactctattgtaatgctgattaaattttttattatt

SEQ ID NO: 213458 - DNA, 1313 bp, Cannabis indica
  modified_base (1245)..(1245): a, c, t, g, unknown or other
  modified_base (1306)..(1306): a, c, t, g, unknown or other
aaaaaaaaaagaaattaagaaaacacaaaataatattatatatttttggtgaatttggcgcctctcaaaatgttatttcctggaaacaacgaagcaaacccttctttcttttccttttgagtattctttctttgacgtctgtggttcgattcctacaatctcacttatttccatttatttaatttcatttcaatgaataaataaataaataaataaaaactcttcatctcattcctaattattattattattattattattattatgttaattaatttcatttcacagttttatattcgacttccacttcacgctgttgcatctctctctctctctctctaaaacctctctctcattcttcttctctctactctctcctccctccatggattctcctcaccatttttctgtcgtaaaggtatttccagccacaattatgcatcaaaccctaagcttttttcactactctagttttttttttttgttgtttttgtttagggcgcgaaggttctcatggttggggcgggtgggattggctgtgagcttctcaagactctcgctctctctggcttccaagacattcatattgtgagtttttgtttttgttggagggttaatttgagttttgggtttttttttatttttttattttttggtttgtgcgagtgactctattggtattgggttttaggtttttggtttgtgtttaaagttcatttcttgattggttcaatttccctttgtggttttggtagggttttaatttttattattgttagtatttgggggcttgactgacgtaatcctactatgatagtcgggaaatttgatttgcttactgaaattgtcacttttcttttttcaatgatagctcccgctaaattgggttttgtatgggatggtcaaaatctaaaagaattaagtgaaagttaacttgaatatttgttttagtagtcatgtgtttgtagtgtaggagagactaattttcagccaagggtttagattggaagttgagtttatgatggtgggttgtgtttattcatgcctttaggtaattaacactaacagagttatgatatgaaaattacattttaccgttgagttaccagagcagaatagttactcgggttctgttgctttttaagctctctgtctggaggactaatttctttagacggattcgtacaccgaagttgtatttaggcaccggtttatcttcttgtttggtttatatgtgtttaaagntagaatacaagtgcactttgaatgcaaaaagactatagtcatgtaaaaaactgtttttacntaaaagc

SEQ ID NO: 213459 - DNA, 773 bp, Cannabis indica
aaatttatttatgtatatatatatatatctctaattctggatgtgcaaatgttctctaaaactaaacaaaaaaaaaagataatatatttttatgtatattgatccatatatataggctttaaactctgtgtgagactctcttgaattaattatagaggaattttcataaatatgagaattttcagtgccatttagttttttatggcagaaaaaaataactcaaaaaatatggaaaaaaaataaataatggccaaaaatatgagaaaccaaatagtatataaataggtttaatttaaaaaaaaaatcatatttttcaaacaaataaattaaattttctgatcctctttactattttctctttgattttctctaatcggaatcgtcgccatcatctccgacaattaatcgtctacaattcgatctcaaacgcaagcatttcacactgcaaactcaatctcacgaaactagaatatgcatcgattccttaacatatatcaactgattgacgacactagctgcagcaacaatcatcatcgccgattgtcttctccagctccagtgagtttgtcaattggttctaatcctcttctttactgcatgaacctgaaaatcaatgcatatataattgcacagcataaaacgataatcaaacagaattatacacagaaacacaacttcgacaacgattgtgggcataatcaaaaacatgtatatacactaaataaatcaaaaattatatatgatgataattatatatgaacatattatataag

SEQ ID NO: 213460 - DNA, 506 bp, Cannabis indica
tatatatatatttatatatctactctattcacttccaaatgatgaataaaaacttttctggctttattttagtaattattaaataaaaaagacatcctaatgcgaaagagttaatatctattcaaaataagaaatgatattgccacaaagtgtcatctagaatacgcatcaaaatcatttggaccacaacgtgcaaggataaaattagagaaccctaatcgggtggtccatgcacttttagaaattctccaattccaagcatgcgaaaaatatataaatatttataatgagcggaactagctagattacgttctaaaatctacaatttttattaattatgcctatattaccctatacaatagtgacatattgtcatcagtacttgcatctatgccacatgaagccataaataatagtagatttaggctatgtgagtttgaaattggtatggaaaataaattttgtttggtatggaaaattttaatcaatcaagtttctttccctat

SEQ ID NO: 213461 - DNA, 940 bp, Cannabis indica
aagaaaaatagtgacaaaaaacaataaaaaaaaatcccaactcctttacatatgaaagagcaaaatagactgagtcttgaaatgtggagaacacagcaacagaattctgagtgttctgaaattcggtttgaatgttcttcaagtatcgtccacttgcgaatggaacacaaagctcgggaatgtagtggtgatgtctctgctcgattcaacacaaaaacacccggcataagaataacacaaacaaacacacgaaaaggcaaacccaactatacaatcatgatcgaaaatcgaagcttacttgagatattgaagtgtcatgttttttaagagagatgggtgtcgaagaacaagacttctccactcttccttgtcaatcctcccatcatgttttgtatcggcttcctcaaaagtctataacaaacaactcagctattagtaggatgtaattaatcaaatggtttcagtaaggaactactaaaaacagaaagaatgtggtaggttaccttgtcgattatactttcaatgacatcgtccgataaattcatgccagattctgctagtgtagccactaccatttgcttcacctcttgcctttcgatgaagccttgctgtttgagatcgtacagctgaaacgagactgtgacagaaaaacagaatatgaaaatgtttcaattctcattctcataccgataataacagatgaaaaattctattggtttaaaataaagtacattcaatcttgtcatcgataggggcattggggtgaaagacagaaagggcacgagcaaactcttcgaaacctagtattccattgtgttttatgtcgaacaagtcgaatacctgaaatttaagagattatatagcacacagcttatgaaaatactgaaattgatgtcacattcagacaaagatataatattacccgatcagcgaataagct

SEQ ID NO: 213462 - DNA, 712 bp, Cannabis indica
catttgatttatatatttaatagaatatttatgtacttttagtaaaaatcttattattttgttgatattttttatacatttctatcaaaaaaaagaataattttactctaaatgcattagagcactattataaaatttgggttaaatataatattggttcatttttttagctcaaattatacatatccataagagatgataagaaaaatactaaaggaggtagtaaacaccatatatatatatatagagccggccctgaaaatatatgggcccaagaagaacttcatgcactaacaaattcaaggaacgagagatacccagacaatcataatgcaaataattatgatcttgtcaatgataaattttaacttttaaaaccataaattttaactaattgtttcactaatgtcatgaacaatatctattagaagattgatatattactggaaatattatctacacttctctcccatgataaggttcccagacaggaattcccatatggttctgaatttttcaacaggttgtttaatatttccaccaaagttttaacaatttaattattgattaatagttttttcagttgtttcgttcatttgaaatagaaggatacaagaatggattaaataagatcacttccatatcatcaggtaataggttaaaataaaaatattaattttaaaaaataattaataactataaatatcatcca

SEQ ID NO: 213463 - DNA, 1083 bp, Cannabis indica
ttgatgaagccatctgcacgatcgaggatgtcactcatagaatctactggtctgcctctttttatatccttccaaagttctttgagaacttcgatgccccccagtatcgcggtcaatttcccttcttcggttaaccgtgcaactttcgtcgcctccgtcatgaatctactgatataagctcggagaggttctcctggcctttgcttcacttcgaacaggtcttctaaatgcaataggagttggcgagaagaagagaaatgtgcatggaattccgaggagaaagccttccaagaattgaaccttccaggtgtcaacttgaaataccattgctgggcagcttccgagagtatggcaagaaaaactctacaacatacatctcctcgtactaccttgcaggtccatttgcatttcaaaaatatttaagatgtgataagggatcttccttccaagtatacatcttccaagtcggcatcttgaactcgtgaggtaactctaggacattgatctttggggagaaaaggatccatgtgctcggtccaactcaaggtcattgttcttctgaccggccagaccttggaacatattttttagtttgtccaactgtggttgcacggatggattaacttttttggtctcttggccgaccagagtcacgtcaggatctctttgagcgggattttgaacacgagccccgggctgagtggctggtgagacatatactgctcatctagccctctccttctgtttaaatcattccgaagatcatgagctatttccagtctattaaatacagatgcattaggttgtcttatcgactggttgatttgactgatcatttggccgaaaccgttaatctgggaagagttattaggtataacctctcctgacgaattactaaataaggtctagccacctaccgcttggcccacaggcagaacttgtgatcggggattgggcggcagactgttcaaggtttgagaagcgttcccagctagatcttcatctgactcgcccagcgggatgatggttgtaggttgctgatgagtagcctgataagctctttgtatcaacacagtggcctgc

SEQ ID NO: 213464 - DNA, 660 bp, Cannabis indica
cattgataatcaatttccttcaaaatttgcatttcgatttccttcaatcgttttattgaagcattgttgagaataatgttagagatttggagttaataaattggagaataccactcgaagcttggttcgaaggtcttgttaagctttgtgagagaatagggtaacatcacaaattaagagaaaagaaaaagaattgaaaaaaataatttcgcattcaatagcaatagaaagaacaaacaatttttttttaaaaataaaataaattaataaataatacaattatttcactatttaatttgagctagttttcatgaaaaaaaaaacctaattatttcctattttctatgtgttttaggctggaaaaggcatattataataacagaacatttgtaaatttattcagatttaaaagaacatgtttttttattttcatttataatcatataggaaactaatctgtattttaaaaataataataataattaaacacaaagagttggtagatcgatatatacattttcattgatgttaactttctttattattttattttatgtaatcgcaaaaagtaataattataatatattttctctctttaatagaaaaaattaaagatttcaccactacggaaatgcagaatataccacatattataatttc

SEQ ID NO: 213465 - DNA, 1147 bp, Cannabis indica
aaataaatttgttaaaacttttaataacaaatatcgccaaaaagtcgttgtagaagacacaggcactgaaaaagtcaacggaaaagtcgctaaaaagttattgttactgaaaagttacagtcgcatagaaagtcaacggagttgtgtcgtcgtcaaaaaaatcaccgaaattaaatctctcatatataaattaaaatagaatcgattttataatataataaataaaaatcagtaagaaacaataactcaacccggttaaaattaaaatagttacggttctatgacataataaataaaaacaaataacacagaataactcaaaccatatgtaattaaaattgaaccgattttataagataatgaatacaaacaaataacacagaataactcaaacaagttataattaaaaagtacagagaaaattagttcctaatagactgaaacataaaataaaaataaaacttgttccacaacaaattgagtaaagatgaataacacatgatatctcataaactggttataattaaagaaaaaatatggggatcaatactaaaaatattaaggcataaatctaaattgaaccgattccataataaaatagataatacaaaataactcaaaatattagataaagaaatctattatatttattaactagttaaaaatttaaaactagttccgtaaagcaaccaagataaaaatttactaacaaaaacaaattaaataaaataaataaattaaaattagtttcttgaattaactaaacaaaaaattagtttccaaaaaatctaaattaaaaaccaattccttgaattgattaaataaaaaacctgtttctaaaataaataattcaagagccattttttgaaataactaaataaaaaataagatgagacataaattaaaataaaattaattctatagcaaaataactaaaaacaaataaaacacaataactcaaaaactgattataattaaaaggaaaaaaaaagagaaaattagttataaaaacactgatacataaattaaaatagaagctgttccacaaaaaaaaaaaaaaatgaaaaaatgagtaaaaaaacaaacaataacttttcattacctttgagaacatttgtgagggtgacagaaagcaaggcactttaat

SEQ ID NO: 213466 - DNA, 811 bp, Cannabis indica
tttaaaaggatttggacatacaggtttagaaggttataagttggcgcgtgatagaacttagagagagatttaccctccggcaaggttcgtggaagtaaactcaataccatttgcagtggcggtagtacaacaaactggaattaaagtactcgaaagctacaaagaggcaatttcaagtggaaccaagtcaaaatgactttaggccatggatgaggagatggattcactctggaagaacaagacttgggttgttgtatcaaagcagagaacaagaaaattgtggagtgcaaatatattctcaaggtgaaagagggaatcaacgagaatgaaccagtaaggttcaaagccaggttagtggctaagggctttagtcaggtggaaggaattgactacactaaaatcttctcacttgtggtaaagtacaaataataagattgatactatctttagaagctcaaatggagttcaaagttgaatagcttgatgttaagactgcctctcttaatggattcttggatgaagagatctacatgaagcaaccatctgggcttcaagtggaagggaaaggagttgaattagtgtgcaagcctaaccagtccctatatggtttaaaatagtccccaaggcaatagaataaacactttgatacttttatgcaacaaattgggttcaaacgatcaacatatgatcactgcttgtatttcaagaaatcttcacccatgttcttattgctctatgtggatgatattctcatcatgagcaaggataaatatgtgatcaaaactatcaaagccaaacttaaaagagaatt

SEQ ID NO: 213467 - DNA, 524 bp, Cannabis indica
acccaattcattatgtcaagtgatattctcgtgtttagctagaggcaaactaacatgttttagataggcaggggatgaagaataaaaaaaattgtaatatgggttgagagaaatcaaagaagaacaacgcagaggatgaagaatcgttaaaaattgcaccgaagtttgggggtttgaatcgcaataaggggagctttcggttggaatgcgttttgaattttggttttgaattgcactaactaacgaaagtaattctctccgttaaagttaacagtaaaaagaaaaaagaatcgttaaaccaagaattgtcgttagataggcacttttaatatataaagatatgaaaaatggaactaaatatcataaaaaatggaaacaactaacactgaaacaaattatattaaaaatagaaacaactagcattaagagtgtgtgaaaaatagaaacaaagtatcatttgagtgtgtgtgtgagagagagaactagaaacaactaacaaattaaaaaatagaaacaactcatat

SEQ ID NO: 213468 - DNA, 500 bp, Cannabis indica
ttctttgagtgttgttcaccatcataaacgtgttaccaagcttccccttttgttggctctgataccaactgtcacgggccgactatttggacactccaaagtaggcagaacgtgcgacacttactagcacaccaagctagcaagccagcctaaacacgcctgtaggcaaacaagcttaatggttaggcacgatacatgtctcgcacatgttgagtgcaaacaagaagcatgagcaagaaaacataagttgtccccaatgactaatatcacacaacccacaagtaaacatataggcaaacgacacataatggcccaacaaaggtaaaaaataatcatcgcataggcagcatagaagcatatacaagaagtatggataaatatcgatttattataatatggccttgatagactaagggagtacataattgtgcccctattatgctggtgacaagttgctttctaagtcaccaagtcactccccccctaaagagcttaatggg

SEQ ID NO: 213469 - DNA, 544 bp, Cannabis indica
gctgcaaaatgcctggacacgcgcggacgtaaggaatccagccgagaaaactcagtgtgtgtaggatctcttcgagcagacgtgcagggtgcacacgggcgtgtgtagcaggtcctgaccaaggatttcagacaattcttgtctaaatccgcgcgcacatcctccttgtccgaagcacctggtgcgtgcgtgcaccaagcttcggcaaccatggcacccgatttctaaaaattcataactctctcaatttttatcggaatcaagttccgtaaagaccaaaattgcttaatttttcacaaggaatccaaataaaatatttttagaaacaaaataaaaatatttttatggaaaaatttcgtaaatcacataacatcatcaagtaacacataaaccaacatgaacacatccaaatcagcacaacatcgttttaattcatatttcatgaaagtaaatcattaccatggctctgaggccagttattggaattattttaccagtatctagatttattaacaagtatgtttcattaacatcctaatatgaa

SEQ ID NO: 213470 - DNA, 627 bp, Cannabis indica
tgtgttacttgcccctactatcaaaaaaaatttgttaagcatttctaaacttacaatagataataatattaccttacattttgattctcatgcatgtatggtcaaggaaaagacttcgggccaagtacttttgcagggccatcttaagcatggcctatatcacttggatctctctcgaataaatgtcaaccacactcaattcaataagaggccactctctacccttgctacttattaggggtgttcataaaaaccgataaactgaaatgaccatcaaaccgaccagaccgtaaccaaattttcggttccacgtcatcaccgaatttggcggtcggtttcggtttcggtttttttaacatggcggtcggtttcggtttttaaaataaaaaaaaataggttaaaccaaaaactgtcaaaactgccaaaaaccttctataaccgccaaaccaaaaaactgccaaaaatcgtacgatcaattttatatagttataatttctaaacggtcggttacatttttcgtaaaataaaaaccgtaaccgatcggtcggttataaaattataaaaaacgaccataaccaaaccgattttcacccgtactgcttatagttgcattaaagataatactgg

SEQ ID NO: 213471 - DNA, 662 bp, Cannabis indica
tcataaggagtatgagagctgtccatgatctttatagggagaccaaggaacggacgtccggagtaggttcttccacccggtcaggtggtgcccagtcttaaactttaataggcctttttgatgtgtggttgttatggttttgtttttttttttgtatatatgtccctcttttgctgcaattgttaggacatagagacaatatttatttgccctggccacggggactatatgtattagtaaatagggttgccaatccctttctagagattcattgtagtagattcttaggggttggttgcatcattgaaacatccagttccaacaactagtgtttcaacccttcccattagtcttaatcatctctcaattaatccagggatagtttcttgattttaccctttcattccttgagttgtaatgcttctttccgccacttaacctcttgcttgaaaaaatcacccatttagagttaacccaaagatggtttctttttgcaaaaaaggagcctttacaatttcctgtaccttctccatgctttagttcttctacaaggttgatttcgggagccatgcccatgattacttcagacttttaggcattcttcttgtcttagcccttgtcagcctaacattttaacaaatcacgcaacctgatggactaaa

SEQ ID NO: 213472 - DNA, 576 bp, Cannabis indica
acacaacattaattgaattaccaaatcttattatagttaaattaaaatatataaaactccatactttatacaacaaaatagaattatttcataaatacctttacagatcaacatttttatttttatagatttaaactttttttttatagaaatacagagttggttttttcacattgctaaaaatatatttttaaaaaaaaaaactagtgaaaaacttgcaaaaatatataaaaagaaaaaaaaaaacataaaatagtaaaaagaaatttaattttatgtggattgtgtaaattttcaaaataacaatataataatactacataattataccctttaatatttcacttaatctaactaccatttgtgatggcttcaaagaagaccactctcttactcttgagtccaccaaataatattttatttacctattttaaagttgaaatcacacacaaaacaatttcttttttcaaaattttatattatgctataaattaatttattttttcaacgtaatttatatattatattttaaatatatttttattcaattattttatcgtatatataaatataaat

SEQ ID NO: 213473 - DNA, 1165 bp, Cannabis indica
ctccataatctcaaatataatcataagcataattataaatgaaaattaaaagagttaaagaagaaaaactatatgtaggtgtagattctcatattcatatatttctcatcgtattttttatttctcttttttttttttgtaaatacttacaacttacaaatatttattctaagggaacagtgattttttttatcatcagttagacatactgtcgaccgatatagccaactgactcagagtcaaataatcgttggttaatcaccaatgaggagttaggaataataaataaataaagagaacatagggagttataaaggttcaaccttcttatatgtgggtaatgacctactccccttttagttgtattacttatgagataatatcggacaaattactaaggaagacaaagtgaagtctagctacatatctcaaagtatttacagagaatatctttcaacaaagtgctcttagatgtggaaatacgaattcaagtctcggtcccttccccttgtgaattcattcactatttataaggaaaaagttgttacatttggctccgtaaaatgagttaacaaacaataaatatccttatattctaggttgtcgttacaatttgttgaatctcctttattctcagatagatttgctagatccaaatttgtaggattcaatttgagatatttgtagaaacttgttgacgaggaaatcaaggatcgtgtagctttgtctgatactcctgacaacatttattctggccagcaggttgatcacccagccaagtcttcctcgagacttgtcttttttatgagtttacttatggaatcatccttgcaaagtgacttttatcatctatggctcgtaggttggtggtcaactagcctgtcaggtgcttcacaaaaggtcatttgtagcttatggctgtcagctttataggggacctgtcaagcacatttctgcccggatggtccttgtcgggctaaagagttagctagctagattctaccacgtgtaaataacacgtcagatgtgcaaactttgggataatatttttccctaagttctcgtacgaacatctgtccgaatagaaactttagatacatgtatgggtgctagcaagaatgtgagctccaagtggttagtaccttggtgattatacctgtaatgc

SEQ ID NO: 213474 - DNA, 1005 bp, Cannabis indica
tactacgtgcattttcgtcttctagctaatctgatcagtttttattaattataatataattctatttgataattaatatctaacttataaattaagcccttgttttttctctctgaatgtaattatgttcatcagccccttttgttcaattaaataatatatcaatatgtatctcataattcatgattgttttttctcttcataatacaaaaatattgctagcttttatatgtcggaacaaattttgtgactaaagaaaattattatatatacttacactggttaaaaatattattattcacaaaagttctaattatttgtgactaaaactagtcacagtaacaaaattagattagttacaatttgtatttagatattatttttaattataaataattatatatttggacttaaataaagtactattatcaatagccttgcaaaaaaaattatatatgctacgattaaagggcttaaagtgtattttttgtggtgtcataattaatatatatttatagttttcttgcactttatttcatggttacttacataaacgagaaagcactgtacattattgaatatttatatacaatatatttaataaaaaaaaatgagattttatttttattacaattgggagataatgcacatatattcgctatttcaatattatttaaagcaaaatatttgatgtgtaaaaataatattgatcgagtttttcttgaatcatatattaattaaaacatatatatatatatatatatatatatattaggatcatttataattttgctatagaaattttacaaattcttttagcttcatctgctgtgcatataataatttgcttattttcttccccaaatttatttcaattttttttttcttgcttagaaaagttaagtttctttgatgtaatattttatttttgatgaccctgtatagacagttactacaatcctaaaagaaaaccaataagaggcaccctaaattttccaatactac

SEQ ID NO: 213475 - DNA, 509 bp, Cannabis indica
ctctctctctgtatctaacatgggccttcttgaaagccacgccaccttccttaacacaacggctgaagcaatgccatggagccatcagtctaggatcgttctccatcagaatcattggagctagagttagttgatcgtgatcgttcgttttggtcagcagccatctggaagagtgtgtgggcccgtagagggcttcttcttcttctccgtccgattttggtttttggtgttgggtgaatatccgacggcggacgagtaggcgcatcgatgcgggccaagcaagagaggtctggcgaggtagcgccaggaatagcggaagctatttgggacaaggtgattggagaggtgtgagagtggattatgtcggctaattgaagctccaccgcgcatttcaaggccatcgaatctgcgaagctcaacatgtacttccatatctcaacttgacctctcaacactgcgtcctccccatctgcttccatattatttattacttttcttttttttttttt

SEQ ID NO: 213476 - DNA, 668 bp, Cannabis indica
agtaatgacctaaattccttttttattattttatttaagacacagagtttacctaaataaaatatgttattaatcttatttaaggcacgaagtttacctaataaggtgtgcaatttatcttattttaagataattatttggcacgatatttacttaataaggcgtgtcgtttacctttttttaaggtagttatttaccttttaagtgataaattatattttggtttaccttatttaaggcataaaacatgttgtttaccttattaaagtacgaagtttacttaagaaggcgtgtcatttatcttatttcaaggtaataatttgaaacgatgtttacctaataagacgcatcgtttaccttattttaagatagttgtttaccttttgaatgataaactatgtttttgtttaccttatttaaggtcacggagtttacctaataagacatgtcgtttaccttattttaaggtagttgcttacttttttagttgataaattatgtttttagttttaccttatttaaggcacatagtttaccaaaataaagcatgttgtttaccttatttaagtacacaaagtttatctaataagacatgtcatttatcttattttaaggtagttatttgacacaatatttaccttaataacgatgtgtcgtttactttattt

SEQ ID NO: 213477 - DNA, 387 bp, Cannabis indica
tttagcagcctctgctgaagagaccactatggcttgtcgccttccgaatcggaggtgcataacatcaccatatgttttggagagtttccatagagattggtgggttgtgaaaccaagttggtgtatgttgcctatgataggaagctttaaagggcctggaggaagttgtgatgatgtgttgtattgttttgctttaagctttttttgcatgagaaataagagagaaagaataagaaaaagaagaagaaacgacatggtgtagagagaataatgataggaaagtaccaccactctagaaattatttatttctagctatatcgatctacatattaccaagaatatataagaggtgccaattagttgagtttatttttttattataatat

SEQ ID NO: 213478 - DNA, 629 bp, Cannabis indica
ccgaccgatccaatgtcaaccgatggccaaaattgaatatccaatcatgattggattggatcggatgatatttttgaaaatccaatattggatcggtcagttcttggatgacatgtaaatccaatggatccaaccgaccgatccaatccaatattcatccaatatcatctaatattaaaataaaaaaatatatattataaatttataatattaaatatattatattttgaaaaccaaaataaaacatcacattcacgggattcagacccctctctccatatatcatataatttatatttatttttacatatataaaaaataatttaaaaaaaaaacaaaaccctagatacccctctctctgtcgtattctctctcacagctcacccatctttgaagccgcctgcagcccattttccagagagtggacgacgacgacagtgattctctgcccagccatttgacgacaacgcaaacgacaacaccttctcccctactcgctgacgacgacagtcatctcctctctaagtcgccgacggcatcttcaccaacgacggaagcgacacagctcctccctctccaacgaagccacatcatcttcttcctcgcaaatggcagcagcaactcaggtc

SEQ ID NO: 213479 - DNA, 780 bp, Cannabis indica
ttatattcttaatcacttaataactgactctctgtcgttggctaaaagcgaggtcaatattttggtgcttttcattgagagcaaaaacccaagtttgttgtttgtcttaagtcttaacaggcgtacaaaatggtggtgcaaactcacagaggcctggtcaatcagaacgacccaatggtgacggatcctaacatacaaaccccagggaatacgagaggaccaccagggacaagtcccgaacagaccaatacacagccacctactgtgtgccatgatgtgacttcccctctagctgggatcacaccaggtgtgcaagagactgggaatacctattttgcagccgatcaatccactcctaacactggagtcccgtctaccaccaatgctcagaggagggtgggggatgatactgagatccaaaacctccgtacagctcttagactcatgcaaggccataataacgctttgcatcatgatcaggaggatctccgtgctgctataaacctcgcgtttgatgagtagcgatgctagtttatagagtgcagggacagagagatagaaactttgaaggctcagcaagcaactatcgatgatcgcacgaggcagtccaccgtactaatacggagggcctaccaagtcactaataaacaaccagctatcgggcctagtatcccactaagcggtatagaagactatgctattgggcataccgcccaaactcataactggtcaaccgttcaatcccccgccacaggtttaacctgtgggccaagcagtaga

SEQ ID NO: 213480 - DNA, 342 bp, Cannabis indica
tctctctttctgtgtatttttctggttttcaattttttgcgatttttaacaatatttttacaatgatagactaaatttgaagttagggatgaagcttagcaatatttagcgttattttgtgtatttagcgataattttagtgaaatatttgcgatatgagaataaaaaatacaaagcacattgataaatatcgctaatcatcatgaaaatttgagtaacaatttagcaacaattaatgatgtgtttagcgatgtttagagacattgtagaaaaccaaaaaaaaaacgaagaaccaagcgatgggttgagaattccggtgatgggtggggattttgggagttc

SEQ ID NO: 213481 - DNA, 752 bp, Cannabis indica
ttgtttgatagtttatgtataattgtattatagttgttattagattggttttctcgttatttttggttgttttataattaatttttagttgttgtgaggtttatttctcgttattttttagttttttttttaactttttactgaggaaaatggatttttgtaattttaaaattttacaagcctatttttgtaattaaaaattttagaccataaaattataataaaacataaaagaaaagtatttttgaaaattcccctaaaattaatgataaaattattattttttaaaattttattaaaaatattaataaaataaatattaaattttatattaagttttgtaattaggcattaaagcacaatactaaaacttaatacaaatatattatgatgttatttttgtactaaatataatgcaacttttagtaattaattacatataaaatccagtaataactttcaaattttgtgacataaacaaaactacttaaaaagtcaaaacaagtccttaccattttaaatttcaagcacagttaatggaagtttacttttcacttttcaacatcaaaagtggtcaagactcaaatatggtatatataattcgatcaagcaactttctcgtgtcaattgactaatatcaatttaaccctatttatttatcagaaaagaatcattttaggataaattaacaaaagtttctcatgtggtgcgtttggaataaaaaatacggaattattttacaaatacataaa

SEQ ID NO: 213482 - DNA, 552 bp, Cannabis indica
ttcttctggagccttctagcatgttgttcatcctctcaactgagattttggtccctctcatggggaaatcagtccacccttccatgtttagtggtggtttcaggtgtttctctcctatttgtaaatcatttccttctgtttctctctcctttttgagcatttattactctggggggatattattacatcccttcccgatctcattaaactccctcagagcattaattgctcacaccttaaaatttcgtcatctctctccctctttaatcatcttctcttgtcttctcctcatttattacagattcttcaaatcctccctctgcaaaacacccttgaagatcgtaagatggaggcgggcgactggacttccgaagctcctcagcttctcttcatcattgcttcttcaatggatgggactagggatgtgactagggcggcgatgaggaaaattctcaggggatttatggtttttcctatatatatccaaaccaaggttaccaattttatcacctctttctgcctgatttcttttttagcctttgttttgaagtg

SEQ ID NO: 213483 - DNA, 1149 bp, Cannabis indica
aataagaaataaatcttgagttcatgttcaatttaaattaggtataatccaaaaaaatatttcactacagtagctaatattatacatgttgcattagcgttgttttctagaattacaatactggatttattcaattccgatcgcaactaataaagtgaatttgcattcatctcgcgttatagattttccaacattgtttaatttttttgattctatgaagttgcattatcgttcgtcgtccattttataaacgctcccataattgatgagtcaataattaagagtcgataattcttcaatagttttagtcttattttcaggtattttatatcgataatccaacacaaggctcgcatacaaaaaaattctaatatggtcattattttcatattttaacattggttgaatttgcgttggtttacagtgttcttatagttatttattcataaaatattattaacgtgcaagtcattgttcatcagtgcaacaattttttaaattttttcttaatgatgtccaatcacacagttcatgtatcgttgtgcatacgttgtttatcaatttcctaatagttgtgctacgaacatatcatataataaaaatcagggctaagaattggcaatacacgactcatatagagcaaataccattgtggtaagtttgtctatattacatagtgggtgtttgtagttgtgttaaaattgtaaagtagatgcctaacaacacatgcattacatccaattaattgttgtatttcagtttctttatgtcaagaaagggacccaattctatttctcatattttacaatggacagtttgatccaggaataaattatataattacaaagctagtggcgaattcatcttttaagggattgcaaatatgaacaactagtaaaaaagttgaaacaagtattggaatgcaaccaagaaatactcaactgcaacctaaaataccaagtgaaacaaggttatcagccgttgaggataaatgacaatccagatctattcttctacatacaactaaaattgaaaggacctgacttcacaaggtatctattatgtgtgaacatgatcagcaacacaacaacaaccaacaacacatccttcattgcaatgagcatgcaactcattagttacataaagaca

SEQ ID NO: 213484 - DNA, 841 bp, Cannabis indica
ttcttcgtatttgtgcaaataaacttattgaagatatttttgtaaataaaatcaattttaggtgtaatattgaaaaaatctcttataataggaattaagagacttgtagtgatgaaggtaatgtaaatgtaactttaagtatttaatccgtcaagaaaaaaaaataacatgtggtatataagtgtatgaaatttaaaacatcaagtatttatgccacaaatattttatgtttgaataagatttaacagaaaagtagtgacagaagtaacggaaatgtaactgaaagtatttaatccgtcgaaaaaaaaaacatattgtatttaagtgtataaaactaaaaacatatggtatttatgccgcaaatatccctttttataaatatggtgatgtgtgattaatcttcttaaaaaaatatataggaaatgataaaagatacgatcagcctgtgttatttagagatggaaattgagtgggtaataagcgaatgagcattactattagctaccagtggtgcctagcaccttctcgacatgtcacgttgcgattggctagcgatactttctaaaagctattaatattacattaaacaatgtgggacctgatactagttggactaatagcgatactgacacataggaaagtgctaggcaccactggtgtcctttagcatttccttaagcgaatgtacttctcaattttgtcttctttttttttttatgtctctcatccctgctcctatctcatttaatccgaatggatttcagggtagcacaattgtcattgggtatgggaataccaattaaaaattaaaaaaaaaaaaaaaaaaaacaaaaaagataat

SEQ ID NO: 213485 - DNA, 1269 bp, Cannabis indica
aacttttttaaaatttactatttcccaaactacaatttatagaatattatttgttgttctaaatttattattccatcttcatattagttgtttcttctattttgctcacattctataactctagcattacacattctatgaatgaagagaatagtacatttcagataaaatttaaaaaaattaatgaatagtaattttttctcttttatttgaaaaaacatatttataaataaaataaaactaaattttacagtcgttataaaatatgttctctaggatgattgacgggtcaatcatgctaaaaatattattggcgaaagcaaacttaagtatattataagctgtaaaattacaaactctaaaaataaataaaaaattacaattcaaacataaactagagagtttattataatagtaaacaagttaccaatacccaattggaacaggtctcattcattcagcaccttaataactatattggagtcactctcaattaacacacaaaaaaaaagtgtttcaaaatcagaccttcaatttctccaagagattagagaacttgtgtagtcttctttatagtttggttgtggaaatatttaataaaaattgatgtattttaaagagtggttatgcaaatataaatataggaatatgattttgtcccgtgatgtactttcacggaatgtattccgtgatacattagatgagtctcagggtatgttactattttttatctctaattatccgtggatcaccctagcgctcagataaaataactctcccatctgaccgttattgtatatcacagaatacattcggtagaagtgataaaatagtgtccctataaatataatgtcccgtaattgtaatgaatgaggtgaggaaaggggagatgaggtgcaagtgcagttatgggtcagcgtccgtacgaagtgaaggcacatccatccatatcataatatcattatcaagtatatatcaacgacaaccacactgctactgcttccttcatcatccctggcttaacccctttttgcaccacctgcgacactgtcgttttgattgacacataagacatgtccctttttacccctcttcttcttcttcttctctcattcattttcccaatccgaattgactaaaccttagctttcctcccaaacgtctcatcatccaaccccacaccctcccttcgcccttggatattatatactactactactaggataccctatatattaatgataagggatagttacgacttaatttcta

SEQ ID NO: 213486 - DNA, 522 bp, Cannabis indica
aatagtctaggtttaaccttgttcatctattccattaaaaattagacaaagtcatagtcaattgagaataattagggagtcggctttctaggactattaattatttatatatattataatattgtatgataatataatggataatcaaattaaataattaaagatatttcatagtgtggtggctaacactaattgaaataaataactataaaataatatgctttattgatgacctttcaaccctaaaacataatattctattgagattttttaacaatattataaatcatgtgaaaagtttaattattttttaattttttacattgaattgtaaaggattcctattacaaatttcgggctgcaaagttgatggtaaagtagttgtttaattaatttaattggtctgaatctgggataatcaaagtattagctgtatttggaaccaatcaattttcataagcattttatttttactttatatattatagtaactataaattaaagggaaattttcatgtatat

SEQ ID NO: 213487 - DNA, 766 bp, Cannabis indica
tacattccgtgaaagtacactaatagtataaaattgtatccctatatatatgtaacaattataaatattaaaataatttcatcacaaatatctcatgtagattattctattctcaaatgtaaaaattaaaaatgagatgaagatcatgaccccaaatctcaatgcgatgttgctaaagtcttttacctaatcccagtggtataaaagatgcttctaggaaatagagataaacttagtgaaaaatgttgttaccttgttaggaagctaaaacacattgagaaaaataatgggtatttgtctgacagaatcagaagacattaatgctgatactaaggaagaagatagaatcaccatatactaacagaagatcggagtgtgtggttggttatggtatcctctaattccttttaaagaaacatctttttatcatatttggtcttgtcttgattatcctttatgtttccttcagttgaacatctttttcaattcctgtactattacaatacagccctctttattaatatattaattaattagccctttccttttgtttttgtcaaacaagtccctaatttttattaacctgtgccagcattctcttcttcactccttgtaactgtataatgcttttcttaaggttctaactttagcttttaatgtatatttttctatatatgtatatatacaactgcatttgacaagctcaaagaaaagaagaaaaaaagtttgaattccttggtcttgattctcattcccttttatgata

SEQ ID NO: 213488 - DNA, 561 bp, Cannabis indica
ctccacctccagttgatggtcacgttgcaaaaaatttttaggcttgcatttcactggaagtaccaaaaatgtccagaagaggtactttaatgaacttgaacaagatggggaagtgtctgctctcgtgcaaacaccatcaaaaaagctacaaatgtgtaatctaccaatcacattcatggaaaaagatagctaacatgttcatttcctccataatgactcatttgtgatcgaggctcaggtcgccagctaaaagagtatcaaggattttggtggataatgggagttagatcaacatcctatttaaagccactttccatgccatttggttaattaacgcaaacctcatgccttgctcgatcaagcttcaaggcttcaatggagactctctactgcctagagggaagatctagctccccgttacgctaaatgggggtttatccaaaagcaatacttcctctacattcaagtactatacatttgtcatggtggactattcaaccacccacaatgccattttgggactaccagtccttgtagattttagagcggtaacctctattc

SEQ ID NO: 213489 - DNA, 644 bp, Cannabis indica
ctctttaagatgtttcatgactctgcccaaactgtgcacaacagtctatcaaccacaacattcctaggataatataacctctgtatacgattttctctgcactgaatgttatcacttataatgttcttctgaccgttctttttatcgacttaagatctttctaagttgcatcctaccaacagcagaacacatctcttcaacaacaaaaaaaacctttacgatttctcaaagtaaataatctttgggatgttatagagtgatatcaattttagagaaaataatgtttggggtgttaaagagtgatatcgttcggagcagattgattttgtgtacagaggttgttttattctgggaatgtcgtggttgataaactgtcatccacacttcgagtagagtcgtgaaacatcttaaagggagcgacatagtccgcgactcaaccaaattatcaatcggtaaaatttgttcatagaatatgtcactctctttaagatgttttatgactctacctaaagtgtgcacgacaatctaccaaccacgatattcctcaaataaaacaaccactgtatgcgaatcgctttgcaccaaatgataatgctttgtaacattccaaaaattatttgttatgagaaatcgttgaagagaag

SEQ ID NO: 213490 - DNA, 814 bp, Cannabis indica
acacagtaattttatagaggttcagccccgagcagtccggtaatagcctaatcctcgttatttgtattgacttaagaacaaggaagaagattccttttcttatagctcttacaatagtatctctgaatatataattcttagataataatatagtgttagcttagctgtgtatcgactttcaatctctcggtccctttgcccagtgaacatgtatcactatttataaggctgggaaacttgaggaggaagagtttcctctctcgttacaatgcgcataaacagaaagatcgtgggatcaatggtgaatgcaaggatcgtgggattgaggctgaatacactgatagtgggatcgtgtgtatgccgtatccacgtaaattgatccctgagttatagggattgagttgatgactcatgatgcgaaagttgaattcgctatgtgtttattgctctgcacggatcgctgaatatcgtactcaggacatgccagcgaggcatcctgctcggcctatcttcccgagcagatgctccaagtggactcaacgtgtcaccattctcgtgatgccacgtcagagtgcaaaatttgggataaaatttgccccccaagtctgtacaggaccactgaggttgcgtgtagacttcttccgagctgattctgcctttggatggggactcgtgtcgagcgtgaccgttcaagagtcgatgtgaagctgactgggcgtcccttcggttttcagctaataaatgctcagacaattaatattttgaaatctaattttctctctccacgaatgcggttgcactcaattacttttga

SEQ ID NO: 213491 - DNA, 1073 bp, Cannabis indica
aataaaaggctaattagtattttttttccctcgaactttgacatgtaccaaatcatgtctcctgaacttttttggccattaaaaattccccctgaactattaagattgttagatttaaggacttttgtctaatttcattcaattttattgtttcagtgattgtttatgtaataaatcatgcttcccagactttgatatctaccaaatcatgcccctaaaactttaatatatactaaatcattgcccttgaactttcatctatgttagaatttttttactaaaattagacaaaagtccttaaatctaacaatctcattaaaattagataagagtgcttaaattcaacaatctcaatggttcaggaagaaattttgaacagctttaaaaattaaaaacatgtcgaaattaaaaaaaaaaaactaaattaagccatatgattttcttttctttgtagccattttgtgttaattatttgatttatacattgacacatgtttaagttgaaaaagagatgtgaagaagtgcattgactctattcgattttttttcgcagaattacatgctactattttcccttccaatgtcccttgcctgaaggagtgctggtccctcctcccccccccccccctcctcatgattggatcaaactgaattgcaatgttaaagtggggcttgatagcatgtgtatagcagttgttgccaggaaccacttaggcgaggtggttcaagttcatgcggcttgtcttgacttttctgatgctctttgtggggaagcagcggcatgctgcttggctatttctactactttggaattttatgctaagtttgtcatcgtggagagcgactcgagggtagtcatcaatgctctcaatgggaaggagtctcattgggttattggaaactatatctctttttgtaatagtcaatcttctttattttcgagttgtattttctctcatattagcaggacttgtaattttgttgtccataatgtggctaagtgggcgtttacccacaaattatttggtgatattctgttatctaccctcctgttaaacaaattatgtaatgac

SEQ ID NO: 213492 - DNA, 877 bp, Cannabis indica
  modified_base (21)..(21): a, c, t, g, unknown or other
gagcatacagattggcgttanatagaaacatagagatagtctggtactaggtattagaatagcaaacatttaaaatatactaccaataagtgtaaatggtttgaccaataaattgcacaattcttggacattactcttaagtgatggcattctgagcggacctcgctcaaaggttcaaagacaattggtgctaaggtcaaatgaccactttcaaagtacagttagtttaaaatcattgctcttgagtgatgtcttttgagcagaatatatcgttcaaatgttttatgttttagttagctaaagatcagatagatcgtgtgatagttttttataattcaataaatgtgcgttaccacagtaacaacacataccgaccaataataaataaaatataaattattgttcaaattgtgttaattttatacttttttacaaattatagcaagttatttaattgcctaacatgtgtacatagggtttgcctaaaccaaaaagccaaataggttaaagaaaacttgtgaaatgtaagtgaccaagagtcaaaagtctgcttggtcacttgggggcacctatactcgtacaagtattggtaaaaagcaagctaaagcaaaaaaaaaaaaaaaaaaaagaaattacaaaattataagaaccgatttatattaagataaagatgcagaataagtgtgggattaaaactgtaatgccaaaaaaaggctaaagctatagatagagatttgtttatggaaagatgtaaaaaataggaagtagcatgagagatatgtagagcttaattttttaggaatttttctggtttgtaattggagaatgtaattagttattgcgcaatacaatgatccttattcaaaaaaaaaaaaaa

SEQ ID NO: 213493 - DNA, 517 bp, Cannabis indica
tctctctacatttgttaactaagcattgctattgctattacaccttaatagttttaatactatatattgagcatgtgatgcattgtaagtatttacaagtttttcctattatttgcttaattaaaataagtgaatctgatattaaattacatcaataatgaatataatacttcttatgatacttgacaatttagggtgttcgtgttaacatttatcttcttaattaatgtccgacatcctaagacatgtcataagttggcttattaaacccttatttaaaaaacataatatttaagaaaaaaaaaattatgccctaagctaggtggcctatggtgcaactctagcctcaggtcagtcctagtcatattgatattggtacaaaatttaataacgagtctcatatgcttttattgatagagttaagagatttgaagagtgtcctggcttcagatttattaaatttttaaaatatacgtaaaaaattaaaaaatatatatttttacatgtatttgtctcg

SEQ ID NO: 213494 - DNA, 773 bp, Cannabis indica
gatgaaagttcagtgggcatgatgcagcatatatcaatgttcgaggggcataatttggcagatatcaaagtctggggagcatggtttagtacataaacaatcattgaaacagtaaaattgaatgaaattagaaaaaagtccttaagtctaacaatttcaatagttcaggggaatttttaacggcgaaaaaagttcaggggcatgatttggtacatgtcaaagttcgggggaaaaaaaaatcctaattagccttgattaaaagactataataaattatcttttactaaaaatttatttaccacaaaaaatttttgaatgaaaaaatatttaaatttctctttttatttagttttaaaatatattttatatttatattttttattatgaacaaataatatcaacttatatttctcataaattataattttttttacaagtgataaaaatataatataaaaatattaaaaattatttttatcaaatgcatatacatttacactatgaaaaaataattaaaaatatatagaaaaaaaaaatttgtataacacatttttatatatatatttatgattataatgaactagattaaaatattctcattattataataaaatcttaacaactaacagcactttaaaatttataatttaccaaacactcagcttagcttttttctacagttctactacagctgttttttctcacagcacagctatagctgcttttccgccacagcacatatctgccaaactagccctcagaagataacactg

SEQ ID NO: 213495 - DNA, 526 bp, Cannabis indica
ttataataattacttatctacacctaacgtatttttttctccttcacaaatattaatcctgagaacatctctaataaaagatttgaaatttattttaaatttgacacacaaaaaaaaaggctatatttgatccgtgaaaaaattattatattaataattatttaatattttattaagaatatacaaaaactattatttttttattcttttattatttaaataatagtaatataataaataaagaatgtaaaatttagtaaaagtcaataaattatattaattagtaacatctagtaaataaataagtaacatttattgtaggctaaatttatcacaataatatatcttgtactaaatttggctggtagataaatttagtacaatttttagcatgcgtcaaatctaacacactttttagaacattattggagtagtagttttttttttttaagtgtgttaaaatatagtaatacaccactattttaaaactccattaaagatgctttaagatagttgagtgaactaa

SEQ ID NO: 213496 - DNA, 748 bp, Cannabis indica
gtaagtattttttctcatttcattcatagtatcaagtaatatataacttagttgaagcaaaacgttaaatttatagtttttttataaaataacagttgaacataaaacagaacaactaaataacaactgtagaacaacaatgaaaacttaatacaatacacaaaataaaatttacacaatattttttagtaaaaaaatacagcatttttgaaaaaattccgcctcacagtaaaaaaagttgaaaatttcagtatgtggtataaataatccaatgttaaattatacacgtaattttaggtaatttatttgtgggcccccccagtgaaatgatattttttatgttattttgcactttggtccattttcaataattctttacaaaatagcctccaacacttaagactgctggtcgaaattttaaacaaaggtttttttttgtaaagaattatcataattaggccgaagtacaaaataactttagaaaatagaagagtctattttaccaatagaaaataattttgcaaaatgacattcatataaaataattatatatataattactaatattattgatgaaattaatataattatgttttgttttgttttttaattgtatagtttggagttatggtacaattcgattctggtgttattagctggatatatgaaagatgcaacaactgccatctctgctttctctatttggtaattaataattaattaattacaaatccaaattgtaaaacta

SEQ ID NO: 213497 - DNA, 608 bp, Cannabis indica
ccaagaaatacttgagcactcttgaatccttcgcatgaaattgggtatgaatgaaagacttaagggatgagatacctccggtatcatttccagtaataacaatgtcatccacctacacagctaacaaaatgatatcagcagttgatcttttgtataatatagaatgatctgacttacttttcaaaatctaaatttctcaacaggctgactaaatttaccaaaccaagcgcgagactttgtttcaatccatataaagatttacaaagacaacaaacttgcccaaattctccctgagcaacaaacccaagatgttgctccatatacacttcttccttaagatcttcatgaagaaaatcatttttaatatcaagttgatgcaaaggccaatgatgagtaccgccatggaaatgaacaatcaaacaaatgtgagtttagcaataggagaaaaagtattacaatagtccacgccataggtttgatcataacccgtggcaacaagacgggcttttaagcgaacaattgttccatctggattgactttaaccgtaaacacccatttgcacctaatggactgtttttccgaaggtaaattaatcaagttccaagta

SEQ ID NO: 213498 - DNA, 1015 bp, Cannabis indica
ttaatttttttttttcaaagaatattaaataaaaatgtattatcatatggtgtatgtatgcatgataaatgaagaggaagtttaaaaacatggcaattccttctaacaaacaaaatattaggacacaataaaatacaataatgcatgaatgattgaaaaaaaaaattaggtaaaaaattactttaaacactaataatccaatgaatgacacttatataatattaaaataatataaaaaatacttatataaaaataaacaattctaataaatataaaagaaagagatgaacattttgtaaatgttgaccgagattttcggcaaccaatttaataatatatatgagaaagctgtaggaagtttaatgcatgagatttttacgtggttggggcattaatgagccttagtccacgagtcttttttatttatgagagtatttattacagagaatgttctttgtagtttttctctcttttttcctcacaaacccagaattctagacccctgtcttaatgtgttggggggtatttatagtatttttcttgggtgatccctagaaccgaacttcttgtctttttgtgtattttcagtaggagcacacattcccaacagatacaaaatggggaatgcatggtttataccctaggtatcttaggggttaggtggatataatcctttatcccttcttgactgatgtgatccctcataaagtagccgtcactaggcttattaatcatagcgtgatagctgcagaagaggggttacgtcgtcagacgtaatgcttatggcagtttcaatacgtcttctctcatgcggcattaaatgcgaggtgactgttcaaatggagtctggtgcctcatggaggtgctttgccataactctgtcctccgggagtacgtggagccctcatatcttctccgggaggtattttcttgttgatactcttgatccaaaaaggcttagttaaattatctcagaaccatatttttcaaatccacgtgtcgcagtcgcattggt

SEQ ID NO: 213499 - DNA, 650 bp, Cannabis indica
taatgacttggaggctagagttaaacttaggtttctagaattgagttaaggctctttatataggagagcttaaaccctaatttacaactgaaattattagatatttacatattaaattgattaaatacaaaagactgaaatgacccatttaaaatagatagttttccatctagtttgttaggctgctaagggcccaattcgcagttagcttgcagtccacgtatcaagtagtatcgagaattctgccaggtaaatcctagccggccatccaccttgccaggtcactccttgtcggccatgctcctgctaggatctggcaggtcatgtccctgctagggtctggcaggtcatgttccttccagggtctggtaggtaatgttactgtcacctttaccaagaggaggccaaccttttgcaagttgaggctagctttgtacacctttttcttgtagacgctaggttcccttgatcaaatggaagctctcttggtctgaaagtcaccttttagttggccaacttgcgcccaaatcctggccggccatacaagctcaccctggccagccatacaagctcaccatggatggcctataggcttctcttggccggccaaacatgttgatacagctccttgatggcttgcttcactcctt

SEQ ID NO: 213500 - DNA, 1293 bp, Cannabis indica
agaaaaccacaaactcaagactctggaaatagggcccagcatcccggttgacctagtgttgggccctgcgcagaggttgacaatcaacctgctgcctccaattgctcaaatgtaaaaattgacgcaataattgaattcgaaatggtaaaaatagaataggagacctcgtcttcaagtttagaagccttggaagtatgaaaaacaagatcttgggagctcgggagctcgggagtaagtacctagcgcccaggttgacaaatggcttggtgcgctgggttctacttatttgaatttgatgcattttcaaccgtccatctagtttttcacaatgacaaagatccatgaagtcagaaaaatcaaattcacagctttgcattttttttcgtttcaagttcactcaaaaatgaagagtttcgagtctgtcatttccacaaaacagcaacatctccgagaactggtgaccaactttgccagaacacagaatcaggctaagtgatgtcaaaatatcacttaggcatcttaaagtacataccttggatgctcttacacttacccaacatccaggttgatgtcatatgtcaacatggtcattgggatgtcaacttggtcgttggatgtcaatctgttggctgggtcatgaactgccttcagtaaaacaaccataactcactcaactttgatctaattgacgtgattcatttgaagctaattaaatgctctatgaagtcatgtctcacacaccagacgtaattttaaagttatcgtcgttaaaattcaatatcaagggaattatgaaaataagctccaagttaccaacaagagctaatttttaccgttagatcatcatcaatggtcaaaaaaatcttatttgtaatttcctcctatttttgtgggcctccttcacctataaaaggagagctctataacctcattttttacattcataaaactacccataaggtcaaaactgctctctctagtttctctctctagaaactaaagcttaaacacttagcttttttctgtaattcttgtgagaaataaaaaatcgaagtagacgtagctctactaccatcgcaacatggggagagaactactataaattttgggtgtcctctaatagtacatggattcttctattctagcatgtacaagtaaccaggtaacttcgtataagattgtgttggcatacccctaacatatgtaagtgccttctccctccacctccatatcttttcataactaatcttgattctatattcgtcaaatatatccatatgtatgtcttttttc

SEQ ID NO: 213501 - DNA, 927 bp, Cannabis indica
ctgttctgtcttgctgctcctgatacgacgctgcatgtgccggtgcggtgctcttttgctcaaagttgctgaagcagggttccaattactgctgtggcgcctgatgcaatgttgttctcaagttggttcgaagcgggtttggcatcgtggaatacggccgaggctcttgaggctggtatggtttgttggtcaatttggactcatcgtaacgatttggtttggaactccaaataccctgatgcgagtgaggtagtggcaatggctcataaaattatgttgattggtttaatgctcaaaaacttaatgtcacagatgcaagcttaaacgggccgactgcactacctgtggagcaatggacagcacccgattccccttttgtcaaagttaatgtggatggtgcacttttttccgcccaagggcggtatggactgggtttgattgcaaggtctgctgcgggttgggttgtgggggccagaagcttatctagagaaggtgctttgcaacctcatattgtcaaagccattggaatcaaggaagctctctcttggagtaaagcaaatggatggtcacatgttgtcgttgagtcggattgtttaagggtcgttaacgatttgcaaaagttcaaaaatatggcttctccttatggcaatattctttatgattgtatgactttggttgctgattttgatgttgtttcttttatttttgctaagcggtctgctaataaggttgtgcatgctttggcgcgaccttctctttctgaggctgactgtacttttagtagagactccttaccttttgttattgcatccttggttttggatgatttagtttaatgaaatttaatcattattcaaaaaaaaaatagtttaaagggttttaccattaaaatttaaacttggagtgttaagtgcaagtgaaatgata

SEQ ID NO: 213502 - DNA, 828 bp, Cannabis indica
gaaaagaaaagcatcatcaattgcagaaagctctttggaagtaggatactacatctagtagagactttctaattgattgaagaaaaccctttaggagtgggatgctgccccagttgtggtattcttttagtggtaaaactcctcctaagtatgggttgttgtacttagcacgggtttagtccaatctatcttttttatttttcttctcttggagttttttcttaaacctttaataaggttttgtgagctaaaatcattgaaccaagtttttcaccaacccgtgattttgcccataaccgtaagtgtgtgattccaggtccaactttcaagacaagcattaaatatctcacacattgaagaaacatttgatcaagtcacgtcaaatcaaaggtgataactagacacgcatcacccatccgattagtttcgtggtcggtaagtccacgtgcaaccaagaagatcccgcacgaccttggggcaaatattatctatatttctgcacaatgatgtggcatccatctacgtgacacgtggagcacaattttatcacctggataggcaatcctactccaaatgagatgtagagacaattatgatacttgaagtcataaatagaagatgggatgtccagacaggttatgtatagacatccgaccaacttccatcaagcagggggctcgcatgcactgaccaggggaagcgaattagaaatttcagagatatgtctcttatatcttcaagcttgcaagtcacgataatatccctaatttcatgggatagatttgtatcattagagaagaaagaaacttgcctaagtttcctactttg

SEQ ID NO: 213503 - DNA, 754 bp, Cannabis indica
agaaaatgacacgtgcataataaattaaaatttaatgatcaagtacctacaaagttttaaaaatataacttaagtattattaccgcaaaaaattaaacttaagtacttatttgcaactgagaattaaacttaagtatttatgtcgcaacatatttagtaacatataactaactaatcaagtgagcaattgtccttagcttggtatgcctcaatttttccttttgtatactatccaacttgtatttagtaacatattttatctccttaaagacattcataacagtaaaagaaaaattatcatgtacacatctaattctattcctccaaatattatatacagtggctgcaaaaaaaccaagcataatttttagaactggttcggttttttttagcaatctaggacatccatcactcagtaacagtcagccaagctgtaaatcccagccattcaaaaacagcattaactagtctcttcaaaaaatcacaagcaaaaaacaaatgctcatgactttcattttctatgttacaaacagggcaggcagtagattctaaatagacatgaaatctcatgaacttatcctgagtcagcagttgactgttaaccatttgccaaaaataaatcgatgcttaggaagagtcagcctactccaaatagcttcattataattgaccacctactgtggtaataagctgttatacagttttgaggccttgaatttaaatctgtttctagcagccagcaagttttgctcat

SEQ ID NO: 213504 - DNA, 511 bp, Cannabis indica
gcagggaggttagagatttcagaatgtctatgaatatcaatattagacttcctacgttccactacatcaatcaaagctagctatacagttataccaagataactacttttcccttgaaaaattagaggacaaaattgatacgagattctagtaaggtcaatctcaacctagaaattgtaccaaatacacaattgattaatatcttacagcttctaaacatccaaatttaacatcacgtacataaactctacaatctatcagaactataggtactccttacgactatacatcaaattcaaatggacaaaagggaacaaactctaccaagtgtgcaaagattcgacctccccacccaaaatattaaaataaaactgaaaataaaagaccaacaaccccacaccaaacccaaaaaataaataaataaataaaacactattaaaggcgagatcttgggctcattttacagctgttcctctcaagattttccttccctgatttctttgggggaata

SEQ ID NO: 213505 - DNA, 966 bp, Cannabis indica
aaattttcacacataaaccttttatttctaggaacactaaaagaagggtccttaatcaaaacttttaaagtcctatgatcagacccataaaaacctaagtgatacaaggaggcatacggatagagacttaaccaattctggttaacaatgcaccaatcaaggcgctcaaaagaggtaccatgcttccaagtatatttattacctatatatggcaaaggggatagattaaatgtggaaacaaaattttgaaaattgatcattgcataatgaggaggattattcacattagacctatcatttagagaaatattatcattaaagtcaccaaaaatcagccaaggcaacaaaggagccacatcatatagccaatgcaatagagtccaagtatgcaatttttcagaaacataaggagaaccataataacaggaaacttgccaacttatattatcattaatattaacataacaatctatatgattagaggagtaattatttatagttacatccacaacagcattccagaaaagcaacaacccccccccctaaacccacactaggcacctcaaaaacattatcaaaatgaagcctagacttaagaaaagaactagaactaggtccttgtttagtttttgaaattccgtattttaatattcccagtttgattatttaattaaatgattaattaaatgcggaataataaaactggtactgaaaacagttttctgtagttacagaatgcaactctgtaactccagagaaacccagaaaaacaaacagtgcataaaagtaaaaacacacaagatttttgtacgtggtttcaacaatcctttcagattgttactagtccacggggccacgcccagagataagattcattagatcggtatcaaaaatacaaagtaattgacttatgcataaatagactccctcttattgtatgccgcaagcttgatgtattccacctac

SEQ ID NO: 213506 - DNA, 771 bp, Cannabis indica
ataataccaaattaccagtgttaacatatatttctcataatttccaccggataatcctaatttatggacaatttgatgggagatcacttaattatgtacaatattcactcttcattttaaaattaatatattaattataacattcacaaaataatatagtgtgaaattatttaccgatgacatctatttctaataagagaaagagaattaattaagaaatttttacactaaatactcaaatttttaattttttactatggggcaaaatttttttaaaaaatattatatattgtttatactgtattaagtttcatatgttgttctaacataaatactattctctactggagtattctcaaccccttatacaacaaggtgataaggccaaaaataaaacaatggcttgaaaaccattaataacatttatattattagctatcgtagcatagtgttaagtatgataactacaaacaaatgaaaaatgaaacaactttaattaattaagagaaaaaatatcaaatatctaaatggtcacacattatagaattaaaattatcaatgcattattcttaaaaaaaaaaaaaaattaatttttcatttgcaaaaaagaaactgtgtcgtctctatatttagcgtaataaattttttgatttcttcatagtttttgaattagataaaaataaaacttcttataaatattaataattatgtggatgtccaaatcttttatttattaccatgaattgtaatgaacattcctcttttccttag

SEQ ID NO: 213507 - DNA, 538 bp, Cannabis indica
attaaataatttatttataaatattgaaaaactttcttattcatatatgaggttgtgacttgtattgtacgaaaaattaagatcacctagaatcagcaacatattaaagctatggaatctttaatcaacggttactaatactgttcactgatccccgttattcggtacaagcaatctcgctttacattgctgatgtagtatgacatctaagtgaatgtattgtatatagtagagattatatatgacatagaccaatgtgtaattaagctgtatttatcaaacatgttgtttactataaagacttaattcatatcataaggatgatcaatagctgattagcctgaatcttgagtaatcatgaactcttgttcatgttattagtttctttgattcattcgttaaagtttctcaaagtagatgattcttaaaatttctgattaggaagctaataatgtggatggctgaaaacttgatttacaattgtggaatcttgactttcgtaacagatccaatgctggttctctttaagtgttaattc

SEQ ID NO: 213508 - DNA, 466 bp, Cannabis indica
ttatttttctgttattttatgtgtttttttttggtgcagttgttgtttaattatgtacattttttattatttttatgtgtttattaagattgacgtcttgttatttttctgttgatttatagttgtctttttgttattttatagttgttttatattgttgtttaggtattttatagttgttttatgtatttttgtacagctgttgtttagtttatgtatattttttattgaatatattttcagtttattttattttatgtatctacatttttgttgtatgtatatgcattttgttttgcaatttttatgttggcttttagttatatttttaagtggtttccataatttttttttgtggaatagttattttttatgatgtatttttttagttttatttctaataattttgttgttgtatgtgtgtttctttgtaaatgtagatatgtatatttagtttatttttttt

SEQ ID NO: 213509 - DNA, 754 bp, Cannabis indica
gatttgaaaataaccaaaaaaaatattttcaattcattttctaatcttataatttaataaaattaaaataacaaaataaactaattttaaaatagatatgattagaaaatattattttaagaataaaataaaaaaaataataaatccaaattagatgtgaaaatatctcaaattaagcctttactaaatttctacaaaaatatctaggttatttaaatatttaatatactatttataaattttttataagtaaaattagaggaaaaaaaaaagcaaacttataatttataaacaattaaatatttcacaaagtaacctattttgattttaaaatattatggttagtgttatacccgaaatttggctaccatttcaagcgacgacacgtgtccagattaaggggcatatggatctatgcatgtaaaggtaatcactttttatggaataactcattaaacgcagaagtgacagagtatacttgtaactcgctgactatgaggtcttatgcgaggtaaagatatacaaaacgttgcctcatgtattaacgagaaaccatacgacattcaatgcataaggtgagacatcaacttcgttacacctgggaagatggaagcgatgcacattgactgtgaaaacacttagcgtataatatacaaactaagtataatagttaggtggactcaagacctaataagcaagacgcctatctcgctataggaagacgttctccagttactttcaccaatcaacttca

SEQ ID NO: 213510 - DNA, 1312 bp, Cannabis indica
tcccatattcgcttttggggggacagaggcttctgaggtttttcgaaatggttaccccttttcgttgtttgcctataaataccactgagcatttgctcacaaacttattttcaccaaccttctttgctaagtaagtttagagcgaaaagagaggtttttagctttgagtttgctgaagcgttttcacaaaaactgctcgtttagcttgccgtaacctaaatccagacgttcgatccttgagtaagttcttgatttcttttacgtttactttgcacatttattttccgaatgcaacttttacttcgctgtagaagatatgtaggaaaccctaagtttagaaactctgcgattttcctttgtaacgattcatgcgatttcatcgttcataatgcttgcttcttgaactgcacgatgcctgtctttcatcttgcttattctaagcttcatgaatatttttgccctaactcacgaaaatttcaaacttctgagttttaactttcgtcgaatattcttattctttaatctgttgagtactcctggtcggcgtattcgcctgttttaatgttcaatatcccgaccaaacacttatcttgtgagttgtcttttgtagatgaacccaggcaagttttgggaaagcgaacaccaaatcaaccaggatctacttcaactcttgcacgaggatcatcctcttcttcgttctagtccaccctcttcgagcgacagaaattttagcttaaatctctcatccagccagaagatgatggctcgtacaaaaaagacaatgcgtagaatccgcatctgaccctcaagtggcctggcatgccaccttacccaatgtcgaataagattcgtcagtctaggaggaggaggatcatgaaggggatgccgaggtccaggagattgaggaacatgacgatgttcgtcctaacagtccttccgagacggaggaagaggaggagattgcaccccaaactttgggggatataatgaggctggggagctggtcgatccagatggtgacgtcctggctgagggtgaggactatgccagtgaggaacttactatcgcggttcctcacagaaggcaaggtgctttgggcgctaggtgggtgacccctccgtccaaggttaccgaggcacgcttgcgggatctcgaccaagagggttatctgggcgagttagactgctatatttccccttataataatcgagccaacgaaccctgaaagggggatgtgtgcctggtcgggtgctcatgccaagcaaggggaatttctccctttacacttgtactttaggaatgtgacagactt

SEQ ID NO: 213511 - DNA, 1082 bp, Cannabis indica
aatattacaatttaaatttaaatccattgcacaaattttaagaaaatatctttctattatcatttttttacttaatccccatgtctaaaattatatattattattatttttttaaactaataaaataaaaaaacatatttttatgtctcttaaaaaattactatggtaacgtcgtcgctacatattgcagttagtaaaaaaatatcattctattattatatttttttagaaaaaaaacagaaaaagtgtatgatatttctataaaaatgaaaagtactataaaattaaaaatattacggttaaactaaaattataatcaataacaaattttaaatattattaataataataatttataattagctatatacaacttttttatttttagtcacaagttttgttgtaactaatagtaagattttttgtagtaattcctagtacgaatagatgtagaaaatgtactagttttgttataacacttcaagatcggattataattaaattttattttaacaaaaaaaatgagtacaaagtcttactattttagaaaatatacggtaaattttttattttataaaacagaatgtttaatcattaatttttataaaatacatgatctaaaataatatttacccactaattaaaatgtttcatatatattttgtatgtcttattatagaaactctctttatattatttatatatatatgagtaatttgcagcataacctccttaagtggtcaggtttttgcaactaacctccaattttaaaattttagcggtaaaactccttaaactcgtgttcagttagcagtttaatatttacatctatttttagctgttaactgccatgatggaatgtccacgtgtacacgtggcataattttaaatatttaaaaaataaaaaaaattaaattatataaaataaaaacaaaaaaaaaaatttttttaaattaaaaaatttaaaattaaaaaaacaaatttagaaaaaaaataaaaataaaaaaaaccctaaattaccctgacattctttctcttcttctcgtcctctctctctctctctctctctctctctctctctc

SEQ ID NO: 213512 - DNA, 647 bp, Cannabis indica
tagagtagttatcgatgatgatttagttgtgaatgtctttgctgaagctgctggaagtactccataggcctaagcaaaagcatcttcacggtttaagaatccttgagctctagataagaagtcagataaagagtcttcttttttcctttgaagttctccccataacaagtatctagtggttattcctcaactcaatgctacaatcttcatagcatcagtaacctttgtctttgttgtcgtatcagtcatgtgttggatgtacttcttaaggctttctcctggttattatttaatgtttgttagagaactaacttccaaatcaaatccttagttgctatgaattatttcttgaacattgtctataaatccttccaattacaaattgatctgggatataaccttttccaccgatcttctgtagactttgacatatttagtgaaaaacatacgcattttgcgtcactagcttttcctacttggatcatttgactgtacattgatagatggtccatggggtccgtccttccttcatacaattccatctgagaaattctgaagtgctctaacaactatgcatctgtaatccatttcacacatggttctgtatcttcctcctcccagacattgagttgtggcacccaatgact

SEQ ID NO: 213513 - DNA, 923 bp, Cannabis indica
caaagttacacatgctatgtggtttggtacctaaatctattacttcgtgaaatatcacactgcatcctcttgttctcgttgatttggctattgaaaatgagtttggagaatacggttgtgatatttgcgaaggtgaaagagatccacgattttgtgtatatttttgtgaagattgcaagttcgttgctcatgtgcactgtctaacttctcaggtatatatagactaaatcactagctaatattaattatcattataattatactctctgccttaattttatttcaatttataagattagttgtgaaatgttttataaaattatttagcttttaaattaatattctttgtgagcttttgaattaatattagattagatagttaaccattaattttttttatatattttactttagtttttttatgtgttaatatttaaatttttttttttttcgaaaaaaaataatgtacatttgtttttattttgactttaactttaagattcatatattttcttgttttttttttttcatcttaatacttcacggtatatcttatgttatgtatgtatttttggaaaaacattgttattgggtaccagtagtgtctagtattttttagacatgtcgtcttgcgattgactagcaacataggagagtgaggcactattgatgcctttcagctatttctcaatttgagtcattgctattgggcactagaggtgctaggcacctctagactaaacatgttgtcttgcaattagctagcgatactccctaagtatgtgtgtatttacaatctttattcgtatactaattaagaaaaatgctaaaagatattagtggtactcagataaataatattaatagtagtttccatatacatatttatctatgatagcgattaaatacaaattattaaaaaa

SEQ ID NO: 213514 - DNA, 1265 bp, Cannabis indica
accttaatgtcagctcatacacggtctgaaaacagatcacatctcacttgaatacttcctaaaataattcttctattagcctagtaaattttctattctatacctacagaatcgtgagcagtaagtgcgacttttatttataaaaaatgaaaaccttgcatgctttggttttcttcacaacaaatctgatcaaacattttaggaaactcacaaaatatcagatatacacagttggatagatagatattggttatcatcaagcttaccttttatagctcactttccatatatagaaaagttagtcatatttatttctttatataattcaaatcaataacaaaaatatagaaatcaaataacaattcagttgaaattaaagaataaaattataaaatatttttatcaaattaaagatgctctcctgtatcacctaaataaataccatgtcacctcgtgcataatttaggacaacatgcatctaggaaaactttttagtctattttttttatgattgcatacgttgtaactatttaagactacttttaaattttagaaaatttcagataatttatcgtgttgaaaataaaatttaaacaactattgaccacatgtataagaaaaatagtcacgtgtataataaaatatataaattttattttcagcatttaaactacttataaatttttaaaaaatatatatgcgatcgttaaagaaaaaaaaaaataaattaaaaagttaacttgaatgccgaaacagataaaaaacataccgaaacacccccttataagaattgcactatagacttatcctataatttttacacataatgattattatcgtgcattttcttttaactaaagatagtttcaagtgagaaccatatcacttatttgcttatatataatcaagattaatagcgtaatttaagtatgtcacaattatcatttatataaaatgtttaaccactcgaaaactaattatcaagtaatatggatatatggaatgttgggacaaattgaaacagatcgatttgatgaggacaataactaattaggatttggatagaggggaaagtattgggttgattggttaaacactctaaattagttaatgactataaaacattcttattgtcaagttaacatacatataattagaaaaaatatgtataattagatttgaagtctatttaataaagtatttacacgtcaaaaaaaaaagtattttttttttctcagtgctttactatggtggcgtttggtaac

SEQ ID NO: 213515 - DNA, 531 bp, Cannabis indica
accagttgatggcaatgctaaaaccacagcccacccgacaacacaaaatgaggaacgaatggagagcgataacgaagatgtgttcccagaagattgggaaccagatgataacgaggcaccgtcaactccattagaagaaattatcacggccattggtgatacaaaatcacaggacgaagtcctacttctacctagacccccagagaatgtgtcatttgtgaggaagaggaagccgcctacgtacttgaaggactacactgcggaaaagaaaaagaggcgagttcttccaaataacgtagatccggaaagaccagcagaccgtagattgctacgtacgttcaagatgtggttgattagagacattcccaatacctgacctaggaatgtgcacaccggtgatgctgatgtgaagtttttcacaaaattgtttctaatgggggattagctggacgatgatgtaagtatttaattattaattactattttgatgtttttttgtctctgtgattattttcgatgtgttagcgacaa

SEQ ID NO: 213516 - DNA, 587 bp, Cannabis indica
aatttgagtaaaatataaagatagtcataattgtcatttgagtttagagtgtgatagccatgaatttgagtaaaatataaagataagagctttacaaatggcatcccagtaactaaatttgagctgcagaggaacaatggctataatgttgtgttatgtatttagatgcatgcctgccaatgtggagaggatagagagcaacaaaacgggtgatagttagtagatccattatttcaataatcatactttccaaactttaagaatacaaaaacatgaataggttgccggttttcaatttttcatttacccttattttaaattgtacaaatatcaaaagcattggtattaggcattagtagtgcctagtatcttctcgatatgttgcgttgtgattggctagagatactccctaaaaactattatattaaattatgtgggactggatacttagttgcaccaatagtaatactagacaccagacatggtaccttttagcattttttcaaatattaaaccattagaataataaaaaaaaaaaaaaaaaaaacaaaaaaaaaaaaaccaaaaacgtagtaatcaaatccaac

SEQ ID NO: 213517 - DNA, 651 bp, Cannabis indica
gtgtattgtagaattttcgtgcatcgagtaataataatattacgttaaaattaataaaaaataaaaaaattataagaatcttagttagaaagatatgagaatatggcaataaaacaaaaaactgtaaggatttaattgttactgatttaattttatctcaagaattagattatgaaagaagaaactagaaagatagttatatttgattttcttttcacgtttcaaaaaaaaacattaatttttttttaagaattttaattcacaagtaccaaacacaaccaaacggtcccatagattttattggtttattgttcttcatgattaatttaatgaaatataaaaattcttctaatgatattcatgtcataagtgcttgttgaaaacattcaattatcctttatcatggaaatattattttatcgtgtaatgcataaatttatttattatgtttttcacatccattttgtatgactactaatgataattatgacatgctcacacaatttgcacaacatttaagagacatctatgtggtaaattatttaacatacccaacggtaaatattacatttaagggctcgtttggaacgccgtattagatcgtattgtattgtattgtattgtattatattgaattgtattttattgcat

SEQ ID NO: 213518 - DNA, 141 bp, Cannabis indica
gtgtatcatatttgtgtgtatatctactaattaagtacgatagaaaaaaaaaaaaaacaaagaagtgaagataaagtgattatttgatatcctgatttattactgtaagataaaacacattcctaatattctatttattat

SEQ ID NO: 213519 - DNA, 706 bp, Cannabis indica
aaattaaaaattttaaaaaaattgtgacttttaatcaagttttttttttttaaaaaaatgatgcgttgtggtcaattatacatgaagttaaaactgaataattattaataaatgttaacagaaaaatgttaagtataccctattatatatttttttgaatgacccattataatattattaattaaaaataattttaagaaatagctaggaaagggtggaggaaaaaaagatagatacataatgtaattaataattttttttggagaattttatttgatttaattagagataattttgtagttagttagtttggggatatttttttatatagatatttttaattattactcagttaactcaataatcagttcaggtagggagatttatgtatatctttatatataaaaagtgcctatctaacattttttgtttgtttaacagaatatactttaaaaataaaagaatattctgttaaatttaacggaagattaacgtttgaagttaacacttctctaatcttatacgaccatccttctctaacaatccttctgtacccttacgattagtttcaaaagccctaacctaactagatctctaactcccactgccaatcgattgtaagccatttctccacaccccaaattccgatttgattcctggatatccgaacccaaatacctagatttctcaacttgggtatctctat

SEQ ID NO: 213520 - DNA, 726 bp, Cannabis indica
ttatattttaatgtcattcaaagactaatcaattcttgcatgcatgtcactttgttcttattgtgtttaaagcaaagcaaaaagttatatactacataaagttgtaggttatattaactaaaataaaaatatatagtactattgataagaccacacactagtgattgtattattgaaacatacttacctaagacaataataataataataataaaaattgggaaaattttttttttgtaaccaacaacataacacatcaatatataaaggagagttttaaaacattgaggtggcactctacaatccattcactttatctatcttttttgttaaaaatttacatttttatctattttatatttatttataaaaaatatacttaataataacaacaacaataattcaattaatacttttcacttatttataaccttcttcttattattgcatatttatcactaacataaatgagtaaaaaaaaaaaaatcagttacaactctttgattcttgcacattactcactatatataggaatataaatttgaagaagatgtataatagtaagtagtaacaataaccacaacaaaaattaaaatacgaaaatacatatctctatcatttttctaatgaattattatacataattcatatatatataatcatatcataacattgttaaatacaagaatacatatatgatcaagtataattatttatttttttttc

SEQ ID NO: 213521 - DNA, 525 bp, Cannabis indica
gcttggttaattcgactagcctgctgatatttatgacttgttttaggaatctgataaaagcttgcaaggaaaaatcgtaaactcaattgttataactatcgcgtactatattttgttaaatgataatggttgtatttttaattttgtttataaaactggcaattggtcatgagtgttgaaatcaaaacggcagtcaagtttagaatgttgagttttgtatgagcaaaaaaaaatagctttgaccagtatttcattaatgtaatgaaaagctggtaggtgtattacaagaaatgtcgtttttgctagcacatttttgtgctggcaataatttagtattgcattggtaacatggaatttacttttgatgtgttcgcaaatcaacgttggtattagaacttttgccagcacaaaatagaaagcgttggcaaaaatgacttttcccagcgcgtaaatgcgctgataaaagttagattttagccactacaaatgtgtgctagtaaatctttgacctttttaccagcgcag

SEQ ID NO: 213522 - DNA, 547 bp, Cannabis indica
gtacatcctctaatgagctcgccatgaagatcgacctcggatttgcactaatctttgaaaaaacattacatcaggtaagaaatccaagtcacaaattcgactggtatttctgattgttctctcttttttttctgtgtttatctctcttttatttctcctcacactcactaactctctttcttttctttgcatgaaccctggaacaacaacctcgagggattaactctcagatctgggcttctggttctggtatctctcaactgagagattggtaagtctctgaaccatctatttatagtaatagattaggttaaaagatgtgtaacaaaatttctgttgcaaaacagaaattcagttacacaacttgttaagctgttgagtctggtgagtgggtaaagccacgagctgtttttactttgtatttttctttcttctgtaaagctgtaataacaagtaaactaggggaggtctaatttaacataaacgatctcattaaaaaggataaaagttactgaattcatttccatatttctggcacactttctaa

SEQ ID NO: 213523 - DNA, 656 bp, Cannabis indica
aaaggctatttgggtgagaattgcttagaggtttatttgggtgagtttggttttttttttttttttttaactgaaaatggctattaaatatgtcaaaatagtgcatattcttattcttctcttatatcatatatacatgtaatattatatggctctcttctactttttctatatatagtgtttaaatattgttgtaatatttatttattttctttgttaacctttgtattttaaactacaataaaatttgtaattatcttaattttctttaattaatatgataaaatctctaacaccacaacatattttaatttttttacattagcaatatttattatagttattgagatttgagaatttttagtaagtttttaaaattttaggatttcataacgtattcaaaataagctttcatatttctagtgccaccatgtaattattttttttaattttacttttttaatcctaagggtgtgtttgataacactttcttaattacttttttatttttttaagttataaagtgaaaatatttctaaaatacatgtatttataaaatagtttccacttttctaaatgtttcaattaataatctaatttttgtaaaacaaaaaaagtacaatttcaaaactttttaaaaaggttttttaaatcaa

SEQ ID NO: 213524 - DNA, 1238 bp, Cannabis indica
cacactaaataaggcagttaattgattacacagtaattaaggaaactgttttatttggaaagttgtgctctcccttctccctatataaagcaacctttgttctcttctcttgtaagctaaaagccacgaaattcaagagagaaaaagagagaaaatttcgaaatccttgtgagatgagtagtgcccacacacatcaagtggtatctcaatcatagtatggaagactatggaaattctacatcaaagaaggagaaaagaagatccaggttcagatcttggtgatgctctgctacagaaaggaatcaagggctagagatctgaacggaaggagtcatattattccgctgcacccactgtaaggttttctaactttatatgtgtttattttcattgttttagaattcatattaggttgttaatccaacatacttgttagtaaatctagatcctggtaaaataatttccaacaattattccctcaaatcatgggatttgttgcaaatcaagctaagtaaacgaggcttttgtcattcacacagctatgagtatccctgctttttattgggtccggagagtgaacgtgtaattaaagatctacggtaaaccttatcccataggatgccacgctgagaatagagccaagttaactttgatggggagcagttgcttgtcatatgatttcccgagattaataatgtttcaactctaatactatattttctggtgtcaggatgatcttcctcgcatgcatgccatcatctagcgagataaacgcctcgccgtttgttatcttgactcgccaaactatctacactcatgttgtatatcgtgtaatgtacgctaagtttttttagtgttattgtttctcttccatacagcgaggttgaggcctcgtcatgcacacttgcactcacgtggtacctcgtcaatacatactctgctaattatgtttctttctcgcagaaggctattcagctagccgagttataaacatactctgcgaattatgttgccaatgagttgttccatgccaagtgtactttcgtttgcgtgtttgagtttttcgttcttcctagtgcgacacgtgtcttcctctgatgtgcttatcgaatttcgggtataacacttttagtcataagttttgttgagactaaaagtaaaaatttctgtagtgtctatacttcctccccaatatctttcaagtaggcaatgtaaccgctcttcgcgcgactaattta

SEQ ID NO: 213525 - DNA, 784 bp, Cannabis indica
gtacttatttgagaataaatttaattttagggaccccagagaaaattaaaagctttacatttggactgggcttataaaggggcccattataataacaaatgcaataacaacgttttggtcaaacgaaagcagattctcagccattttcattttgacaaagaaagattctcaagctttttctcgggtgaaatactcactggtacgtacttactactcatcattctgtgcacttaatctatgtactaacacatttctccattgacgttatcaatctctctttgctcactcacatgagttcttttctttttttagtaaaatgtttccagttcttttggttcttgatttttgttactatatgtagtagtgtaagtgtggtacagaatcatggattttttgctgagaaatgtaatgtatcaaccttgtctctgaagtgatttgtgcttattttacccttttcttttgcagttgaaaaattagtttgtagtaggatctttctttttctgcattagcacccttttggtagttaatgaaatttactcactgttattcttcgttgatttttctttgtgttgttttctctgttgagtataagtgtcccacattcatttttccctctgcgaacaaaaatatgaccaaaagtgcagaacagtgagagtgtggacttttctgctcatggggatgttaaaagttgatttaggtcaacattattaaaatgggttctaagaggaatgtcaattatataaattaaatatttattctttaaaggtgtatttaattataatat

SEQ ID NO: 213526 - DNA, 1295 bp, Cannabis indica
aaatgactttactattataccaaacaatgtgtataaatatcacttttatttatgaatatatgttgtaactaactaaaatgcatatatattttttttaccgatttttttttttcagggtgggcgactgccccacctcgcctctatgtgggtctgcccttgcaactaagaattagatctcatataatttaatttaataaattttaaaaaatatcattaattaatcgcaagacatcgtatgatgccaggcaccattagtaccatatagcaatgcttattaaataacttatagagataaatgctttaaatggtttttgataaatgtttttcatcaaaaaaataagaatagtttgattattaaagttttaaatggtttttgataatgtttttcatcaaaaaaataagaatagtttgattattaaagttttaaatggtttttgataatgtttttcatcaaacaaataaaaataaaaatagtttgattattaaagttttaacttttagatccaccttaaactcattttttctacatcattaatccaagtctctctctttcattccaagttttcttttttgtactttcttcaaagcatcgccagaaaagattttagaaaatctgattttagggtttctcatcattaatttatgttatatatatacaattttttttccctttagatataataaataattattatatattaattattacctgaccgggagatatggccattgcattagttgtgctgttttgagagcttggactgtgagttttgaagcgattaatctgatatgggtcaattgacacatacagattcttcaaaacgacatcgtttgaaccaacctcaacacttatacttgaacacttaatctcaaaatctgtttcttttggattcccattaatctcactcttaattgtaacatatctgtttattacttccattattattattattattattaagccttttggtacttagtgttttatgtataaatttatagaaagaaagaaagaaagaaagaaaaaacttaatagtaaatagatgacaacgcaagtggctatgaagtttattgggaagtcactttcaacttttgcaagtatagtattattctaattattatagaccacatatggaagattttaaggatgacataattttttaaggataaaacttatctgggagaaaacaaacaacacatattgtttttgtatttttttcttcttaaaagtatgtatatatatatttgttagatatgatccactcttttttatgtttttggtatccgatcgattgaat

SEQ ID NO: 213527 - DNA, 446 bp, Cannabis indica
aaattctaacacggtatcaaagccacttgtgatccattgtgagcccaaatttccaactgtccaaaaagccgtttgtaattcgttgtgagccaaagtgccgcctgtccaaacagatactttagctgtctcccctttaacctccatttgggacctttcggccaatgtgatatataagatgaatgggctactcctcttattgacaattagttttgaaatggaacctcattcaccctattcacaaattctaacagttttctcaaatggtagattttgagttttcttatagaattttatttttagattttctgatagattttcttttctctttttgatgtatttcttaatatgtatatatatgtacggaagcacctccatcatttttggtgtaacattgagaatgaacaaattttcatagaaagaaaagtaaggatttgggaaatattatt

SEQ ID NO: 213528 - DNA, 530 bp, Cannabis indica
agtgttcttgatgcatgtgtggaaaattgaaataaattgatagctttttgtttgtttgagcttgctaaattattgagttatgcatctagatggttttgggagattttagggctgtaaattgaggttgaatttatggattttatgcttggatttctgagttttaagcttgaaggtttgaagctttgaagttcaagcgtgaatttttgagtaattgtggcactttgtgatttttgatttagttttggtttctgtcaattgggttatgttttattgaagggttagacctaattgagctgttgctattgtttaattgtatggttgagcaagtttgagttcaagaactcaaagcttgctcaacaatgacactttttgattcttgttgcaattattgtgtttgagctgtaaaatatgttcattatattatatgatgatgctctggaaagtttggtgatgattagggaagatttgagtaggttatgggggctttaaagttgagatttttcgtgtttttttctgcccagacaaccgga

SEQ ID NO: 213529 - DNA, 716 bp, Cannabis indica
gatatggtccttagaagagtgatcttaaacacaaaacacagcacagctggcgtacttaacctaactaggaaggaccatatcaagtaatagaagtcacagattctggagcatataaacttagtcggtataatgaaaacatggaactggttctggtaccaagttattggaatgaggaacatttgaggaaatactaccaataaatgtacaaggtctaatgacccctacgaagtacacaatgctcgaacatctactcttaagtaggtggccaactaagcagcgttcactcaaaggtttggaaaaaataactggtactcaagtcggatgaccaatctctaaagtacagtctgttcagaaatcatcgctcttgagcaatgtctcttggacagactataatgttcaattattttatattttaattagttaaagatcaactagatcatgtaataacttttataattcaataaatgtacgttactacggtaacaacacatccagacaaataaatgaataaagatattaattatcattctaattgtgtctattttttttcttttttatagcaagttatgtaattactattaaaaatgcatacaaaattgaacttgtgcaatacaattgaccaagagtcataagtctgctcggtcacttggggaaacctatacacatacaaagcatggataagtaataagctcgaaaaacaaaacatatttacatgt

SEQ ID NO: 213530 - DNA, 550 bp, Cannabis indica
catgaaacgcatgcgactatatcggttgtgtattgagtattcatgtactgacaacatagaactcgcgggttctggtcaagttgtcgagcatagtactcattcaaacctaacgcttgtaaagttgcggtctttacataaggcacgggggagaaacacatttctcttcatatgttttctacatgttgcgattgtgctaacttctttctacgtcccgcttttattcaattactatgcgatgtatagtgtgctactagaccctgtcttggtcgcacattctcacaaattttgaccatgcgatgatatattttgggaatcattcccttatcatgcccctagttcttgcgatgacaagttgttgtctaatcgttaaactttacttgaatatattttaaaatataatgtgtgttcggatatcaaatagtaattacatataaattattattttcatattgggcaaatgatttagtaattacataatttaataacattaattatctaaaattggtcttttttgtaattacgcttaattcatgggggccatgagaattag

SEQ ID NO: 213531 - DNA, 582 bp, Cannabis indica
atgtttaacatgccgaaaattgcgttcaagcagtgtgttgcacgcgtgactattttattttatacgcgtgtaaaatagactgtttgaacattgttttctttattgtaaattattccgaatttcttaaaattttgtaggatatcttaaatagctacaacgtacatgaatatgagaaaacttagactaaaaaaatttctggatgccgaaacaagtagagggtgcatcagtacatcccttttaagagggtggaccgtagaatcaccctaaatttttttacaaaaatagtactttaactaaatttctcatgatattatttatgttacaattttaaaaatagcacttaattttgttcactagatttttacaaatattctcaacccaaaatttggtggttagtttacacaacaaactgaaaataattaagatgagctcattagtatgctatgatgaaagttggcgaaccaatatgttcttgttgttttaaattagttgctttatgagtttgtattttagaagaaataaataaataaaaaggattttaactatgatcatcatagagttttgctctctctctctctctct

SEQ ID NO: 213532 - DNA, 1494 bp, Cannabis indica
ggttcattcaagcatatttaaatagatttatacgtcgtgtgcattccatttagattaagaatatatatgtgtaatcatgcttttaatatatatctcattattcatgttactactttatcatcattatattctactaccagtcttccacaatgactagaagtcttacctaaagagtttgaactttcattctaatatattgataccaaaaaattagattgacaaaaaaaatatggaattaaagacgaatactgggaaaggttattattgttcattagaattggtcccctcagatggcttattaaatgttataaattagaatggtcccattggagggattttatcattgaactaaacaaagaccagatatttggtcagacatatactttgtttttacacaaaagattcatcgagaaatggaggacatgtttcaagttctatatcagcacaaattaaaatatatattaaagtataaataaaatataattaatagcaaacatgctgtctgtaaagccaaatccacataccaaataccctttaattagccagcttaaaagattttggtcttcctctattttgggagttctctaacttttggaggaggcaaaattccaacatctggcctctcattattagctttttctctcctcaaacccaaaaaacaagaagataatgataacgataattaaaactaaaataaaatatatatttaatgatattattaatcaaactattattagtattatattaatatcaatattattataatgtgttttgtaaccaaggcttgggaacaagagaagtatgtacactctggctccatttgcctaataaatgccctccttttagctttatgctactacttgtttgattggaaagtttattagttttcttatggaatttaattgatattgaattgaatctttgattggctaaagctttgaccaacataataatcatgtggggaataattatatcttaaatatattacttaaatacggacatatctataagaaaacttccgtacaatatataacacaatctttatggtgttttaatgctaattaatttaactatatatataatagttctttattgtctttcatatggaaacaagaaactcattcaatgaaaacatgcatggctccatacctttatccttaactaggtaactaagccgcgcttcgcgcggtgttgtttaacttttataatctttatttgtatatatatttattatacttatattgagtgatatatctaaatataatattttaatgtgtgtatttaattatttatttattaaaagtttttactattttattttatggtgaccgttaaataccttccctacaaaatgaatgtaggatgacaactagtaaaagggattgtcgtaacattattctttttttaaaagtttgaaaatttgcgagtatttatataaaactattagtgatagatattctatacaaaatgtttagataagagtaattaatttaa

SEQ ID NO: 213533 - DNA, 900 bp, Cannabis indica
ttatattacatatatttattcttatataaaagaataaaataaaaattataatgtaaaaaaatggtaacttcataatatatagtgttgtacagtttgaaccgcaattattaagttcaaaactgcaactcgcaccgtatcttgcagtttggtaaaaatgtaaagtacaaccacactgtaaaagtaattttaaaattgcatttttatatgcagtatagtacggtacgggcagtttgtgcggtgtgagcaattacgataaacactcctgattaataaccccttgcaagtttacgtaaagggaatgaggatcaatggtatggtattattgattctcatacaattggtttacttaaattttggaaagtaagaaagtagtagggcctacacaaattagggagaaaacaaaatggaaggttccctctatttttataagaaatatctttccctttcataatttaatttttttttaattttaattttattaattaaaaatgaaaaagttatatattctttaaaaatctataaacaaaatataattacatgttttaataataacaattttatcaaattacagcattttgattacttttcttaattatgtaaacaaaataatatgattctaatttttttttcggacagtttaataaatagcataataaaatattatttttgattattttgtattttaaacggattcatttctattattctaattccaattaaacactccattagagagtaaagtgacaagtcatcaatgctaattttttttcttttttgagaaagagtgagagagtcactaatgttatgggcctatgacacagtgaaaaattaaagggcataacaaacccaaacctaaaactctcgacaacttgaaaagctaaatatggtaatcaatcgcta

SEQ ID NO: 213534 - DNA, 802 bp, Cannabis indica
attcactcaaaaactgaagaaaattgctactacatgataaccatgtgcacgtatatatatatatataatatatatttaatttttttatttttccagaatatcattgttactattaaatattctttttacaaaatcaaatgcatgaatttatatttatgtacactaactttggtttttgttttttgttttttttttaatacttttcactatctagattcgttgaactgatgataagagcgtcgacattattatgggcgacatgattttataatattcttctttcatgctatataatttggttaataatgagcataaatatatacacaaaattttatacaaatggattcaaattaagtatatatgttatcaaaatagttatatatggttctctctcaaaaaaaaatagttatatatgtttactttcatttataaatatatatatgtcaaatgcatatataatatatgtgataacagttacaatgatatttttggtctgatacaaattataatgattgtataagtaatactcagggtataaacaaacaatcaaacttgaacaattttaagtaaacgtttgggcatgccatgtaaatattattttaaattcagtgctttgtaaaaattattagttttgttaaataataaaataaattttatattttttaaattgtacaaatataatattgaaatgattttttgtcaaaataaaatttaataatgatctaatttaaaaatattatgataaaactatttatattttctgtatttgttggtattagaaattattttaaaatttattata

SEQ ID NO: 213535 - DNA, 529 bp, Cannabis indica
cgtgttgaccaatccagccttaagctaccattcactgataaatgacatgatttaaggctctcattataatgtgtaccaaatgcttgtatttgtgaaaacagcaacaaaattgttatttacttaccgaataatgctttatcaagactcttgttttctaggtactcataaacaagaagtcttttctctccctcaatacaacatccatacaatttgacgagattacgatgttgcacagcagatattgtggcgatttcagcaacgaattggctctttccttgatgagaagtcacagacagttgcttcactgcaataactcttccatcttcaagtgttccctattgagttataagaaaatttgtataagaggaagggaaaaatctttactttgaccaatgagcaattgtgtcatcaacaaatgacaaaccttgtagacaggtccaaatcctccttctcccaacttattaacagaattgaaatcattggtagctgtcttcagttcattatagctgaaagtgaatggtttaacatc

SEQ ID NO: 213536 - DNA, 998 bp, Cannabis indica
attggatattatatttagtattatttcaatttttaatatcaatttaacttaaaaattaatttgtaaataattttttttttaaaaaaaaaaacaattttaccagcgagtaacatgcgccggcaaaagtattatataaaaaaaaaaataaaaaaaccttttcccgacacatggatcgccggcgtagagaaatttaaaattaaatttaattttttaactacgttttgccgacacgtaaacgcgccagcaaaaaacaggcgccaaatgccctggttcgcgccaaaacctttgccggcgcagtacatcgctggcaaaacatcgtcagagacacatcagctggcagatttattgctggcgattacgttataccggcaaataaatgcactggtgtaaatacttttaccggcgcaggtcttgacgtcgccggcaaaaggtcattcgccgacaagctattgccggcaacatttgccggcgacaattggcaatggcaaacatctgccggcgcgttacacatacttttgccggcgagcttatgcgccggaaaaagtggcttttcttgtagtggtatcgacaacaccttgccggacagtatatgtctagttggatggaagataacatccccatcctttcttcaattcccaaatgaagtggtcgtacccttctcttgcgatctgctcggagtaagagtgatgttgcactacaaatttttgagtaggagaacgatcaccactcacctcccaatctttaaagctcgagttagaaagtccgtcactcgaagacgacggactagcacgaagacgaggttggtcctcgtacagaagttggagcaaatcctagtcaattcggtgttcaccttctcaaaactcacaagagttcatctacaaaagacaacacatgagattagtgtttggtcgggatatcgaacaataaacaggaaaaagcactgaccaggacaacccaacaagattaaaaggacaaaaaacgcacaaaaaattaagtca

SEQ ID NO: 213537 - DNA, 1040 bp, Cannabis indica
tggaaagtttagttgaatttggggtagtttggaacaggttttcaaagtttggggtttttctcttttctagaaacggtgaaccggtttttctagcagaatcccaaaaaaggtaagccatttggggtttcgattcacttgatttttaatattagttttttacgttttagtaatagttagggtattgccatgctatctatcgatagaaaaatttttagttttgagtttaagtccccgaaaagtgatttagtgggtcacttaccagtttatgcgaattgcgacttagggccttaaatcgccgagcaacaatttccacttaattaggttgatcgacacacctgaattcagaattgaggtaagattaatatactaatatgcatgtatattaagcgtacatgttttatgattgccttggagataacatatcagtaagagcagtattagtatacatagagttgcactaaataccgataaatatatatttagtaaagtatggattgaagctatcctatcggtacgactataatactgagtagcggctgatattatggtcaatcgtattgtcctacgaacattccaaacttaattagtacgcgtggacacgagaaaggattgtgatcacgatatgggcacatgaccacgatatggttatgtgattatgtacgcatgattaggtgtatgggaacctgaccacgatatggttatgtgattatgtttatgtttatgcttttcttactgagtatgtcaactcacatatattgtatatatgtataggtataggaaaagaaaaggctgagcaacagtgagctcgagatgaagattgtacatattgggctgttagacctagacctagagtgttcagatctttgggaaagtagagcttcattttgatagtcactaggcgattacttttgtatacaagtattttagaaaacagttgtaactttttaaaatgggatctcaaaatatatgttgtatatagttattttagtttgatttaatttactaaaattttaattatttgtgtttttcaataaactctt

SEQ ID NO: 213538 - DNA, 727 bp, Cannabis indica
ttttttttcttaatatttatacggtgttctataaatataacacgaaataacaagaaaattacataaaaataacattaaaacaacaacaaacaaataacaaaaaattaataaaagtacaacataaaaatatatcaaaagttcatattttttgtaaataacattataaaaattataaaaatatttaaaactccgtataactgtatttttgtaatttttgttatttttgtgcatttgtgaaataattccaataattattctattcaaataatattccaaatatattaaaattgtaactcaaaaatgaaaggcaaatatgtgtttttctaaccaaacatgaccctctatagagcattccttatggtacttcactattgtataatctaatcgaaaaagtatggcagagatgccaaattttactgagttggaattccactgaccctcctttttagatagtgtaagtgtactacttaccattctatttattatctagttgttgggtagatttatttacctttgttaatatcacaacggttgataatattgtctaaagacaaaaacataatggggtgctttttaaaaacatgattattcatttgaatatgtaactaaaatccatcccatctcacgtcaaaaaaaaaaataaaacaacactaccacactctacttctttttttttgttttttttttacatttttttttttagttttttttttaggtttttaggtta

SEQ ID NO: 213539 - DNA, 775 bp, Cannabis indica
agaaaagcgtgcatatataagaatcaatagtagttagacctcacggtcattacaaaacaggtgttccgggatagagaaaatcagaatacaactgaatttctggtgggtaaatgcccacttagccacattatgggcgataaaattacagttcctactaattttagaaaaatacaactaacaaaataaggagatgatctaaaacaaaatgagacatagttctcaatctcccatcgtggaacctccctattgagagcgttaataactaccctcgaatcattctcaacaataataaactttaaaccttgatgcttcgcaacattcagagcaagacaacaagccgccgcttctccacataaagcatcaacaaactccaacttagaagtatggatcctaatcaccctaccaagatgatcctttgcaatgaccgtggtacacatgctgtccaattctactttaacatcataatttagctttaactagtcctgagggggagggcaccaggcatccaacagacgcagaggcacgcaggggaacaaagaagcatggtgaactgcaaaagaagaacgaatattgtctatacatttaataacatcaaccagcccattattatgtaccttttcgtttcggatccgccagatagtgttcacggttaacgaggcataaaggaaaacctcctcctcattaatatttaatacccttgtttttaaggtcccaaataaatttggcacagtcccataaacgaatactagtaccacaaattggataaataccccaa

SEQ ID NO: 213540 - DNA, 793 bp, Cannabis indica
aactaaattacagtttcagtaagagcattgctattgggcacctgtggtgtctaataccttctatggatagcgttacacgattggttagcaatattctttagaaattattttgttaagttatatgagatttgatatttaatttcactaatagcgagaagaaaccgaaaagagtgctatagtactttttagcaactctcctttaaataattttaggtacgaagttttgcggctaaaaaatcattcattttttatcatttacaaatataaaattgggctttttttcataaatgtacaacaaaaacaacataattacaaaaaatgtgcaaaaaaaaaattattttaaaaacttatatattttgaaaacttattacatgaaaccatacattttaatcattaaataataaactatgtttattaaaactcaaaataaacaatttcgtaaaattaattaaacagttttataaaaataaacaagttaattttttttttattaaaagataaatgtttattatctattttagtatgaattattataatttaataagatttttttttaataaaatacaatatcaaaattataaacattaatgtatataaatataaatcaatacttaaaattactaaaaataaacatgacacatagagtgatataataaacatatctgaatattattattttgtttattaaattagtatgtttaataatagaaaacaaaataaaacatatatatacaaagtattttatattattagtatgtttattataattgtaaatataaaaatagacataagc

SEQ ID NO: 213541 - DNA, 923 bp, Cannabis indica
actgttaccgattgtaactctttattcttgagcttgtatagatagctcatactctgtacattcattgatcgattcaatacagagaattcttttctcattttctcttccacactctaagaactaaaatgtaaacattttagtacaaatataaaacaaataaaaaaaaaaaaaaaaacatgcaaacaacatatagtacaatgttgtgaaaataacataaaaagtaacgtcttccataaatgtcaaaaacaaactggagatccatatttttgtattttttaattattatttttatttggtattttgaaaatatctctaaaatatataagttctttgtttatttttttttacatttatttgacaattaataaaataaaatctgtttttcttttgaaaaaaaattataaaaatcaatattatatgtaaaatttacaataagataaaatttaaggcgaaattaacataattttatcctgtgatatttgaatttatattaagataaacagttaggggcaaaagaaaactaattataccctaccacttgggatgcatttaattaatatatagacaatatcaaaagggataaaaagcacactaggcaaaatgacttattaattaatattaataaaattgatgaggattatttattttatttgaaagcatggatattcttaatgaattattaagaaaccatatctattatctacatctaccaaaatgaacaatacaacgagaaatacaatcaaataaacgaatgatctgagatttttggaagtcaacttgaaaatatttgcattccattaaagtttggtggttgaacatttaatgagccagcctaaaactaaagtttctagttaagcaataataataataataaaaaaatggtttctacaagaaattagggtcagacaattatggtatacgtt

SEQ ID NO: 213542 - DNA, 630 bp, Cannabis indica
ttagtgacaacttatatctaaatattatattattatcactagtaattttttgctgtgactaaaagtcacatttaatatcacaaaaaatttatattgtaattaaaatattgtcactataaagtaacaattttttagaaagagtatgctccaaaccaggcccggccctgggcataggcgggctaggcctgtgcctagggcccactcagcctaggggcccaatttttttttcctcttttaaaattatacatttttttttaccgattttgaaaaataccacatttttctaacataagggcccaaaatttttttttccctatggcccactttgtttcagggctggccctgctccaaacaacatactttattttgcaaattattaaggtacaataaagccctacgaaggaattcttttagtttactaataagattcatattatggaaaatgtagggtgataaatgatggactccaaaagatatatccaaataaaagaactcgtattcaaaaagagtatgggaagaaagaagtcgatgcatgaaagtaaaatgaagaatgtgataaatttataggtgtaacgtcctcgcttcaagcttttattgggtccatacccccacagaatgatgattcttata

SEQ ID NO: 213543 - DNA, 707 bp, Cannabis indica
tatactaataaaaatttcccataaaataagtatccaccacaaaaagatttgagaattgttattagatactagtggtgtttgtctagtaccttttacattatcgtcttgcgattagctaatgatattccctaaaaattattacattaaactatatgggactcgatacttagttagacgaatagcaatattaacacataagaaagtgttaaacactgataacttttatcatttctcaaaagacttaaccatatagttaatttcttaaaatattttagcatcaaaaatcacaacacagatatgcgttgcataacaatattagaaaaaaagaaaaaaagaaaaaaaagtaaaattcccacataataaaattcaaatagaatgttagtattttaatgagaaaaaaatactagccccttatatttactaataagtaataggaatcaattataaggtagtcattctcttatatttatttatttattttattaaaattagaaaatttcattaaatatggtataaaaaaaaagagagagagagaatactttcccactaattttttaaggaatatcatcaaagtaatgacatatgtttatttttcatttttattttttaatattaaatatacaatgataattttattctttaaaatatctcttataaaataacttatgtacattatagtttaaataaaagggcaatttagtcaattt

SEQ ID NO: 213544 - DNA, 1200 bp, Cannabis indica
aaacaagcttaaattgcaactcagtcaagagttttaaatgaaagaccttggtaatgcaaagaaaatacttggaattgacattcaaagaccctcatcaaatgttataattctgtctcaaaagaactacttgcagaaagtgttaaataagtttggaatggacagctccaaaatagtttcaactcctcttgctcagcattttaaattgtctagttcccaggcaccaacaacaaatgtagagaaagagaagatgagtaaaattccctatgctagttgtgtagggagtttgatgtactcaatggtttgtacaaggcctgatttagctcatgccatgagcatgacaagtaggtttgttgctaatccaagaaatactcaccggactgctttgaaatgggtgatgaggtatataaaaggtacattgaacactggtttaacctatgatggcattagaaaattcaaggaattggggactggttatgttgattcaaattatgcaggttgtttagacactagaaagtcattaacagggtttgtatttaatgtctatgggggctgtgttagttggaaatctaacctacagaaggttgttgcactatcttctatagaggcagaatgcatagctgcaacagagggcattaaagaagcaatttggctcaagggattgacatgtgagctcaacattaactcaaaggatgtaactgtgcactgtgataattaaagtgcactacatctcatgaaaagtcccatgtttcatgagaggactaaacatattgacatcaagatgcactttattagagatgtgattcaatcccaaatagtctccgtaaggaagatcaatactcatgataaccctgctgatgcttttacaaagagtttgactaaagacaactttagactttgtcttgactttctcaacatcaactcaaactagagtctcatattgaaattcacattcattggacattggattcagttctattggttactattatggcttggattaccatgttgttaaagtgtactaaaccaggtgaaaattgtggggtttagaacacttaaacaactaactaactaccttgacagttggcagttatttcgattagtgtgtgtcctaactaacctactgctataaatagaaaacattacaactaatagaaagagagagatcaaattggtgagaatgatacacaaagaagaatgaga

SEQ ID NO: 213545 - DNA, 701 bp, Cannabis indica
attccgctgcacccaatgtaaggttttcttaaactcttatgtgtttatttcattgttttagaattcatatgaggatgttaatgaaacataattggtagtaaatctagatcctgataaaatatttccaacatatctcgtacggaggataaacttggtctgcaaaaagttacacattcacattaatacattaattaaaatttaataagaatatagtgaattaaaaattaaaaaatttattacaaaatacctcaagtctgtcccacaatgcattaatttaagctctactaacatctttccatttgaatttattcacgtggatggacatgcgaaccatccatttacacatattgttgaattttttttttctttttttgccgactcgggtgcccgtctctgaatgcaattcaatgtgtaacttggcagatggtgttttggagagctctgacccttttttttttcgaactgctaccacctagtgtagacatactacatatacaacacatatttttttatttaaaataaacaaccatattcaaaacatattaaacaagaacgattttaattttgattcctattaaaacactgttacaattacaattaatcatcatcatcatcatcatcagttacatatacagcattatcatcactgtcactctctaattctaagaagttatcatctcggtatttagaccctcggtgtc

SEQ ID NO: 213546 - DNA, 1062 bp, Cannabis indica
ttagatttagatctccattaaagctattaagtttctccaccttcatctctaaatctttagacttcagagctcagattacttcttcaagattaatctcgattctcccatactttattgcagtcgtcacttccgtgtaagactctagcagtgaattgagaataattatagcttgattctcatcactcaaagcttcaaattcccctaagtttgccaactctatgtgcatccttaagaactcatttaagttttgttccagactcatcttgaatccaaagattaattcctacaagaaaatcttgttggttaaagaattattctaaaatcgttgctccggcttcttccaaattttagctagtgtatcctccttatcaaccaacctggttattaaattagataggcaaaaaattattagtcttgttgttgtttccagcatttcttccttctaagcctttgttgtatatgctggccattcaataggctcacttagaatttcagcagcttgttctgggcacctgaaccatcaaatttatcaatatccattttcatggaactcaatgtacagtgtaatatgattaaatcaagaaatgtaatagttaggtttagaaatatccatatataattctgaaatatatggaacacggtctattaattcttaatattcttgatttttcgtttcccttctttgattcaattcttcttagtttctattgtagcttccctgtcaagtaagaaattctgaagctatccctacacctaacagaaaccaaattaagtattcaaggtcacaatttacctttcactcctagtcaaaacaacgtttgactccaatcaaaactacaacattttgatcaaaacacaaaacttccaagaacaatcgagaatcccccacaaaactcccaagaacaatcgagaatcccccataatacgcaacacataatcaaagagcgcgaaacactcgcagagcttcaaacttgaagctctgctcaaactaaaaattaaatcaaaccaaacacaaattgctttagatctaaatcgatctgtgtaaaggaggatagtttgtta

SEQ ID NO: 213547 - DNA, 554 bp, Cannabis indica
tctcggggtctccgtcaaggtgattccctatctccttatctttttcttatttgctcggaaggtttatcttgtctaattcaagcggctgagagggctggcactattaatggggttcggtttggtagagatggggttaaaatgtctcatctattctttgcggatgatagcttcgtgttccttgagggaaatattgatgaatgtgatactatgtcccacactcttcatcaatactctcggctatcggggcaacaaatcaatcttgataaatctgaagtgagcatgggcagccgcatttctcatcaattgggtcaaagcctagctagtcgtttgggggttaaacttgtcacacatcacacaaaatacttggggctgcctagtttcatcggtagaaggaaaaaagaggtgtttgaggtaattaaagataaggtgtggaataaactcaaaggctggaaagcttcaatgttttcccaagcggggaaagaaattctaataaaggcagtcatccaagccatcccgagctattccatgagttgtttccgcctcccaaagaagct

SEQ ID NO: 213548 - DNA, 445 bp, Cannabis indica
caaatagttttttattagcgtcgtttttaaaacgacgcgaaagacaattatctacatttataaaccgacgcaaaatatgcacttttctattttatcttctgcgtcggtttagaaataatgtaaaattatttatggtattttaaaactgccacaaaacacttattacgtcggttcgaaaatgccatatcgattgctaaaatactttttttttacctattgcgtcgtttataaaatgaagcacaaatgtaggtaaggaaaaattgcaaatttttatgcaattttcgccacatacaatttttgtaaaattttttctattttatagtatttttgtaagtttctctttaaaaaagatattttataaataaattagaaattatgtaaattattttaattttaaaaataatttctcaaaatttcttttaggaaaagctacatagtacatatc

SEQ ID NO: 213549 - DNA, 879 bp, Cannabis indica
caaaagtccttaaatttaacaatctcaatagttcgaggggaatttttaacggccaaaaaagtttagggggcacgatttactacatgtcaaagttcagagggaaaaattactaattagtctttattttaatttctaaatttatcacaaccattcaatagtgatccaatgactaaaaataaatgtaactatgatttttacatatttgatgtaaccattaaaacctcttctattaatatatatatgggtatagttttaatgagtattacccatgtataagtatcttatgattaaccattacatcaaatctaatggttggtatttatgattattaagtcaactttaaaaattaatatttctttattttaaccttattacttgatgacatgacaattaatttttttttccttcttttctttgattctttctattccttcatcattcctaaaataaatgaaattattaaagaaaaaaattattttgtgtatgaagaaccaaagaagaaaactatacgattatttaagaaactattttttgtatatttaaaagattaaaagaagaaaaaaaaagtgtacaatcccaattttaaaaaatattattaataacctactatattaagttattttttggtcacatttttttttttaaattagaaggataagttttttttgtttttgtttttagttgtagacaatatgtattagtagatattaacatatcaaaattaatattattatctagttaattttttgtttattttaattatatatccctattttgtaattattaagattttactattttaagttattaatgtaacatttatttaatttttaaagttaaattagtcattttaaaaagtaaaagtagtttttttttttt

SEQ ID NO: 213550 - DNA, 630 bp, Cannabis indica
atctacaacattgtctcgtggggtaataggtctttgtgcatccctcctagtttgttactgtgtaggagggggtacattattcctcctattctcaaaacctgaggttgttactcgtggtctttgttgggatggaggacgctcgctcctcccgccatggttttcgttctcacgagaaggtcgttgtggtatggtactagcatcacgaccttgggttgttggtgacctagatctctcttgaccttcaggagggtaacatgttgaacgactcccacgtggccgtccccttctcgttgtaccaggatgcccgcgaattcctcttctttgtggccttgtggcctcctgggctccatacctctcttgccactctctgttgagtctgagagtttcatctaaatgttggcgcaatgcctcgttctccacgaacacctcatggacattggtagatcgccgtacaccatgggatggtgatgatgagcatcctgcatcttggacttgaccttcgtcgtcaggcatagcttgtttgtctagacgtcgagaggtcccttcgccagcgggctcagcgggttggtactcttcatggtgttccacggtgtttccttcgttcatagggtcatcatggtcctcctcctc

SEQ ID NO: 213551 - DNA, 990 bp, Cannabis indica
ttgagccattcatttgaaacttgctaactaccttttcaaggtagtttttctgacttagaaacagagtgttctccttcctatccctctggatattcatcccaagtatcttacttgcagcccccaaatctttcatttcaaattcagatttcagaatctctttaattctttctacctttgttctttctttgctaatcaatagcatgtcatctacatatagtagaaggtattcagcttgaagaatacttgaacctttgtagtatagacaagtgtcatacatgctccttacaaaaccatgctgtgtaataaaagagtcaaatcttttattccattgccttggtgcctgctttaatccatataaggattttttcaagtgacaaacatagtccttagcacttcctttttcatagccttctggctgttccataaagatttcttcttctagatctccatttaggaatgctgtagtgacatccatttgctcaagttctagatcatattgagcaaccagtgcaagcataattcttattgtcttgtacttcacaactggtgagaatatctcattaaaatctatgccttctttttgactaaagccctttgcaactagccttgccttataccttggttgttcatcttccctcattcctggttttaccttgaaaagccatttgcagcttattacccttctcccatgaggtcttcttatcacaatccaagtcttgttcttggttagtgatcccatttcatcatccatagctttgttccaaagcttggcttctttacttgttattgcttcaagatagttctttggctcaattctggtcagatcagtagcagttataaatgcatatgcaagcatgtcagcaagagcattaaaccatatctctgtgttgcttttggcacccttctttccctgtctcgaactagctgataatcctgaatatttgaagcattttcttggtcaggttccatgtcttcttcctcatattcagc

SEQ ID NO: 213552 - DNA, 548 bp, Cannabis indica
gaatgactctcacacagttcacaatgttctcctgttgccaatcccattgctttcaacctgtccttagttctaagtcttttttggattgccaaccacataataaagcagtgtttaggagtgtttaaccttccccatacctaccgagaccagtagactttgttttgggttgggcaaagtaccttgtagccttcctcaatctgatagtgttgagtaaataactgttgtccagcttttcctttaaagtgttctttcaagttaacaaggcttctccaataccaactacaatgatctgaagccttgtaactccatcaatctctatccttgagatagacactatgtatccatctcatccataagatatcctgtttttgagcaattgcccatatatacttccccattgcagctcggttccattcctgtattttcctaatccaatgccaccagcagttttagattgacacattgattcccatgctactaaaccagggcctgttgattaagcttggtctttcaataggaaggctttacaaattgattcaagttgcctc

SEQ ID NO: 213553 - DNA, 809 bp, Cannabis indica
tctgcaaaaagccagatgattgagtttaagttcatcacatctatcatgaaaacaaagccttcctctccccaatctcccatcaatcttgacaaatattccaaccccattacaaagagtaatggggattatacctcattttttacaaatgattaaaactcaatttaacacgattgttaaaggaatacgatcagacaatgcaaaagagcttcagtttccccttttgtttaaagaacttggtattatgcattaccactcttgtgttcaaagactacaacagaattctgttgtggaaagaaaacaacttacttaatgttggctagggccttactttcttgtcctatattcctttgtgttattggaatgactgtgtggtccactaccacttatctcataaataggactccctcaccctaatctttaacacaaaaccccttataagatattaataaaattaatattacgtgaactactaaaaatttaccaagtgtaaaagtgtgtacacgtggacagtccaccgtggtacttaattgtgatttttggacggagggatacagagctaaacaaaatgggagtttaggtagttttgcccctaaaaaatcaatttttgtggttaagtgttaaaaaatttaaaatttaagtagtttagccgcctaatatccctttaaaaaatgtataacataaatgatttgattacatataattaggaatgtacgcgggaacccgctcctaatgaagcagggattccccgtttaaatagggaatgagatggagatttggggatggggatcacactcattgtctcgacgtag

SEQ ID NO: 213554 - DNA, 1580 bp, Cannabis indica
actttttttttgttatttattttcaaggtctttgtaggggagttcaagttgctgttagatagaggttagaattttttttttgtacatgtatttttggcttttgaaatcataacaatatcattctaacaataagaacaataaagtaaaaaattctaatcatattatgagaataatatgtttaagtaaattagatgtaatatatattatgtttgaatttttttatatgtttatgtttaaattaagttctcactgaaatttataaagtaataagtatagtagataatataatatattactaaagtactttttgtgagttattatttttttttttataaaattgaaatttcaaagaaccaaatagttatgtttttgtcttatgtatgttgtcaatcaattttaaatgaatgcaaactgttgttgtgcaatctaagcaaaagaaaaagaatgttgttgtgttatcttttgtttctttttaggcttcaatactgcttcattcttgcaagatcgtttgttgtgtccttttcggttgcaatttccacatctgatttgtaattgcaactcaattatatttttgtatctgtctttcttaggacggccagcaggtctcttatgctttggtggcaacacaattctttccttgatttcatctggtatatcccaacttgttggatcacctaatggtaatattgtttcttcataggttgacagaaacgattgttttgtgtagtagtagggcaatagtcatagcaagaaccatgcctctttgttattacagccattgcatgtgaacaaggcatttcatcaaattgaaagcgttgacatgtgcatgtttttttctccatgtctactatataagacttgttcacgtcatggactaggtatatcattagatttgatgtttcaacctgcatttgtttagaaaagtttgcatgtgttatttttttaattgaacatgcataaaaattacagcaattaaactaacaccctattcaaacaatacttgtatgaaacaaacattcaaacaaaataccaaacaagctgcttaaaaaacagcagcaatggctatcgtatacgagaccaaaaccaaattctatcaatattaggggtccatgtaaaattgtgtttttctcaatcttgtattatacatgagtaggctttgaacgaggaaaagtaaaaatagttcaataaaatggcaaatataatataaattaagaaagcaaattaaatgttcaatcctaattgacagctcaaaatccatatgcaataaaacacaacaccgttacaacgatcagatgcattttattggaaaaaagtttgtatgtgttatataattattagattaaatttattatacaaggcaacatatcttatatttgaggctcatttgtctttgctgcaatagtgtttcttcaggtatttttgccagttttgtgaatgttcccaatgctctattcttgttgttccaataccacttttgtacaagactgtagaggcattctattaatttttcaactggtaattgcctgatttctttgattgctgaattaactgattcaactatgttacttgtcatggttgca

SEQ ID NO: 213555 - DNA, 726 bp, Cannabis indica
aaaaaatttaaaaaaaaatattcagacatgtattttcgaacataaaggttgactaaaaagttgtaacatgaaattaacggtagcactcctcttaaattaatatcataatttcaccaatctaacttaacaaaaaaattatttgttaagcacaattagccaagtctcaacacattatgataactaatttaaagtactttacctccaaagtttgatataagaaactgaaggaattatcccatacaaataacatataatgaaacaaatagggacgaagatagaggcagcaatatggtaccaaaatgatataaacatacaaccccgcaaactgataagcaattataaattacccacaagtaaatccaaatactatccaagtccatccatatgaaaagctctaatatctaccaaaagtagttgtgaggttagctaagccagttacaactaaaatacattgaaactaagaaaaattttagtgctcgctgttaccaaccagaacttcatcatttgaagacacattcaaatttctaggtggaaatgaagcttcttctgcattttgcatcggctgatgagtgtgttacacaaggaaagttgtaacatatggaacgtcaaagatgtaaatagataaacgcaagttttatgtctataaatagctcatcccttctgagatttttccacatacgcctgcaacaaaaaacaaaaatttatataaaaaaagaggcaactgaa

SEQ ID NO: 213556 - DNA, 761 bp, Cannabis indica
caccattgcatgccccataccatggataacatgcatgcataactcatttttttttttttttttttcagaaattcgaaacatatatactataatggcatgtttattaataagcaataagaatcaatgataaggtaattattcccttacatttgtttacatacattattaaaattaggaaagagagaacttaattaaataagggacacaagaaagggagaacttcccccacaaattttgtaagaaatgtcattaatggcacgtttactatacagtattcagaattagaataaattaatggagaaatgtaacataataaatgaaaaataattgaaatcaatatttgtaagatgttgtttactattttttttttgaaaatagaatagtagtgatttatcttgtttattttattaggaaatgtagtcggaatgcttaaattgactaaattgctcttttgagttaaactatattatatgattattattttgtaagacatattttaaacaacaaaattgtcattatatattcaatattaaaaaataaaataaaaataattaaaattcattaaccttaatgacattccttacaaaattggtgggggaagttctccctttcttttctgccttatttaatcaagttctccatttcctaattttaacaaatataagagaatgattaccttactattgattcccattacttattagtaaacatgccataaaagtaattatgctaaaaagtacttctatatttagtttaagaat

SEQ ID NO: 213557 - DNA, 951 bp, Cannabis indica
atggggaatgtctagtggtagtcgttgtagttgtcctgcatgcccataatatacgtggcaactcttcaggccaattgtttttgcaggctaggagttttttgttaagggtaacctttagtattttgttggcggcttccacttgtctatttggctgtggctgtgccacagttgagaaactccgtgtttgttgcgaaaatccgtgaactcatcacaatcgaattgcttaccattgtctgagacaatcttatgaggcaacccatttcaacgcacaatgttttttacgacaaagtctaaagctttcttagctgttatagacttcataggtcctgcctttgtccatttcgtgaaataatccacaaccactattgcatattttaccccaccctttcctatggagagagaccctataaggtctattccccgtaccgcaaagggccacgggcttatcattaacatgatttcatttggcggggctctcgagatacgcaaatctttggcatggatcacacttaaggacgtagtctatgcaatctttcttcatggtaggccagaagtatccttaccttaggattttttttggagaggcttgggcccccactgtgatctctgaagaatccttcatggacctcttgtataatctgtctaacttcaggatctgacacacttagatatggcatattgagcccccttcgatagagaataccatcaattatcaagtaccggtgagcttgataatgtacccttctagacatagtcttctattaaggtaattctccctttgttatgtacttgacaataaggtccatccagcttggcatttgttcatttgtcgctacttccacttttggcctaatgttgggctccgtgagatactcaactagcactaaccccagcatttctacctcataatctgatgctaacttagctgggcaatctgcatgaacgttcctt

SEQ ID NO: 213558 - DNA, 731 bp, Cannabis indica
ttaaaaaaaaaaaaaaaagtgaaagttaaactatagaatatagaataacaattaattaactatttttatcatgcatgtgcaatagtttttattccttctctaacaataccatagcagagttaaaaattaaaatggatggtcagtaaatatataatccataagcgcaaaagtgtaaaggcaaacaaagaagaactactgaaaattattaataaatcttattttattttttcttatttcttctgaaatcactaataaatcttctaggtaatatagagaagataaacaaatagatttgagagatagagttaggttagtgggtaattttcttttttaatatttacaccttttttttttataacttttaatatttatacatagggtgtatatatattgattgtctctattatatcttcatttacaagttttatgtgggttgactttgtctaaaagttattgtaataatgaccgatgttgatcctctttcttcacccaagtggccaccaataaaagaagcattagggattcaaaaaaaaatatatatgaaatcactgcaaatgatgttgtgagaaaaacattaccatccgtggatgagtgaatatttcagtttcagcatctgaagagatgatgttgtccgcgatgatgaagacattatcatgatgaggaggtgggtttgctccaatgaaggatttagaagataaaaatatattgatatgtctgaaagacaaaggaga

SEQ ID NO: 213559 - DNA, 538 bp, Cannabis indica
cgggacctagacttgacttggtccgaaaccctcatcaggacctgagacccgcaacccagaccaggatccagaccctgacaaggacctgaacctgaatttggaccaagactgggaccgagaccttgactcgaatccagaccgagacctggactaaaactaagactcaagacccaaacctgaacttggacctagaccaggacctaagaaccagacttggataggggacctagaccagggacctaggccccgaaacccagacccaaatctaaagccaggactcgaacccaacccaggacttgacgtagacctggtaatccgaagtcagacctagacttggagccggaacctgcccttaacccatacaaggataggaacttagacacgaacccatgccacgaccaaacccgaacctggactcaaacctaaaatttgacccgaacttgggacctgcttccggatttgaacttaaacccagaccgggatcgaaactcaggacttagacccggaactaatcaagactcatatcgagatcaaaaac

SEQ ID NO: 213560 - DNA, 1250 bp, Cannabis indica
attcactagtgagatccgaccaatccaggaaggaccacaacagcttctctattttattttcgaaacctgcaaatttattttaatttaatccaaaccctaaattatttcactataaattattcaaaagatatactgtaccaaaaataaaaataccccaacctaaaaagctatcatacataaatatatattacttttcatgaattattacaacgtactaataaataataaatgtcccctgttggtagatttttctgatcttagttttttttttttttttttttggtttagttcggtttgtaaagcataatatccacagaatagaataattgccaagagagagagagagacaaaagagcaattgaatagttttacttcatctccacataaaagcatctaaaataatacaaagaacactgataacatgccatgcatggcctgagtatcagcgcctaatgcataaaccagaaacaactgacatcgataagaacaagggaccaaacaaagataccaccagaaaaaaaaaaaaaaaaaaaaaactgacatattgtggaagataaaaaaaaaaaagataaactataacagttttacataaggacagaaaataacatcatatgacatggatcacttcactaccacaaagacacaaaactctctctgccgtccttgccacaaagtcacataacattgctccaagtgtctgtcttgagcataaaataaacagctgcacagcttgatgaagacagcaacaataatcatcaactcctcagcggcaaagaagttgaataaaaaaaagtgagcttttcaatggagggaccagcatgtagagttgttgtgttgatacgtgcacattatacaatagaaaaatcatcattccacttttccaccttacaattcataaaatagtcctccgagcattatagcacacacttatggtagtcattgtcacatcccaatttgagaccaccttgcatgacacttataagcccaaaaaaacttatcatcccccattcgacttctaatcgtgtcagacccaactaaagagaccaacaaacaaccataaagatccttcaaccacttctacattcttttctacccctcttttttattttttcttcttcctacgttcctcactgaatccacaaccacaagcagtcgaaaacagtcaactgactcaataacatatcatcatacatgttttttcgattgataaaaagagatggtgttatcagataagcatgttacttgcaacc

SEQ ID NO: 213561 - DNA, 584 bp, Cannabis indica
agactgataattgcatgcgattgatctgatggttgacctttgagagctttattcctgttaaaccaaacaaaccaagagatacacagaaaaagagcaacatcgttcttggggaaagatgtgtaaatttggtaagctaagtcatgaaacaaaatttcagaagagcaggaaaaaatataaggttgaaattgcgtacctttccagactcttcggacattctgacagtagaacaacgcatgtgacaccgattcttcgtggtttccacaacggttacaacccggggattggatgattttcctaatggctaagtttttagcagtggggagggttaggtttgtggcacggaaagcaaagtgtttcaccttgggaggaatcggaagatgccaaaggtttttccaccaaggcgagggggaggaggaggagggaatatcaagagagctagcagaagaaaaactaaggtggtagccggatttgactgagaagatcccagaagttgaatctctctcccctagtcttctttgtgtattgatgatatattttttttttcactcttctttctaaagttctctctctctttgtctctctct

SEQ ID NO: 213562 - DNA, 523 bp, Cannabis indica
ttacattacattagagtccatatgcaaagtatacacattatatacatctatagcaacttaatatgtataaataaactatttcgtgattaatcattcttatcaatatatggaatttgagagtatttaattttcttttatttatttactagaaaattaagtagcacttcgcgcgatgttgtcaaattttataacctttttaattgatttatataaattaaaagtttttcaaacaaaaaaatatatacatttaaaatattgaaaaattattaaaatatttaactacggtaaactataaattataattatattatcaaaatactaaattgaattaactaataaaaaaagtaaaatgcttcgtaaatgaaagaattattcgaacaacatttttatattatattcattttttttttttttgaatttttcacattaagaacacctacataaccttagttaaactttcttttatatatatactagggaactaagccgcgtttcgcgccgtgttgttcaacttttataattt

SEQ ID NO: 213563 - DNA, 1189 bp, Cannabis indica
aaaaaatggtgaaatttcacagggacgatgcgaagaccgttgtgtatcaattttctattggacgcgttaagaaaaaacgtagctttcatgcactaacaatcattttaatcaaaataaagaaaatcttacatttctcatagtggtacccctttgtgaaatgtggcccagaccaatctcagaatattttttgccactagtcacaatgaattcgtactactaagacgtgaatatgaagattggtttcgggttaaaatttattgaaatggcttcgtaattcaaaaattgaaatattcttctttttaaggtaaattttaaaaagttttttccttactcttacactcaatattgttttgttaaaatctcactctaaacatctcaaaaaatcatgaaatttcacagggacaaaaccaggatagttgtgcatcacttttctattttacacgttgagagaaaaagaagttttgatgcactaacaatcattttaattgaaaaagtaaaaaatgtcacatttttgataatgatacccgtttatgaaatgtggcccggacccttctcagaatttcttttggcactaataacaatgaattcgtactactaagacgtaattatgaagattggtttcgcgttaaatttggttaaaatgactcgctaattaaaaaattgataattctcttccttcagaataaattttaacaagttttttctttactcttacactcgttagtgttctattaaaatctcaccctacacatctcaaaaaatcatgaaatttcataaggacgatgctaagactgttaagcatcaactttttattggacacgtttagagaaaacgtagtttccatgcgccaacaatcatttgaatcgaaatagtgaaagtctcacatttctgatagtggtagtacccatttgtgaattgtggcccgtgcctatcttgaaattttttttaggactagtcacaataaatttgtactactaacaaatgaatatgaagattaattttgcattaaattttattaaaatagccctgtaattcaaaaattcaaaatatgcttctttttaggctaaattttattaaagttttttccttacccttacactcgttaatgttttgttaaaatctcaccctacacattccaaatatcatgaaatttcatagggacaaaaccaagacggttgtgcatcacttt

SEQ ID NO: 213564 - DNA, 575 bp, Cannabis indica
tttaagtaattaaaggccttaagttcccaacacgaaatgccttctagcaggtacccgctttgggttctttgtcagttttgattcaagaacacattcaattaatttggtatagcgaactgaatgaacaatttggtcaaagtaaacatattccccgatttaggaaagtgatcattgactggaaatttactccagaacacacccactttctcacaccatgaaaccaaaaacaactgatctactaagacatgcctcatttcttaccaacataacaaacataaacataatagtagacaaagatatttgaagaaaaaaactaacagatatctaaacacgatacaaggccacagataagtgagtaaaaaaataatgaaccggctattccatacatgaaacccgaaaaaaaaaaaaaaaaaaaaaaaaaaaaaaaaaaaactaaaacagatttgtaacatctaaatattaccaaattaccaagggtggaggtaggccaaacttaacatctaacaaaataaataatcttgtacaagaaggatggatcatgtatggaacgaactacaaataatgatgtttatatc

SEQ ID NO: 213565 - DNA, 578 bp, Cannabis indica
cagtgggacactgtttcttagatcgtaatatcctagaaattaatatagtatttaaatagacatattttattaaatatgtaattattttagtaatggagtaagattatgatcttacttggtgtaattagggtgaatttattaatgattaaataaagtataatttattaattactgagattattttagaatatgtgggtatcgtggatactatttctgaaataaaatgttttcgggcccgacgactgtggaagctcggcggagtggttagaaatgtcacaataataaatgatggattattttagaaatatttcggactagtttagaattttgagttgtcgacttgacgcaatggctagaattactaaaatgccctcggtgatgtttctatatttttaatagttttaatgggtaaaatggtccattattgattattagattattttgtcctaaatgaaactttctaggctgatatgaggattagtatagaatatatgttaaaataaattaagtattatgtttaagaaaataggctataatctagaaaattaagaaattgcataacatactctctctctctc

SEQ ID NO: 213566 - DNA, 446 bp, Cannabis indica
gcttgatactattggtaatgtttctgtctcttttgatagacgatctgctaatgtagtggcccataactttgcaaaggctgctataatatttcctgatcgtcgttttagtttggaagatgttccaactgatttgttatatatcttgtttggtggctgaagttattggttaataaagtggatttcttattcaaaaaaaataaaataagaaaatatgtgataattattgttattataacatcgttacaattacaatttatcatcctcatcatcagttacatatataatattatcatcactatcactttctaattctaagcaatcatcgctagtgaaaacaccatcactatctattctactcccattagtgtgaaacaacttacaaataaattaaaaaatattgtagtcctttaaataagcaaactacataattttttcaagtgtgccat

SEQ ID NO: 213567 - DNA, 679 bp, Cannabis indica
cgatcaaattgatgtattgaattagatcagtttcaaccattagatacattaactggtttctattgaattggattaaatccattcaatattctattttaattagctaccattcaagttgattttattaaaaagaaaattatataaaaacataatttaaaacctaataatctaacatacataataaacattaatttagtccaacttaattctcatgaatctataataaaactaccaaaaaattaaacttattcaatacacattaataattttattagcgttgagaaagacgagaattaatattttagatctacaattttttttttctttaatctcatgtattaaatatatactaaatcaattaatataattttttaaataaaataatatattaaatatataaaatttgatcggatgtttcatccaacaaccaatccgttccgattgaattttcaaaatttacattcgatccaatctaatatgattagatatccgattctattagatcaatcaattataattggatcggatgactttttgtacactcctacgttcaatcacgctaaccctcgattgccgttctatagcagggtactattgttaaaatgataaatctggattgcttccttaaatccgatacacgacaattctttacgattttctacaaagatttgagtagtac

SEQ ID NO: 213568 - DNA, 506 bp, Cannabis indica
gaattaggattctatttataatacttgagaagatagatgaatctcttagaattaggattctatttatagtattaggaaatatctcactaaaggaaaagataattcattttttgaaaaaaaaaaagataaaaaaatcgcaactctacttgaaaagctatctttattttcactatcttctttttcagaaatttcctactgcgatgaatgagagtattttggccttgactctcttgatattacttggaattgggcgattcaaaatgttctggaaagctaagaacgagatctaaaacttttatgttgagctccaagtccagttctacctctaaggtcgtccgaattcgtaattaagttctgccttgtaaaatcgagctcgtgagcttccactatttttttaccaaaatatgctaaaatccctccaaaagactctaaatgcatgaatattctttaagatagcctaacaaatgaaaattacactagtccataatttaaagaattaatttaag

SEQ ID NO: 213569 - DNA, 611 bp, Cannabis indica
agccgcacgagatccaaatggtgcaaagacggttgagatccgaacaaaaataagcgagcaaatggcaaggtgattcaagattggtgagcaaaaatagcaaccatccatcttgagggggaatattggagaacattgtcgcacatagattaaatataaaagtattgagtcatatataagaacatgggctactccacccataacggccaattgattttgagatagaaccacatgattctcatcacccgtataaaaattttagcaattattatttttataaaattgtgtttagtttttattagaatagaaaagtagtgacaatatacattttaagaatatatctctaacctatataaaagtgagaatgcttatttggaccttttaatattaaattacaaaaatatctttaagtttttttaatcaccataaaatccttctatcatttaatcataaaaacactcacattcttttcttcaaataattattcaaatattattttttttatattaataaaaatgattttgtgaccatatattagattggccaatttattggaaaattattataaagtaggataaataatttttttttatatagattaaatattattttag

SEQ ID NO: 213570 - DNA, 588 bp, Cannabis indica
ttttttctttttgatatcgggggaagggggattcgaacatgggaccttctcttcctctttactagcgtctgtttcatagctctctaattcctttttaccttgttctatccaaacataacataaactttgcactttaaaaaagtagcttcaaaccataacttggcccggtatatgtttgacatgtttcgattcttcatgctttttgtatagaaatacatctaacgatctaaggggcttttattgatttgcccattttatagaaactggaaaaagtgcagcttgggcttgaagaacagcaacaagcatgtgatgctcttaaaaataagtatactgcagaaattacagcacgaagacaatggtattcactcttgaaggtttttcaggtatgttctttaaggtttaatttcgattatatgacagtatagtaactcaaactatataggcacagtaattactgtcactttttttagcacctgtccttaagattgatttcttagtatgttaccctaagcttagacaatcatgttgtataattgtgtttgtgtttacgttaatcgtgtcataacataactatgttgacaccaattc

SEQ ID NO: 213571 - DNA, 736 bp, Cannabis indica
cggtgcttatgtattatatatattagtttgcagtttctccaccagccacttcaaatgaacctccaacagtacctagaagatctacccgagtctcaaaaaaacttggttatctcaaagatttcgaatgctattccacaattcaggatcactcctctacctcacattaccttgataagtatatttattatactagacttgctaactcatacaaggcttttatccttgcagtgacttcattaaaagagcctcggacctacaagcaagcaattcaatttcagcaatggcttgatgccatgaatgctgaattaattgccctcaaaaataataaaacatggattgtggttcctcttccgccagggaaaagagccattgactgtcgttgggtttataaaatcaaattcaatagtgatggatctgttgaaagaaacaaagctagactcgttgctcaaggatacactcaacaagaaggcctagctttttttgatactttctcccctgtggccaaaatggtcacttttaaattgcttcttgctgtttctactataaaacaatggcacatgttgcaaagagacattaataatgccttcttgaatggagacctcaatgaagaggtctacatgcaattaccacctggtttaattcttctatttccacagattccaacttggtgtgcaaacttcacaagtcgatatatggattttgccaatcttcccggcaatggtacaagaaattgtcc

SEQ ID NO: 213572 - DNA, 563 bp, Cannabis indica
ttattggcgagctggatagtaattcccaatggattgatgtgggtactcacgttcttttcatcttccttcgagaatatgattggaggttcttcatttgttacattcttggaaggttctggagcaaatatcgattgctcattttttattctttcacatacctcttttgggcactgttgctctctcctgcaatatgcggccctctcgaaataaccaggatgtcctctccttcaaaaggagaggttgtaatccctggttttttgggttgttgggcagattgggctggttatatccattgccctgtctcttcacatactgcttgaagtggccccgagagatgagactttctatctcatcttacaactgacggcactcgtctgttgtgtgcccaatgtccttgtggtatttgcaataactggtaggatctcttttatgcctcgcatgcctcatgggttcgggcttcctggaggcaaccttgtgctcatgtgcgaggtaaatattttttcgagtttcattaagctcggtataaatagtataaactggcacatacttatcatgcttctttt

SEQ ID NO: 213573 - DNA, 1047 bp, Cannabis indica
tcccggtcctggtctcgggtccccagttcggtattggtcttgggtcctgggtcctgggtcctggtgtaggcctggatcccggtcccggttcggattcgggtccgggtccgagttcgggtcccgatccgggtccgggtctgggatcggggtccggaccaagtccgggtcaaggttctgggtcctgtgtcctgggtccgaggtctgggtcctggtccaggtctgagttcgggtctgggtctgggtcccgagtctcgggtcccaggtcccaggtccgggtccgagtttgggtcctgggtccgcgtccaggtcccaagggatccgagtctggggttcagtcttgaattaagttttttttcaaataaattgaaatcgggtcggatctgatccgagatccgatccagaaaaaattaggcgggacggagcagatctgatccaagatccaataagtatccgaatgtttcggatcagaggtgatctttcggatcggagctccaactaaatgaatctttttgacatgcctagttgaattcatgtatatagaaaatctatattacgcataaatttttaaaagataaattattattattattttgtattgaggtgtctatatatatatatagatatattagattagattataactatgcacgctaggtttgttctaaaatatagtgggttatagaaaaaaaattatttttagactcttattttaaaaaaaaaatgtattatttttaaaattaataaaaaaatatgtaatttaaagtagaaaaattagccctaaatcaagtggaccgtaacacaaatttagccaccttatgccaaagtcgggcatacacatactctctttttatctatgggatattggcggctaaaccacctgaactttacggtttgtaacacttaaccacaaaaactgaatttttggcggctaaactacctaaactctggttccgttttgctctgcacacctccgtctaaaaattactgttaagtgccacggtggactatccacatgtacacacttgtacacgtggcaaattttttagt

SEQ ID NO: 213574 - DNA, 700 bp, Cannabis indica
acttgatggttgccttgacttctaaatatgcaattggaagtgatcttaacaagatgatgacttggatttcttcatcaaccttgtaatttatgttagccaaacctataataatcttattaaatctatgaatattctcatctaaaaaaagggacgaaatcattttaaaattgtatagcctttctagcaaattaatcttgctagcaattgatggctttaagtacatttcttccaatttatcccaaactcccctcgtcgtcttctctacgatgagttttcttcgaacactgtttgatagatacatgatgattgtgtagtatgctatctcctcaatttctgcttttttctctagtttcttttctgctaataacttcacgtctctaagaaccttgaaaactttctagtgcactaggattcctttcagattttctctccatagcgcagtgtctccaattccatcaaacttctccaattcgaatcttgattctgcgttcttcattgattacttagctctgatttgtgggaaaattacggctaatagtgcagaatcaaaccaactaaactttaaacaatcaaacaatcagcaatgacaagattatcaagccaagaacaataattgtataaaaaaataggagcaaacagagtattagaaaaccaaaaaactgtaaatgaagaaaataaagaaaatagcaccaagatatat

SEQ ID NO: 213575 - DNA, 973 bp, Cannabis indica
caagcgtgtgtagccgtcaccgtacaaagtcaagaactttcacgagagtcagtcaccatcaaatgaatgctcaactcactaaaaatggacgttcggaaattgcccatgccggatcccacccctctctctgtttctgtctcaatactttacgacaaacactggaccgcgtgcggcgcgtgaggtttattgctgttgtgttggggggacccaacaagatctcgtcaatggagtgtgtctaggcaaggcaaacttttaacttcatttgctcgactagtccagcttcgggaactaggtatctatctttcatcagctggaatcctcttcattatagacttttctagatttctctcttatcactcttcttcttattaaagattccttttttatttgagtaatcataccaaccttgttgttgttgtactagtttttgtttttgtttctttaaaaagagaaagaaaaaaactcattttcaaccaaaatccttgaaccccactacaaaatattatgatttgtcaattgggtttgtgtgaaaatccatggaggataatgaatattactcctccccagatcttgatgaagagacctacttcattgaaaaaatctctcctttactcaaaaccagttcattgttatcatcaccatcatcctcagaacccaaaaatcactactttctcttcttcaaccaaattttttcataggagaaatgaacacagaagtgggcctttagtgggtggccctgagatgttggatttgtgtggacttgggtattgggttcaggggtttaggtgttttccatggctggctttgaattttcatttgactcataatctcaacttgcatccctctactctacagcttgttcaaaactctggtaatcttcctatggttgccaaacctcttatgggatcttatctgatgctttttacatcaatggtgctcgtagaataccttatatatctattggaggttggtt

SEQ ID NO: 213576 - DNA, 995 bp, Cannabis indica
ttttttgcgataataatacatagttataattttaaaacttctgtaagtacttaatatttaacagcgagatacctacgaagttacagaaatataacatatgtattattaccgtaaattaaaattaaaaatttatttgtaaccgctttaaaataattcacttatgtgactataagttataggtataattgcagtacaaatacttagaacatctctaatggtactctctattttatttttcaaactaaaaagctaaaatataattatttttattattgttgctctaatcatgttttctattttatagtatttgattattttaataatattttataatttaaaatagtagtattaaaaaagtatagaaagttatttttatataattgaagtttatttttttcaactctcactctttatttctgttaacgagtgtgtttagagaacatggttgaagatactcttattttatttaataactttaagctacttagtttattaacattaaacatacaaacatagttctaagaatgtacatacatactcattgttcatcattaaactactatttatgtatttaatttttatgtagactcttgaattaggccaaactaacattatattagtattatatcattagtattatatcaacaaattatttaaataaataatcaaaatataattatatgggatatatgcaacaattttacaattttaaaaaaaaattacaatagaaaaatgttcttgggacaaaaatcttcaaataactaaagaataaatcatatttattctatatttttttttgaaaaaaaaattgtttattatttaatatttattagtcagtgaactcttttgtcccatactgtcgtgggatccactcattagaacccgacccggtaatgttcttggcttaaactaatatttatttatttataattataaagaaacattatctctaaattgaactttatgtaaagattttttttcattaaaaaaaaaaa

SEQ ID NO: 213577 - DNA, 534 bp, Cannabis indica
acaatcgcttgagtagtcttcttttctaattaatcatgtgtcaatgattcaagtgaactttgacatgttaattttttttatttatcatgtgcctacattcatgtaaaattgacctaaacactgaattctactcaagttcatcaccccattgatttaccttcattttcaataagatcacaaccagacgcatatgccagaagtttatactatgattccatctttttgacaaagttctagttattcactaacgaattgctctatcttcatcaggagatgaaacaagggtacatagcagagaaacatgtcgatgtgactgtcaagaatttgaaggtgttgctcaatggaggaaatgagagcaagatggtaaaatacaagggcactttccaagctgcacttgtttcacttgggaggaaggaaggtgtagctgaatttccatttattactatcagtggatgcattcctgggaagatcaagtccggggacttgtttgtgggaaagacaaggaaactccttggactgaagccataatcctaa

SEQ ID NO: 213578 - DNA, 434 bp, Cannabis indica
ataattagaaaaaaaaaaaaagttaaaattctaactaaagtgaataaggatatgtacgtattaagatcatctccaatacagaattaaaagtatggtgtatatgtatattttaactcagctctataaaagtgaactccaatagtaaaagtggataaaatttaatatatattaaaagttgtgtcaaatttagaacaaaatatagcatgagacaaattttacactacaaaaattattttttttttatttattcttttgccacttattaatgtaattaatcactttttacatttttatttaatatttaatagaatttttatataatttcaataaatatttaatacttttgttgactattttacacatgtttattaaaaaaggttaattttagcctaaatacattggaacattatcataaaatttgagccaaatataat

SEQ ID NO: 213579 - DNA, 669 bp, Cannabis indica
gcagtgaaattcttaatacaagaaggtatggatcctgataaattattagaagagaaatctaatatttgtatttgagtaagttgacaaagattgaatgggatacttccataaaacttatttgacttcaaactgagaaaaactaagttgtttagtttttccccaatccatgagggtattggacctttcaaagtgtttctccccaaatctagaactaagtgaagtgcaatatttcaatgaggaaggaaaatttcctgagaaattattgtgcctcaattgtaaagttttaatacttgtcatattgataaagctaggaatctttccagacaacttattgtatcctaaattaagtacacccaattgtttgaaattttcccaacaatcaggaatgtttccaaataaattgttattagaaatatcaattactgctgttgacttgtcccactcatttgctccacatagggaagaactgaaatcggtgaatttgttattggagagatacaagcgggttgcattaacgagaagagaaggtgggatagaaccttggaattggttggaacttaagtcaactattacatcaccttcttgtgaaagtggaaacttggtcaagttgttgttaagaaggttgtgagacatatttaaatactttaagttggaagttatatttgggaa

SEQ ID NO: 213580 - DNA, 780 bp, Cannabis indica
tttaggaatatttttaattgtacttactactttatgaatacgggacttaaaaaatatataactagttataatttagaggttattaattcttatttggtgtgtattcttacaagcattttactttacaaaaaaggcttagcaactgctcctaatgttgtttacagagtgatctgtgtagatggttccgtagtaattttctcaaccctaaattcttaaattttgttataatttattagtttcaaaaaataaagaacaaaaagtaaaactatttctcattcttaacataaattaaaagtttaagttcagtgattgggatatgtagtccacacaaatttaatttgataaatatttgatgtaacaaatattttaactaattatattcatgtaagcaatggtaagcttaggatttaagttgagaggggagcggcatttttttttaagtgaggggggcatttttttttacattatataacatattaaaaattgatacaaaattgtattttttttttgaatgaatacaaaattgtatttagtattaaatatagtataaaattttaaaaaagtaataataaaaatattgagttgaataattaagacactaaatacaagttttcattagtaaaggttcaaaaaaaaataaaattcaaatactaaaataaataacttaacaaaaaaaaaatactaaaataaatatgctcttattgagattagaactcatgacttctactatgtaaatgaaataactttaccattatgttaaagcttgtattatgttcataa

SEQ ID NO: 213581 - DNA, 527 bp, Cannabis indica
tcttgtgaggacagcactcatagcatgttttatgactgctaggtacatgcctagctcttctttgtccaggggtttaaacaagaccagtggttgggccaattatttcttcagctcctggaatgcatttttgcattcctctatccactcaaattttttgttgcctctgagaatgttgacgaagggtacccatttgtctgtagacttggacacaaatctacttaatgcaacaatgcttcctattaggctttgtacttccttgacagttgtgggtgacttcatgtccgaaagggcttggatcttgtctaggtttgcttctattcccctggcattgactatgatgccaaggaattttctcaagcctatgccaaaagaccattttaaggggttgagcttcatgttgtagctgtgaaggattttgaagcactcgcctaggtcctccacatgcccctagcctttttggacatgacaagcatgtcgtccacgtgcacctccatgttgcggatgatgagatctgcaaacatcatgtt

SEQ ID NO: 213582 - DNA, 668 bp, Cannabis indica
tgaaattaaaacttaattgaaatgatcaccaaatggcaaatattgcctattagttgtctatgtagagagacaccttttccacactaactaataaccttcaatttcactctaaataaaattccaaatgggaaaagcaaatattatgtggttggtgagagcctattgaggacaaaaaccagtgagaaaatatatacactataccattgaattaacatatactaatttatgtatttatttttttttgtagaagatgacatgaaaaatttaaactctagtcaagaaagctcagctatgatatgccccccacaaccctaaaaataagaaacttctttatgtccaaatgccatgaattaagaatttcatctaactcatcctaacctcttccttccacacacatctataaatatataatatttatttatataaatatatatatatatatatatatataccataatacaatatctcagcgcgtgtactttactctcctattttgttaagtcattttaaagtcttacttgagatatagtccaaactttaatttgttagatgaaataatgaattccaaccaaaatattctatccaagaaaattaatattttagaaccaaaaaaaaaagtattataggagtattatccaatcatatagttctatccactattagtaaaa

SEQ ID NO: 213583 - DNA, 830 bp, Cannabis indica
ttgacatgtttccatactcaatttgagttatttctactttaatgatacttgtttcctttttatatatatatatatatgagttgtttctattttttatgtgtattgtttctatttttatgatacttgttttcatatatatgaggttaaattctagttgttttcattttatatggaatttgtttcaatattaaggtatttttgaaaaaaaagttcataaaaaatgcaaaattgaaaacccctctaattatttttcattttagtatgagttttttccattttaattttattgcttccattttagtttgacatgtttccattctcaatttgagttgtttctattttaatgataattgtttccttttttttatatatgaggttaaattctagttgttttcatttttcaatttcacttctttccattttctatttttatgatacttgtttccatttttcatatatatatgaggttaaattctagttgtttttcattttttatggcatttgtttccatttcccacatatatatatatgaggttaaaatgtagtaattttatttttatgatagttattttcacttttcaatattcaatgtgagttgtttccatttatttttatatatatgaggttaaattctagttgtttccatttaacacacatgctcacttaatactaattgtttctatttttaatttttcttgtttctatttttaatgtgagttgtttctagttttttgatacttgtttctattttccaatttttatgatatttgtttcgattttttttatataaattctagttgtttatagttcacacacacacacacacactc

SEQ ID NO: 213584 - DNA, 502 bp, Cannabis indica
catgggaatactggacatcttagagatgagacgatgatggttgctttgagttaagttcagagatggtagaaagacaactaccacgtgcaattttagagaggcgcaacagaatgtttgaaactcattggcatagtacaaggttgattgggtagtccatattctatgcttggtacactaggccaagtttgcctgagtggcatcgtaagccgcaagacgcgcttttgctgaaaaaaaaagcttgttggcaggggtgtggaagtagtgcaggggccaccaaattcttgttagtcacgacagtggtcgagagttgacgaccgagatggttcaaattgggatagacatgggatgcttcagttgctacatggtgtgtcaagagtgacacacatggagaccaagggggcagaggccgcaatcgtcagaggatggttgtacttagaggtgttcgcatgtgagttttatttgatccatatagaagggtcgagatagttgagtgggatgtgtt

SEQ ID NO: 213585 - DNA, 957 bp, Cannabis indica
attatgtttcttatgagttctaatcgagtttagtacttaaatttgtagtattgagtattttttttttttttttttttgtataaagtcataatattgagattttaatttattgagtaatactaaattggcaataatattgatatattgatgcagattacataaatgatacaacttatagattagttaagcatatatagtttaaagttatacacaataatctttcttcgaggcaaaaaactcttcatttcttgtgtaactatattatagtgcaatctcaatatgataagtattttctagtattaagtaatttaagttagtaaatactaagcaacacatgtcttgctggtgcaaatgtttcctagtattaaaaatttatacatgtgatttatatctacaaaccgagattcgatctcaaaggttcatgaaacccatgtcgactaattcatattctttacaaatctaaaacttcaaatccaaaataaaactcataattaatgactacaacacgaaaacttaaaatttacaataaaactttagctagacgatatatgtgtgtgtttgttgttatacattaaataaatattgacttagtcatataaattacatatttacatatatggatcgatagtattatctatgattaattttttttatataactaactacttaaataaatagtttactaaatttgataaattgaaattagactatggagaatttacatatatatttatgtatatatgattatatataatctaaaatttaattattatagtttatatttgaattgcagatatgaagaaatattatccaatagttctaaatttatcacatcaaattgaatcagaggttgatagaagttcaaagagacatcgtaattcaataaatatggcaaatcttccaactaatcctggattacaagctccgatttctgattataatcccaatattcaagat

SEQ ID NO: 213586 - DNA, 558 bp, Cannabis indica
aattcatcaaaatattaatatggtaaagtacatataatatgtaataagacctgcttttttgggaaccaaagtccaatttccaatgccaagtttagaaacatgtgcaagtagtttagcatcttcttcagcagtccagagacccctcttcacatttgatttatcacaacaaggaggtctacccattttgtgtaagtagtgaagatcagaagagaaagttggtataaaaattaaattataaaagattgattatggtattgggtgatgcaaactccaatgctcttgcatgtacattataaaaaaaaaatgagagaatgaatctttagaaagaaagagaaaagggatatgaatatcaaggcaagaaatgcatgtaattttggggttataataactacaattgcatgattattttcttcataatattagaagaaaataataataaacagtttattgtcatgacatcacaaaaatagtgatctcttctctctctcactctttctcatgcttggccccaaagcattgttattgaggtgagtgagtgcatgatcttcttttcaaatt

SEQ ID NO: 213587 - DNA, 645 bp, Cannabis indica
cttaatgagtacctggagccttatggtctattctttccccttgatccaggttagtttctttgttattgcagaggagaacatgctagatgaatggttttcagttcctgtcatgtggaggtcaatgtttgctatttagatttttataaaatttaaaatttgcagggcctggggcaactatcgggggaatgtgtgctacacgttgctccggttcattagctgtcaggtagtttgtttcttcttctcttctagaaaaaacaaaaaaaaaaatctattttttcattttacttttgcattacagtttcatgctagtaatttctaaccttttttttttttttttaaataatctttctgctttcctgctttgtttattttggtagtgatgtttattgctatctattacctttaagtttttagaccatttcatgagtatattaactttgtcatagtcctgccttttcaagatagtttgagctatatcttaaatgttggacatgcccaactttggtacatgaagtgaaaaaacttactggcatataaagattcccaagggacaccacttagatttttcatgaattgacaatcagctagccacatttatattttaatttaatatttctgtaacaaaacctatgttagttttgtttc

SEQ ID NO: 213588 - DNA, 722 bp, Cannabis indica
gcttattcgcactcttcatccactaaaacatttctgaaacagttgcaggagtcttctctggaaacattcttgataattggaaggatatcttctgaagctgttattgaggctaaattgttagagagtaaatccttgttggttcggttgaatgtttggatcgatgaaattttattggacgctcgactttttggaatgcaggtggcgctatggcttttgcagctgaagagagctttgtgttggatttactgaagagatgttctataattattctttggttcctgaactgggctcgcacattctttttctccataggtcacattccccacgaaaaaaaataacagggtctcgatcatatgggatttgatatataattgattttataaaatggaagaacaaataagtgattattttcttttaaccaaaaaagagggaaacaattcactgttttggtttcaagatgcagactgttaattttttttgggatctcatcgatctttgtaaacatcttattccaactggtaagtgagagactgaaagaaaatgattcatttgggatgttagtttttactacacaacttcacaatgatcaattgagtaatttccctggaaattcagaaatggaagtaccagatttatacaaattcatattttgttctgtatcataattacggatctcgcggtcaagtcttaattaaatctagaaaatctgtctttcgacttca

SEQ ID NO: 213589 - DNA, 625 bp, Cannabis indica
gagcagttcatttgttaaagcagtacacagtacacaccataaagctttaagcaaaaaagaaaaaccataccataaagcaataacaagagctacggtagtgctcctttgtggctcatttaggcaattgagtggtaaaaatcttctcattatcctaaacacgcatgaaagcccaatatgatagtcggacggaataacaaggcacaaataacaaaagagaaatttatgttgtatactatctttttttgttactttttgtttttaccgtaccacgcgtattattatatttatactgtatatattctatactatctactgtattttttggaaaaaaaaaatatgtggtattttattacatgtgtcatcccaaagtagtattatgatgaaaagctgatcaaaactatcttctatacgttttttttttttttctatttgtagttataataggttattttatttctttttcattcatattgtcattccctctcccctgtttatattcttcttcgttttttcacttttttctttttaattttttgtttcattttttcttcttcctctttattttttttcctcttattttttagtaaattaaaagtagataagaaatatttcaaagaaaatcctc

SEQ ID NO: 213590 - DNA, 576 bp, Cannabis indica
acaagtaggaacgataaagaagacatctaatttttgtataacccaccatgagcttaccttggaggtaagcatgcttaacttggggtaatctcaagatgggaaatcttctggggagtcatctcggaaagcgtacgagtgaggacaaagtacgctaaaaagattcacattaggatgcaaaattgttagtcgttcccaagattatcaagaggaaggaatgtgttaataagtaaagatttacaaggtatcgagataagaatatgttaataagttgaaataagaagtgctctaattaaatatctatcagattcgaatacttaacttgttaataagttatgtcaatagatttgattaagaggtcccataggaagaatagaaagacacaattataaactatgtattgtgggatcttatggtttcgaccaagtagtaatggttggacataccgagttaatatattgtctactagtgcagacaatttatacgataaatgaggatatggaattcatacgaatcaatagtctaatcttgtgaaattccaaagttggtatctttggctatgaagttaagaattaataa

SEQ ID NO: 213591 - DNA, 1124 bp, Cannabis indica
ttactattttagaaaatacagggtccattttgtcatttaacaaaacacagggtccaatctgtaacttttacaaaacacagggtccaaaatggtatttaaccttattaaattttattttgacgaaaaatcagttcaggtcttatttgtatcattttggaaaatatagagtctattttgtcatttaacaaaatagagggtctaattggtaactttgcaaaacacaaggtctaaaatagtatttacccttgcaaaaatgtatcattgcacatttcttgttgttttattgttattggcgtaattaattattagatcccataaaactttaaaaaaaaatagcttttaagaaatattttaactattagtatagtgccacttataaaaagtgttgggcaccaaaccaatagcaatacttaaagaaaaaagtctatttcaattttttttttatataatttagttatcaaaatatatttttttttgtgtgtttatttttgattttatggttgtcttttatcatttaagaaagttttcataagagcatctccaatggtaacatagtatgctaaaattttttacatcatgcaaaaatataatattttattatatctctcttccacattatttttaacacttttacttttaatatgatctctcacattattatttaatatatatgtctagtttttatcaacaataactttttagctttaatttttactaaaaaaaataatagtatcaatgccactattaatgcaataataattattagaacgacatccatctctcttcaattatatattcaattgtataatatctcaatattttatcacttaatatgtctacctcaacaagtattctctaaatttttgctattggagatactctaagagatgataaattttatttagggaaagtttgttcaaatgatttatatatagtataattgattctaattgatggtaatttattttttcgatctcgctatggatatagcagattgtataataatcctttataatagaaaataaaggcaaaattgtgatcttgactttatatgaaaagtgtgctgattgattctgtttgacctgtcactttgtgaaatttttgttgtaaatcaagattttatt

SEQ ID NO: 213592 - DNA, 733 bp, Cannabis indica
acaacaagaacgttggaatgagtattaaagatgtaattgaggaatgtaataagttttttcactccaaaattagtatttcaaaacaattagtatcactaaaattattactccaaagtattgaaattttctccacataattcattcaagatattaatatttaagagcaccgacctacgtaatatgtaggatcttcttctatatcccaaataacaaaacaacacatgtgtaaatcagagcaccaacacatgtgctatcacttttgttgacgaacttactaagaatgctacacattctcagggcggttctttgaactgtaaaggggagggatttccccatgtgaatcccactctcttttggtgctaatatccgaactgaggttctttttcaaaaaaaaagtatccagaaagaattcaatattgtggcttgcatagagtacatgaaagccgttattgacgaagcaatggatccgatagttagggaaatgacaatgaccatgaaaataaaaggaggttgtagttcgaaattgtacttttaaaaacggtaccgtagagcactgatagaaatgtgagcaataccgaggctgatgaagaaaacgaaaccacttgcgttagaggagatgaaaattttgaacgacgggttttctcgtaagatggccatgccttggtcgttgtaaccaccaggaatttggacagccgctgcaaatgtgatggttgctatgattgttgccacaatt

SEQ ID NO: 213593 - DNA, 635 bp, Cannabis indica
tattatgattttttgggggattaatttagaatgtataatttatgatggttgagtttggggatttgattaggtgtatccactgttcgcggcggtgggagtagctgttggtatctgtggtatgcaactcgtgagaaacatatgcactaaccctgaagtcaggtacctctctgcttccttcctctttctcactttctctttgatctttttcttttcttttctgaatgtgtctttccctttgttcactacgctgttctttgatttttagtttttcttattacaaacaaaaggaataaatatttttcaacaaattgtcaaaataaacaatagctcaacttctttgttatagtactctataacatgaagattaatgcatatcttaaagtgcctaataatgcctgtaattgtatcttatgagtggttggatttaaaattggatttaagtcttatttataatttaagagatgctaaaaaataaaggagtgttttttaaaggctgaacaccatataagatgacatcttgtttgtagttgatggtgattatgctcaacattacttgtaaaattataattactggaattcggttttaaattcaactagacataatatgttatctcatgtggtgttagatactgtga

SEQ ID NO: 213594 - DNA, 748 bp, Cannabis indica
gtgagtctaagtataccctcagtttaatgttttaagaaattttactaaataattacttattacacctataaaaaaaatagtctagtgtataattttctagtacgataaattatttaaaatttcataaaattttacaagtggtctcttaaataattaaaccgtatattcattaaaaacgaaaaaaaaatgagaactaaaaactatgacaaaacaaataatgggtgtgcaagaatatcatgttggaagtgttactatagtgctttccatctatctatttctaaattatgtattttgtttgaatcactttgtttatgagactttggcatatgtatgtccattttggtagatctttcctcttagtcaattcactctttgaatacatttgatttgaaacattattattgattttaatttttcaaaaaagtgaagtacgattatgtgtgaccctatgaggggtcatgatcgatttacactctcttatcctctcttatcgttatgtttgtatatggcattgaaaaagagtgagagtttcaattggttttagtctaaattataatctctattgttatcttacttttgtatattatgtaatggtatagagttttaggagctatttagaattattattttaagattgagagcttgtgaaaacacaaattttcccttttatatagataaaaaaaaggtagataaaattttttcccctaacatgtcctaccatgtgggtcacaaggaatttctctaatgt

SEQ ID NO: 213595 - DNA, 722 bp, Cannabis indica
tgacacatgagccatgaacctataataataatagtttattacttatattgtctagtcatcgaaaactacgaaaaacactatcgtaatcatgaacaaaaaaatatcactaaaaaaaggtccacgaaaaacgaacaaacctataaaagtgactatatcaaccccccgtgaatcgtgtgattttgtgctacaactgaccgaaagctctacctctctaattaacctcccttgccccagatttaaaatcataaatatatattatgcatatatagaaataaaatataaaatttaggaaaattattctataaattatttttaacttttttttaaaaaaaatttatagtttgattgttacggtagtttctatgtgagtttaaatgtgaattttaattacgatttaagttgttccgttgattattatatgtagattttttttgtgaattttcgtaaaaatatataaaaaaaatttattttaaggtaaaaaaattaaaaaatctttaaaattatattagacatgactttggtgccttaactattctattcccatcccaagtattctttcttgttcgtcctattagggagaaaaggaatcactaaacaaaaggataaaattaatggataatgcagtttttaattttttttttgaatttttttttgtatctagtaaaatcaaattaatacaagagcctaaacactacgtatccttgggtcctactaaacagttt

SEQ ID NO: 213596 - DNA, 1251 bp, Cannabis indica
cggggggagttcggatgaacctgagtaggctaaaactagatccgagctggccaggagtggatttgaacatgttaggccccttgcccaaccttctgtattgtgcatagagacaaagagaggcaaagacatgattaatcactatgtgaaccggtcgatcccagaggtgaatgagcagttggctggggcagacaattctttgtccttggaactggtcctgggaggagttctgaaagagctttcaagagtaagtcctttctaacacctttctttaatttctctttgactagttcagattttaatgctttttccgcgcagactggtgtgaagatggcttacgcctattcctgagctaaattggctgatgtcaagaagcttgccacttccaacacgatgcgaagggaagtggactttacgaaaaaggacgccgaagatgcacgggcccagcttgagactgtgtggacagaactcagagaggtcaataagaaagttcttgctgcggagaccagagttgtcgagctgaccacggaactggaggagatgtcgttaacctagtaacttgaggcagataatgtttctttgtctcaagaaattgccagccttaaagacgagagagagggtctccgaactctccttcgcaggttggaggatgaggccaagggcaagaagacttgggaggaggaacttgaggctaaggtgaagaagcttgggtagaaggtgaattccttagagactgttggtcttgagattttttatgacttcttgaaggctaatcccaaagcaaattttgaatatcttggcacttccaaagacatgttcgtcgactactgtacggctcaggaaaccaatgagaatctagaggcaactacttctgcttctcctaccgactagaatgttggggctccttctgcccagactgatggtccttcggcctcttcagacctggctaatccttcggcgcctttagatccagctgacccgtacaaagagcctgggactcctgctgtttaattgccttctttttactgtcttttttttatgttcggccagtgggccttattttgagaaaagatgaccagccaagcgatctttaaacttcgaatatgatttttcatttttgaacaactggctgactgggcggcctttagtcccgaccgagtttgaatgcttgcatcattatataatgaatgaaatccatcatttatttataatcatggtgcaaatgtgttcggttttttttttaccaaatgcttt

SEQ ID NO: 213597 - DNA, 722 bp, Cannabis indica
ggacccttaaacaagagtacgattgtgaccagtacccagacgcagacctagaaccaaactcagacctagatccagacccaaatcaagaccgaaactcgggcccaaacatggtcgtgtacccaaactgggatctagacccgaacccgaacccagaccgggcctagacctgggacttgatcacagacatagactcagagatagggatccagatacgaacctagactcgaacccagacctagacccaaactaggatcaaaactcgggacctagatctagaccgagacactgaccaagacccagacctggactcgcacccgagacctgtacacagacctggacccaaacctagacccagactgcgatccagaccatgaccctgaccccagacccaaactcggacctggactcacaccttgacccagacccaaacccataccggaacccaaacactaaatcaaaattcgaactgggactaggacccaagcccagacctagacctaggcctagaaacctagacccagatcaaaacttgggactcgaacctgaaccaggacctagactcgaacctagatctagacccagaccgagatcaaaactcgaacctagacttggaccaggacttgaacctcgacccggtccaagactcagaccgggacctaggactcagacctgaaagggaacctagacctggaacactggcatcagaattggcaccgagaccc

SEQ ID NO: 213598 - DNA, 784 bp, Cannabis indica
ttattttattcaaattatttattcttaattcaggtctcaaatgataataaaaatagattttatgttatttatataagcttgtttagttgttttttcattattttaaaaatacacaaaaacaacaaaaaaattataaaattatagttgttcggaattttaaacaattttacatttttttatgattttatttaccaaaagtacagtcttttgatgtatttttatgttctacttttgttaatttattgttgatttttttgttgtgctactttgatgttgtttggatgttattatcctaatactttcatgtatttttcttgttgtttccattattatttttataaaatattgtgaaaatgtaaaataaaaaaaaatctttgaatgtaaaaatgaaatttttttacaataaattatactttatgtaattatccattttttgtgtcaacatattcactttttgtagatgtcttatatttaattgatttaaccgagatctagattccaaaattaaataaatatttttcttaaatatatagtttaaaattttggttaatttttcttctaaatttgttgtgcatatttggtttaaataaaatttaatatatattcaattaaaatgtcaatgtattatactttagtaataatatgaaaaatatacaattacatttatgctcaaaacttctagacttgttcagatggtccagacttatgacataaacaaatacttgaaccactaatagtgtatcattgtagctggcagcattggacttcattgcctgtgcaacat

SEQ ID NO: 213599 - DNA, 1069 bp, Cannabis indica
atgttttgttctatataatttgacctattaactatttacatgaaaatgatcacatgaaatatttgatgttttacccataatatatgacatgaaaatgatcaccaatattaatgggaatgtcaaatatattaatgtgtagatgagaataattattagagctagaatataaaacaaacatttcaacaaaggacggttcttagcatcacaaaaataatttcgattcctttcattaatgtcatgatgtgctcatgagtcatcatgtgcctatgtttctaatccatatatgcccatactatatatatatatatatatatatatatgttagtataatttgggtgtgagcctagtaaataacatatttaactccgacatgcatcaacgtttattgtgttcatattaatttcgttctctgtcttatttgagaaaagaactagtggaggcatgcatgccattacatatattattgatatctaatacttttttcatataattataattaaatatcagatcacatataattttaaaaaaaaattaaaaaatattactaatcaatcataaaatattacttataaaaatactaaatagtgtcgaataacaatactattattaatgttatcatagaaaaaaggaattaataatagttattaaatttaaagtttagagttgaattgaaatagaaagggggccactagtggcatgagtgtgggtatgtggagcaagagggagggattggagcatcttttggtgatgttgttagaattaagcagagcacgtggctaactattccatgaccctttcctttgatatctctgagaatccatttcctcttcttaattattccacacgtgtttaatcattctcaatttctatatatcttattttaagacataatttctaccaatcactgtgaaacacatataatttcaatcaactttaattacttgtttaataagaatatttttcgagtaaataccattttggaccttctgttttacaaaagttaccaattggaccttgtgttttattaaataacaaaatggaccctgtattttctaaaatagtacatata

SEQ ID NO: 213600 - DNA, 696 bp, Cannabis indica
ttaaaggtcgttcgtcatacccacactttttaggctaaaacgtgaggagggtgtattagagttagtcccacattgctaatgtgtggacataaattgtcatatataagatgaatgggctactcctcctattgccaattacttttgagatagaacctcattcatcttatctcaaattctaacagaaactaagggtgttcatatgtgcaattcgtagttccaaaccccaaccaatctggaccaaaccatttgagacctgacaaaataaatctggtgtgaatgatttgatcaatctggaccgttttaaattctttggttcggtcacacttttagaatttttggtagcatttcaaactaaactaatccgtataactattatatatatactcttaatatatttttgttttccacaaaacattgatatttaagaacaactttatgtagaatattgatattgagtttatattgttatgattataattttttattattaattatgtattataaacttactaaaagtaaaaaaataccgaaaaatgaacaattattgtaaaaaaaaaattaagacaactacgaaatataaaccatggttcgaaccaaaataatttgtttctgagtggtttggtttgatcatttaattggtctggtgtagttttgaatttttgaaaaaacagtaatacttatttaatttaaaaaaat

SEQ ID NO: 213601 - DNA, 775 bp, Cannabis indica
gagttgtaaatggcctctcatgtatttgattgagagtgtcactagtgagacatattgtaaggagcaagactccattgagtgatagggttccctgtttttgtaacctctgttcagaccaataaagatcatctcctcaaccaatttaaggttgctttctcccgtgaattaagctcatgatcatcctgattgtatagcccaaccacataagttcttggtgttgttttatgctttcattagttgttattgttgttggtttatgttactggtttgttcaattactaatcttgatgattatgttatgtttttagtgttgtgtttgttcttgtttggagtttgagactttttaaattggtatccgagcttttctcagcaatttaagaatcaaaactgttcttcaaggaactcaccaagaagatcaagaatgtcgagctcgaagtttgagattgataagttcaatggtgctaatgattttggcctgtgattgttggtccatcaaagtgcttcagatgccttggatatagaagctccaacagccattgatgttcaaagcaaagaataatgtttaagcatccatggaaaatacgataatcaaaggatgttcaaagcaaagaataatatttaggcatccatggaaaaatcaactaaatcaagtggaatagcaggaatagaaagcttacccaatataagaaaccgatgaggaagaatgtgagaagcttggatcgtcaaaacgacgcaaatgtcctaagagaatagtgcttgatgggttcgaccctct

SEQ ID NO: 213602 - DNA, 509 bp, Cannabis indica
tacataatgctttatttaatacaaggagcactcattgactcaattattatttaattaattataaaggcagttgtcatatttttataactttccatgattaattaatattgtcatatgctttaaaaaacattaatattgtcatatatacatatttatttagttttaatatttttttttctctcacaaaaaaatttacagcactctatttatggttttctctcttttacataattaataaaaatagtatcttttaagatgttgtgttgtatatttagagttaatctatgagtggtttgtatgttgcaacgagatcgatgtctttttatttttctgttgctttatagctattttttttattattttttataattatttccatgttattgtttaggcattctataattattttatagttatttttatgtatttttttttgaatgttttacagttaattcggagttaatttttgaatgatttgcatatttaaacgagattgatgtcttgttatt

SEQ ID NO: 213603 - DNA, 542 bp, Cannabis indica
aaacataacatttgtatttgtccgttttatgattcaagaaaagatgcatgctctagaataacttgaatttttttttgtataaatctttctagtttttttgtttattcgaaaattaataaaaaaaaggttatgtgacttgacttatgggctaaggaaatattgtcctttgtatttcttgtggtaagtatcaacatatgccctaattggttaattttgatgaatttccttttaaaatttgatttcttattaattgtattttgtttaatttttggtcttgattgatttttcagatttaattgattttttttattggaaaaatcttagtttatttttgttttcttttttattttattgtgtgtttctttaaaattaataaataaataaatgggtggattttttttctttaatagaggaaaatgaagtttttttttttattctctttttaaaaatttcaaattagtttcctttttgttttttcttcatattcttatttatacgagttcattttttatttattctcacaatctctctctttctaccca

SEQ ID NO: 213604 - DNA, 995 bp, Cannabis indica
gatgcttctttgatggaatgtggccggtttaaggatttattggacaagtatacggcggcatcaggtcaagcagtgaattttagcaagtctgagatgtgttttggtgcgttggtggataggagtcttcggagtcggttagctgctttgttggatgtgaaagtggttaataactatggtaagtacttaggacttccatcttttgttgggagaagcaaaaaggagctgtttgaagttattaagaatagggtgtggcaaaaggttcgtggttggaagggttctatgttttcagtggctggtaaggaggttcttattaaagctattcttcaagcaatggcgacatatactatgagttgtttccagttgcctaagagtactatcaagagcttgcatagtatggcggcgcggttttggtgggggtcttcagcccggcaaaagaaggtccattggtgtaagtggagttatatgtgtaagccgaaagtgaaggtggtttgggatttcgggacttgggtttgtttaatcaggctcttttggcgaaacaagtttggcggtgtttgcggtgcccaacacttcttagtagtagggttctgaaggcttgttattatcccgataaagatgtgttggaagctaagtgtggtagtaatgcttcttttatgtggcgtagtatgatgtgggggaaaaagcttcttctgaagggatatcgttggcaaattggggatgggaatggggttcgggtcttggatgatccatggttgcctcgaccgattaccttccgtgtttatgataagccagagttttcgcaacagctgtatgtggtggacttgaaattggcagatgggaggtgggatgaaggctttataaaggcgcattttaatgaggaggacgctgatttgattttaaatttgccaagtggttcgtggggagtagaagacaaagtgatgtggcattacacgaagaatggtgaatatacggtttgaagtgggtatcggttggctcat

SEQ ID NO: 213605 - DNA, 498 bp, Cannabis indica
aatttatttttattattctctaacagaataaatgttttgcaaataagtacaataaaatcaataaatagataataatatttgacacttataaatattagaaataaaattaaaagaacaaaagtgaataaaaaattgaaaaatagaaaaaatagataaggtaggaataagaaataatagggcgccacgtcacctactctaacaacaacattataaatatatatagatattaatttataggtggtaattattttagaatactataagtcttaagtttgttttcttttaatttagtatacatggtaattattttagaatactttttggtttgatttcttttaattaataggtattaatttagtgttagttattggttacatactaattatcttttttaaaagaaattagaaaaataggttattagaaaaaataagaaggttaagcatggcacacaactctttaaaaccttcatttatatacattgattgatattgatgttta

SEQ ID NO: 213606 - DNA, 1553 bp, Cannabis indica
aggaaatatttgagtcccaccttattttaagggatcaatattataccttttcagggtagttggaatactaccgtaaaagcattaaaggacttaaaaaatataaaacttcataacaaagagggtaattataaagattgccttttccctcctaacattaatgcattccaaatagtccctaagtgaaatttcattttacattcataaaaatacacatttgttataaatttagaaagatataaataataaactttgtattcactttactttatattctttatcaaagttacacatatataggtgaatacatgcatgtataatgtacataattattatacttgctattgctacaagttgactattattgctattattgtagtattatcatttagagtatactacctattttatactatatagtcattcataacactcccccttaatatactctttaatttgtttataattaatattgtctcactaaaaaaaccttactaggtaaaatctaatgggaaaaagaccatagtaagggaaaaagagtacagttgaataacttccccttcacaataacattaccagttacttctcacagattttgtagatgacgcattccaataccatgtctcaatttttttaagattgtagtaagtgatgactttgtgaaaagatctgatagattctcactggatctgatgtattgtatatttagatcatttcttttctcaagtgtaaatgagaaaaatttaggaggaatgtgttcagttctattgcttttgatgtaaccttcttttatttgagcaatacatgcagcattatcttcatacagtatggtcggatctttatgggtcaaaagaccacaactttcttaaatatgctgtgttactaatctcaaccatacacattctcgagtggcttcatgtagtgtgataacctcagcatgatttgaagatgtagcaacaagagtttgcttttgagaatgccgtgatattgcagtgtctctatatgtgaacacgtatccagtttgagatctagctttatgtgaatctgataaataacatgtatccgcaaacccaactaattcttggtttgagtttttggggaaaaattgacctaaatcaatagttcctcgtaaataacaaaatatatgtttcattccattccaatgcctcttagtaggtgatgaactaaaccttgataacaaattcactgcgaaagtaatatcaggtcgagtacaattaacaagatacataagagctcaaattgcattaagatatcgtacttgtgtgccaagtatctcgtcattattttaacaaggacaaaacaggtcttttttttactatttagtgatctaacaaccattgggttacttaaagggtttgctttatccatattaatgcgtttctaagacattttcaatgtagtttgattgatgcaacattatcccattgtcggtatgtttgattcgcaagccaagacatatttggcttttccccaaacttcttttcatttttaaattcttttcttctaagtacaacattgcctcatgtaactcttta

SEQ ID NO: 213607 - DNA, 503 bp, Cannabis indica
tagaaatggccaaagtgagaacgactatgatggtaattggtttcacaacagggctgaatgtttcagtgtagtcaaagccaggttgttggtggaatcttatggctactaacttagctttgtacttgttaacagagccatcatgattgtccttgattataagtatccatttgcaactaataggctctctcccttctggcagagggacaacaatatatgatttatttctggcaagagctagaatttcttcagacatggcttgtctatagcagacttgtctatagagtgctttatgaagcactgagattatgaagttatggtaatgtgtgaattagagtattttatgaagtcactgaaggtgagtatttataatgataaatgttaggtgttgtatgaaacacagagatgttgattatgaataactatgaaatatacttgattaatgtaataaagtgtgctctcataaacattaagttatttaatgcaccttgaatgtgtatgaccta

SEQ ID NO: 213608 - DNA, 521 bp, Cannabis indica
gtaaatcgtcgagcagtagtttcaactcaagtttaccaacatacttacattcagaatcaaggtaaaggctagaaccgaactagtgagagtctaaagctgaggatgaagatactgtacatatcgagatggttataccttgagtgttcagggtcttcgggacagttttggctcaccttgctagtcgctagacgacaacttttaaagtttaaatattttgtaacttttaaaaccggatcccaaattatgtaaattattatgttcaattattaaagcaaagttatttaataaagttttaattattcatgttttttaataaaccctttgattagaaaaggtgtgcagaatatttagaaaacaccataacacacctaatctagtagggtgttacaattttagtatcagagccgcgaggttgttctctgaagattgtcaagatatgtacaatcatcatctaagataagcttgactcatggttcggtaagtttttacgagttttaatagttttatttgttatgcatgat

SEQ ID NO: 213609 - DNA, 867 bp, Cannabis indica
aaaaaagctgaattataaaaattgtaattaattatttgttacattaattgatatttgatttagttataaaactgacacaatatctaacaaaagaaatattgtgaagtttctttacgttgtttttgcaacatcttatttcaactttaaaataaaatcaagttattttcatgttattgtaaaatttgtgatgaatttgtttatatattgtactggttgttaaataatttgaagaataatgttttatatgttaaaacaaaaacttaatttatctcctacattcacatataaaaataataaaaaaacacacattatgttaattttgaattaaatgagagcattaattacagttaagaaaatagataaggtaaggaattaatatatagaacaaaagtaatactattcaattacttttgttattaagtaggatcatagctttggaattaatttttctttattttgaagctaggaatcacttgaaggtatatatattgaataaagaaaaagaaaaaagaaaatgtagtatggtaaagtagatgaataaaaaaaataccaaaaaaaaaaaaaacaagaataatagagaaaactgttaaagttgggaattaaaaaaaagtaaaaattacctttcgtttcgttgtaatataagagcatctctaaataagtgatagaaaattaaaaatatatattttaatagtatgttaataagtgatgtaaattcagtatataataataatttgtgccaaatttaacacaatacattttttataatataaaacttgtattataataaatattaaaattatatattaaattttaaattatgttttataattgtatattaacgtacaattctaaaaattaatataaata

SEQ ID NO: 213610 - DNA, 594 bp, Cannabis indica
ttttttttcttctgggtcttgtgaaaaccatcaactaatattgaaagttcgttgaaatgaagaccaagattgaaaaatccttttaagttttttaagttttagaacttgtgtaaaaaccttgatatctttcttagtggtggtcaataacaagacatttgtttggcttggacaaaataaaatggctttggttctttatgctattctttaatttactttaaaattataaatattgcattttattgctttgacattttttttttttttgaaaggaaattcaaattttattttatccttcaaattttgcaaccaaagtaggaagcagatcagttggaacatttttcatactgaagttagaatcaggatataacatagacgctctagcaaactcatgagtgactacattagcttgtcgtttcacaaaacaaaacgtgacatttctttcttgagcaagcgaggtcttacattcatgaataatctctcaaaataaagattctgtacgaactgcacttctcaaggcttgcacaaccaacaaacaatcggtttctattataactgagttccacggctgtgttttggtccaacttaaggcctcac

SEQ ID NO: 213611 - DNA, 653 bp, Cannabis indica
attaatacatgtaattattttttgtttataaattttcaaagatcatgtttgtcttttttatttttaattaataaaattaaaataaaaataaaataagttaggaaaaaggaaagatattccctataaaaatgagggaaaatctttctttttattttttttcctaatttacctaggcctcactatgtttttcctttccaaaattttataaacaatcgtataagaattaataacatgccattaatttcaagtaaaacaatagagttgctctaaatgcaaaaaagtctctctcgatagtgataaaaatggtgtctctaatcttgtcctatatctttaaaattagggtattttgtactatactttttaaagggataatttaaaaaaataaaaataataaaaaaattacaaaaatacagtttgtatggaatttttaatatttttaatgttttttagattttatttacacaaaataaggtattttagtgtatttttatattatattcttattattttgttgttaattttttattatttgtacatttttttttttgtgttattttattattgttttgatgttattttattataactttcatgtgattttttgtgtttttataaaatatggtaaaaaaagaaaactttaacggtaaaaatgt

SEQ ID NO: 213612 - DNA, 681 bp, Cannabis indica
tcacttacatccattgcgacgtaacaaacgaatcccaagtcaaaagctgctgtggaaaaaagccctaaaactcgtttggaaagttagacataaatgttcaacaacgcaggcatacttggtgacaacaaatttcaactcaaggatagccacaaggacgattttgagcgagtgttgcgtgtgaatgtcacaggcaaggacacttagaggtagggatgcacacggggcgaagaattagcggggtgctcttcccgtccccattcccgttaagggttttaaactccatatccccactttcctcgtcaaggacaggaggggaaatcccctaatgaagcagagacagagcggggaatctcctattaaaaagaataaagtttattttaaaaatttaaatataaatataaaattattaaattacataaaatataaaatattaaacattatttattatttaatatagtaattattatacaaaaatacaacttcaaaaattacaaaaatgatattaatatactaaaaacacaaacgcatatataaaatataaaatattaataaaaaaattaattaataaattaaacggccggacgaagagtgtcatccctgtccccgtcccatttaatattcgagaacaaaaattgatttcggggaaattctcgtcccgtaaagaaaatgtgcatccctact

SEQ ID NO: 213613 - DNA, 606 bp, Cannabis indica
tggatggccagagacacccttcgacattgggctgagcttgacgcgacgagagagaagggtccaagagcgagagagggatcggggaacacgagttcttggggtttcgtggctcgtggaggttagccatggcctccgtttaggccttcgccgaacgagggtggctccaccaagaaaattgagagagacggagagaaagagagcttaagtgagggtgaaaccagcgagatgaggagagagaaagatatcagagcaaaaataagggttttcaaaaaccgacaagtactctggactggctgtcgtaggtagaagagagggagaaagagatgagttagggtttttaaattagggttttcttttctattctattaaaataattttttgatgtaaaaataaaatgtcaatttatattttaggacttcaaatattttttttataacatgtaatccttttaattgatttttttttaattttaaataattcttacccaataaaattatatcataggtactatgtgtccacgtaaatttatacgtatacgtagatgtagatagttcaacatggcagttaattaatatataaaatatatgtaaactataaattgctaac

SEQ ID NO: 213614 - DNA, 504 bp, Cannabis indica
acattcaacccagactttctggagttggctattgtcatcaatgtctgaaagcctcctcactcgcatggtaggatgcaacaccgctcgacagatctggaatgcactcgaaaagcacttcacacttcaagtctcctccaagatcttggaatttagaaccaaattacagaagcttcgaaaaggtgccatgtccctcaatgactatctgttgaaagtcaagcaacatgttgatctccttgcctctgtgggagaagttctgagctcaagggatcatattgctgccatattcaagggactgcctagtgaatacgacacatttattatctccactaataccagaattgaggaatactctgtctcagagatcgaagccttactgttggcctctgaatctcggattgaaaagattgatctcgatcaagatgttgatctcagtgcaaatcttgcaactattgaacttgatcaatcttttgaggccaatattgcataccagaacttcaatcgtgg

SEQ ID NO: 213615 - DNA, 650 bp, Cannabis indica
actaaactaaactaaaagaatgggatagacacgacagttattctccctcctcccacatttaatataagcattattcttaaggctcaatcaaataaaattaatacaaaataaaaagaaaagagtaagaaaaattcctctaaatttgtgttgtttaacgtcattagctcgatgcatggtgtactgcatatggtcttcacactgggtcttctaacaaagactcgttatataattattaatgaaatctaacacattgtatttgagtgcttcaccatcaatttttattataagtattcatgttttcatatctaacttcttactcgcagtgagtaagaaaggtatcccaaatagagttgatgtacgataaggatcatcttcatcttctctctcaattatgtaggaatcacttgaagtgacaagttcattggcctgcacaaaaaatttcttcaactatctatgggggataagcattagtctgattagtcaattgaataaaaacttgagttttttttaatggaccaagatttaaagaagcaaaattagaataagacatcatattaataatttctcctaaatctagcatgcaatgatcaaatctgattttaccaattgtgtattaaattataaatatcccaagatccttacactcatgt

SEQ ID NO: 213616 - DNA, 697 bp, Cannabis indica
ttttacttaatattaacaaaaacacctacaaagtataaatttttcttaagaataaacaataaaaatttatatgtttgctatgatacaaataatatatatttatcacccactaaataaaatttgttagtcgtgactatatataattaatgaacatagctaggtctaagcttgtgggaatgatactctttcgtttattatataaaataagcttatataatttcctttttataaagctatattttatatatatagctatatgaaattgagtatttttagataaatgaatgtataattttgtaatcaattctaaatgtgaatgttttagtgggttgtgttgagttctccattaattcaaaaatggtaattgattaattaatgtgataataaaaacaaaggaattgatggcgtcaaatataagaatgaacacatttttggataaatattaattaattaatcatgtttaatattggactatcacttaagttaattaatatgcgcaaatgagtaagtaattaggtgtctatacattcattttgtatccaattctaaatccatttgttgaattagctaggttttaataaaatcttaatatttatatatatatcttcatttgcatcaattaacaaataaattacactctgaactcctaaaggctcctaataataatattctcctcgatccaacaccatttcttgcc

SEQ ID NO: 213617 - DNA, 678 bp, Cannabis indica
atgtgtttattataaacaaagtattaattttgttataatatttattaaactttttattatgacttatgttatctttgttgtattggttagtgatgaatagttgatgaatttagtatttgtgtgtaaaatctagttaaaacagatgcgtgaactttttcagttaattgaaattttttatgagcagatccagtctaactagtgttatatagctaagtcttttccctaactctataaattaatacatattgtctcatcacaattgtatgcttttgataataaaataaataaagctacttttgatttagagatctaagaaagaagacttagttgatatcgaattacggcaattgttatggatcaatcaggtattgtaggtgctaaaatctacaatgatcagaatgaacgtttgtgggcaccaacaacctgtggaataaagacaaaggataaccgtgaaatctcgagacaccggggtggtgtcggccgaaggcacttcgacggtcaagtcagtaaacttatagtgtgaagtaaaaaagaaaataagaaatgtaagtaaatattttctgtgtcaatggttatgcgagatgatcgacggtcaaaccttgctcaccagaatgaggaagagtacgtcaaattgtagacaaattataggtccagttgtaaaactacaaaaagagagtg

SEQ ID NO: 213618 - DNA, 730 bp, Cannabis indica
gcaattaaaaaaaaatagtgaagtgattaattaaaataacataagtgtaataaaatgtcaaaagagttttttttattaatttttaatttttttaagagaaaaatgagtgttttaatttattatgtgattttttataaaagaaaaatgagtatttttttttatatcaatcaaacattacattaaatgagtaagactcatgttaaaagtcaattctaatctcctacaatacatcacattttagtggctacgaaccactctttatatccataaaataaaataggatccattttatttttgaatccctagaaatagggtatttttttaaattcccacatcataaaatagtagaagtagcacatacaaggtatgtgcattttaattaaaatgaaaattatacaaggtagggtatagtaaaatttaatttataattatttaattatatataaaatcaaataacatagggaaatttgattttttacccttacattagggagaaattttttccctaaacctataatacattatattggtaatatgggacaacatttactatattcccacattacctccctcattcatatatgacctctctctttcccctctctttctctctttctctgtctcgcatctcttcgcggcacacagaccgcccacagccatcgacgcagaccacccacaaccgtccatgtagaccgcccccaccgtccacgcacccgaccaccccaccgtc

SEQ ID NO: 213619 - DNA, 738 bp, Cannabis indica
gttaccaacgtgggtccctttttaaagtcctacgatattaagaacaagaagggctgttggagtcatttggttgaactaggcaagttcagctactttcccccaactcgtttaatggaagaacaaggggagggttgcagcacaagtggttcttcaataataggcacttggagaatcaaacatataagcgttggggccatccttcccttaaattagtatttcaaggatttttgtaattatcttagacttgcacctcttcagctcatccctaacacatataggatcttggcctgtttgaagatgctatatcacatcatgggatgggaatgcccaacaccattagagattttatgtttttatagtttaaaaatatgtaccgtgaggaagaactgcttgggaggcttttgtttgggcactcactctaacaataatgacttcttctggacgactgaccttcatcgaatcaacgataatgaattttttctctaatcaagtatcaatcaattgtgagatagtttgaaaaatacataatcaaatttattatttaacaaaatagatggtccaggaagtaacttttacaaaacacaagatctaaaatagtatttaattcaaaaataatatgttagtatgaacaatcattgtattggctatttactgttatttattgataattatttcattatactaacaaaatatcacaacattgggtggttggtagtttatccaataaggctaataagc

SEQ ID NO: 213620 - DNA, 847 bp, Cannabis indica
tggcagctcaatgcattacaagaagcatcaggtgagaagtaaatatttgttcatgaccttgtactaaagttattgattttttttttctttttgtaacattaaattttaggcaactaattaatgaatgaatttttttctctaatctaagtatcaataaattatgaaatagtttagaaaatacaaaatccaatttattatttgacaaaataaatggttcagttaaaatttttgcaaaacacaagatctaaaatagtatttatccgaaaaatatcttagtatgaacactcactgtataggctatttactgttatttattgataattatttcattatactaacaaaatatcacaacactgggtggtttttgatttatccaacaaagctaataagcctaatatttaagtcactaaatcgacaaaaaattaaaaacacatcttataattattttaaattataaacaagaattaagtgtttctttcgaaaactctacacattgtttttatttaaatgtatcattatgttctttttatttactttatattaaatatttatttataaaattatttatttaattaaattatcaatattattgtatattataataattaaaaattataatatagtatttaaaaagaaaaaactaaaataatctattctatataaaatgtggctatataacagaagtattggtttatgaaaaagtattgggtgactcttttcttaaagttttctattcaaaaataacaattttttttttgcctgaggttaaaccggagatataagaaaataatttctttaattatatttataatatatttataatgaagggttgatcattatattgaca

SEQ ID NO: 213621 - DNA, 938 bp, Cannabis indica
gtcaaatacagattagcatcacacccacacacatccgtgcagtattgcaaacagtatccttatctaattagaacccgacctattgaaaccgaattcatgaaatcaaaaataaagacacaacctttcagcaaatgaaccgagcatataatataaaccaggaaggaaggaaaaaaaaaaaaaaccctagttgacactcgactccaaaaccctaataactcaaaactgtatccaactatcgtaaaataatcatggcatctgtaaactatttcatctattgacctataaaattataaggctacgtatcttaccgaatcttggggattcacttcgatcggaaagttagtacccttgagggttttaacgaaaaccttcatcttcttctacgacgagaaaaaattcaccgttatgattccccggcgataagcacagttgccgccggcgaaaccttctctcgggcaaagaaagacggagagagagaatcgagtcaccaccgaaagctaatttacagaaagcagtgagagtcctgtaagttcttgtttgtatatatataaatatataaaatataaagagaatttgggtatggtcaagttatggtaacatctatattagtaggtttgggatctcctttagggatagccacgtgtaaactcgtggggtagtattattacgtgtcgccaaataattgggtggaatgctacagctggatcagattttagattattgtttccaaaatggccttaaagattcaaaagtgtatctgtaaatgactatgagattgaattatatttgatgagtgaataaatatttgttgctcgttttaactttgttcatgcatggttggtttactctaatgtaattttaacggtaataaaaatagtaatggaatgtaatagtaaataataataagattactattatatttagtttattttgtaata

SEQ ID NO: 213622 - DNA, 1038 bp, Cannabis indica
gagtccactcaaatcatccacattcaccaaagttcaataatgggaattcaaaagttcttctctagaaaaactagaggctcacaacaacatcaagattaaacattaatcttggatcaccatacaatcatcaacatcatttcagaagatggatacacaaagaaaaagtttgggtctcaccaagtgggtattgtagaagagaaccttagagaggacaatcgccaaatcggaaccggtagattggtagagcgccttgcaagaattcaccatccaaaatttgagccaaaatggatgagaatcaaccacttgatcttcaatgcaaaatgctaaaatccttttctctctctagcttcctttctcttctttccctctctttcttttttttttttttggcttgctgctcacgaagcacactcccttgcttgctgccattttttttcttttaattgaatcaaacaaatgggccttaagcccttattggtccaacccaacaaaaggggcggacccaacaataatttacaccttacctttttttttttggttaaaacaaattattacttattgtttatagggttttcttcagggtaaagctacgactaaatgttacttagggggccaaattatattaaactttaagtaaaaatatttcaaaatttattattaaatttagggaagttttatgggttttttttaatttcacttttacacttgaaagtagttttttttttgtgcatttttacggaaatccacatagtaacacacatattaactaataaagcaacatatatcgcatcttaaatccacatagcaacccacatagaaaccaccagtgcaatccaaaccgtaaaaataaaaaaagaagttaaaaattacatatgaggtaattctcaaagttttatttgcatcccataaaattataagcacactccattttaataatttttattttatataaaatatgtatttttaatttatactggtttttgaatttttttcttccttcttatattcctaaaatatatacttataaaataaaaataa

SEQ ID NO: 213623 - DNA, 790 bp, Cannabis indica
tacatagcatttgcttatcaaaaatctcaaaggccttcgaaataaaggcattgatgtttaaagacttgtgttctgcataaaaagtagaaaaggaagaagttttccaagcagttttaacactagaacattcaaggaaagcatgtgttaccgtttctggtgctacatgacagaggggacaaaagggtgcagggatgatgtgcctatgataaaggttagaagcaacaagaatagaattgagaaaaatgcgccaaacacaatgcttaaccttagcaggaatagatgagaaccagatcttagaccaaaaccgtttatttcccaagaaagaggaagaagaggggatatctctagagctaatagcgagatgataagcagatttaacactgaaaatcccagaattttccttcccccagattagaacatcgggacacatatgaccagctataggtatatccaaaatattgtcaatgatgaaagcaggaaaataacatctcagcttattcaagtcccaagcaccagaaggagaaggtagagtggctatcaaatcaaagcttttaagagcaaaattaggcaaccagcggtcttcaagtgtattaatagtttgctcattgcctaccttccaaagaagccctctcttaagaagatctctaccccacgtgatacttctccaagagaaagaaggactatgaacctggaacagcatcaagtaaaagaagtgtgtggaaaatacgtagccttaagagtaagactgagtaaagaattaggagtatggaaaattctccaagcctgcttt

SEQ ID NO: 213624 - DNA, 848 bp, Cannabis indica
gtacagttgtgaccaaactgacctactaaatttattttttacaaactcagtggtaaattaattaacctctacgattaagaaattacattttaattaacctatttaattaaaattccttttcactcatgaatttcgatgaatgaagtggtattggtggcagcagagacaacaatggatgaagcggcgtaaccatcagcgtcggcgtgatggcttatttttttttttttttttttttttgagaaattttcaatattattataaatcaacagtcctttacaataatagagaaaataggataaggtatttctcttatccaagatacatcttcatccaactctagagcgtacttagccaagccatgggcagttttattagcttgcctacgagcatgattaatagcaactctagggaaagaggataaaagacaacatatatcatcaattagatcattaaaacatgataaatctttatgagaggagttcagagcagaggaaactcttagcgcatctgtttccacaatatcaattgaaaacggacattgtgaagcccaattaagactatgaaaaagcgccttagcttccatttcatcactacgaaaacagccttgtacacgtttggagagagcagcaagaacatctcctctacagttgcgaatcacagcaccaatgccgagtgtttgtttgttgaaatttgctgcagcatcaacattcattttaagcatatgcacagcaggaggagtccatgtgatattgtctaagcttcgtggaaaatgtaatacttgcatctgcagccaaagttattctgttggttccttgttgtagcagcaggttgctggtgcaaggctgaag

SEQ ID NO: 213625 - DNA, 505 bp, Cannabis indica
gtcttctcttttattctttttttttttttttttttttgatgttttcaatttgttattttcaattatatagaatgatgattatgaactaaattgatatttaaagattttaatgaatattgtttgatattttttatggtttaatataattttagtttttcttccatctcttgcatctattttatttgcttgtgtactaattatttatttataattctaattgtaaaatttgaaaagtaaatattgattttgttttattttggtgctttcattatttgtttatagcacacacgcgctacgcgctttaaataacagaagaaataactgtgtggcctaaatgaggctaaaaaaggtgggaaaatatttggcagaaacaactgacactcagctttaatcctctcgtcccgtcctctaaccttaaagcatatgaatatggactagtggagtacgtatacatcatatatgtgtgtgtatcagtgtatgtatttggtgttagttgggcgggttt

SEQ ID NO: 213626 - DNA, 778 bp, Cannabis indica
acagcataaaagcttgtgaaacacttgcttattagtgaaaacagtgaaagagattttcttaaacaaacaaaatggaaataatgtcttaaatgtagcacgattcctggatttgtttcagtttataccaagtgaatgggtcaaaggggtgcttagcgatgttgaaaaccttactgaggataaaattgatcaagtgttgaacgagtttacaaaagattacaaagaagattctctagagagcaaaggttggccaacttctttttcttcatacatagtctccaaggcttgtttgaatgcttacacaagaataatggccaaaaagtatcccaacttttgcatcaattgtgtaagtcctggttatgtgaagacagacataaattgcaatgctggggtgttgactgttgaagaaggtgctcaaagtgtagtgagcttagctttgctccctaacgacggtccaaatggcttgttcttcaatcgccatgaagctattcctttttagttattgtatgaaatatgaatattgtctcctctttctttcataatgaataattatttgccttttcctattacaacaagattgtggtaatttagtatcgcttttttattttagtgttttcataattataattagtttacctttcctaattaccttaagcatatgagactagagtggtgttctcgatatacctaaacaaatggtgtgattactactgtttctccctttagatctttactctttccaggtagtagaaaactcctgtgctgttctttttttttcttc

SEQ ID NO: 213627 - DNA, 785 bp, Cannabis indica
tctaataatatatatagagaaaggtagacaaagttttgaaaatagtgggagggtcggcaaagcgagccaaccctataagtttacacaaattatgtcagccatatgtcttgatagccatacagcactcaccaaaacaagggtgagcgtggcatatttagccaactgacccttttaaaaatcacctttagcaccaccacttctatttatattccatgttcaatgtgtttttccgcttctcctcgatgtgggactatgctattgctactcaattcttaaagactacatctactctacttctactagtcatgttcttttcacgagttgatataacacattgcttgtgcttgaagaaaatatgagtccttgtactttcttccacttccaatgtgaatgccattcttgatccaatcctccctgtgtaaccatgcatcccgaccaaaatcaagaattccaagaatctgacaacaagaagtttcatgaggatatgatttgtgttctaatgggagtaacaaattcagaggcagaatctaggagacaagtaacactacaacacagctaaagaaccaatccacaaggaagaatggattagaacactaatgaatattgacttaccgctccacctttccatgatacaaacatcgggcttgttcttgatggcaaaacctattgaatatcggataaaggtcagataatctacagaactccaaattccattccttcactgagactagataaaagcacgaaacaaaataactaagacatagaaatgaaggagtaacctcgac

SEQ ID NO: 213628 - DNA, 563 bp, Cannabis indica
cagtcgttatgttgcaagatcctcaaggccaaatacctaaagggaaaggactttctcaactgcaagtacaaagaatatgattcttggttctggaagaatgtcgttaaagctagtgaaatcctctggaaaggggcttgtaagagggtggctgatggaagagacactagcatttagagggacccttggatccctcacttgaaaggtttcgtcccgagaccaaatagaagtgtagctatggataataattgtgtggctgatctactatctcctaccggagggtgggacattcttaagctaaaaagtctgttcgatcaggagactgttttagcgattctgaaaaatggaacccccccaggatcgggaaaggacagttggttgtggaccttggagagtaatgggcgtttctctagtaaattggcttatttgtctcaggccttggagagagctccccagtgtaatgtcgcccctgctctttggaatagctatggaatagtaacatactggagcgtcataaggttctatggtggtgcatcctttcctaagctctccctgttcgagcagtg

SEQ ID NO: 213629 - DNA, 692 bp, Cannabis indica
gtggatgatattaacaaaccttttgatttgtaccataatattagaaaactaatgtttcaatttaacaacataatttttttagttagaatccataacaagtgttacttaagaaatatttttaagaaaataaagttaaatctcagttttgaccagatagaaaatataaaacacaatcattttgctaataaacataaatattagttttgacaacatagaaaatacaaaacatattattttgcaacttcccatatctttaaccaaatgtaagtttgacaatgattcatacttaacaaatatttgcagatcaataaagttaaatcttagttttcacaacatagaaaatacaaaacatatcattttgcaacttcctatacacccaaatataaatttgacaatgatccatacttaacaaatatttgtacacaatgtagaaaacatatcattttgtaacttcccatatctttaaccaaatgtaaatttgacaatgaaccatacttagcaaacatttgtactcaataaagttaaaacttagttttcacaatatagaaaatatagaacatatcattttgcaacttctcatacctttatataaatataaatttgacaatgaaccccctacttaacaaatatttgtacacaatatacaaaacatatcatttttctacttttcatatctttaaccaaatgtaaat

SEQ ID NO: 213630 - DNA, 726 bp, Cannabis indica
taatacatagtttcttatatttttaacacacacagagcatgacatataattaataagagcatgtgtatccttacgtaaccatgcatgcatacagtagtacgtatgaatacacgtactatacttgataattgatgagagtggatgatgatcatcatcaatttgtgcagtttgatgatgatcatcaatattatttatatttttatggtaaatatcatattggaccttgtgttttgcaaaagttactgattggattttctattttttaaatgacaaaatggatcctgtttttttctaaaatggtaaaagtaagacagtgagctaagcttaatttttaacaacattttttttttaatataaccaacttgaagacaaaccctaacatgaacagacacagaaaatgttaacagttttgtcacaacacatttagatcggattattattaaattttattttgacaaaaaatcagtacttgagggtcctatttgtaccattttggaaaatacaggatccattttgtcatttaactaattggtgcaaaacacaaggtctaaaatagtatttataaccccgtatttttataaagaaagagctcatttgatggtacttgatcaatataagttgccaggacacaatatccagagcccatagcattgcattgataggggtagcaacactcgtgaaaggcgtacgttgcatttagcatcgtcgggcctacaaccaggaata

SEQ ID NO: 213631 - DNA, 990 bp, Cannabis indica
gtaattattagatattatctcatctacatataaatgaaacgtgagaaatattcacgtttcatgagagttgtaagtgaatagatctcaataaaaataacagtcaccctatacacctataaatagagggagaattcatagaaaaaggagataaaagaattgagagaaaatactatcatttaccttcattgaaatttgtactctgcatatttggttaacgaaaatctagattaacatgtatatttttactaatttaatataaatgttggttgcaaatatctaattataacccgcctaataaaaatataacaaatttaactcgcctaataatttcatcaatttagtttggtcaacctattcaaacataagaaaatgtatttttttttttattattattattgttagtttttagtatttaaataattaaatttggaaaataaattctatatattttaagattaaaagtgttgtaatctaatttaactgttaaaaactttaaacaaaacataaatataaattaaataaatatttaagtattgcaaaaaaaaaaatctttaaaagatagaaaaaaaaatatattaatgtaaaaattttaattttaattttatattatgcaaaatatagccaatttgaataaaaaatatattaatcggtttatttaagatgattaaaataatatttaacatttgtcaaaaaaaaaaaaaataatttaaccggctcaatattatatattcattgaaatgtgttttttttttatcggtttcttcatattggtttgtaaattcttttaacagccgagtttccttcttgaaacgacgtcgtagttgctgacgaatattctgaattccgtgcaatcaagatccgattttcaaagttgaaaccaaaattagcatctgctttatacagttgatttgttttaaaaaattattatttatacgaactctgaactcaactctgttatatatttatacgaactctcaagtcacactgatt

SEQ ID NO: 213632 - DNA, 472 bp, Cannabis indica
cttaaaaaaaaaatcacatgtcactatacataccaatagctactagtcagtgcttaagagaatcaaataattataaaataatatatatcatgccacataatctataacggataattttaaccaatcaacttcattctagatattttacttacaaaaaaaaaaaaaaaaaccttcattctagatatattagccaaaaaaactttattctagatatataatatatcaaataatgaaaaaaatatattttttagtaattaatgatacaaatatatattttttttatttgaagaaatgatgagatggggactttttgtgtgtaaaaatgattatcggttgacatttataatattgtataaattctctttttttgtttctttaattaaaaaaaaaagaatattggtaaatttaataatatgttcagatttttaccctttttataaaaaataaaaaataataatccatatatatactt

SEQ ID NO: 213633 - DNA, 730 bp, Cannabis indica
caaaacactgttttcaactctttaaaccccctcgccggtgaatagtcttcatttattataccctcctccgccgacacgtggttattgatattaccattcacgatttccgatgctgtcctctcaagcaaaggctcatccatcttttcttttctttcttttctttttttggctattatataccaatattcaatatagatagttgaaattatatatctttgacagttgggtacaaatagcccggtttggtggttatgttagtggttttagagtgtgatacgacgactgtgtttgctggatggaccctatcactgtaaacattaatgactagtgttgttttgtaccgatcaataatcaagtgtcatcagtggtcagtggatagagacaagtggtagtagtagccaccacaacccccagctactactacatcgcacgaaacttttaagtttttcttaaccaacattaatttaagaaagctaatcatgagaccatctcacccaccactaccttatttattctatgaaaatgctagggtaccttaaggttacaacttacccaatttagggtagttaatgtccaattcaattatccaattacaaaacaatgggatatttaattacaattcgattaaattagatattaaaagttaaattgtaattgaattggattagttcaatctcaaaatctaattaataaccaatgcaatcaatttacatttatatatattaaaaaa

SEQ ID NO: 213634 - DNA, 1600 bp, Cannabis indica
atttttcgtctttgaagcttctcttgcacacatcttaacttagtttagcctctcattaataaagtgaagtatctttgtatataatgacaaacagagagcgagagaaataagcaagaaatagaaattaatttttttttcttatgcttaactaaagatgttttggttaatatagacaacaaataaacaccacgattagttagataaaactaactaaagttctaacaattaatcaaatataactaatttaattaaagttaattctaatatgtgtagaaaataattactatttatttctattaattaatttaattaattaaaataatagaaatttgtacatttcatttttttttcgttataatgattctcatcaatagagataagaaatttgaattgaaattttttttcacatgtaggatgttcttactatgaaaattcaaagaaaaataaacataatataaaattgttgtccgaatacttctttcatccattaagtattttattcattttattagttaattcaatataatattttaataatattattataattcataatttacagtaatcaaatatctatataatttttcaatattttaagtttatatttatttatatgatttttcaattagtataaaaatgtaaatcaattaaaaaaattataaaatttgacaacaccgcgcgaagcgcggcttaattccctagttaaatataaaggaagtggtattattttctacaagctaagaggacatgagaagtcatcttcaacagagaagagaaagcatgagaagatactacaagattgttttgcttgatttaaaagaaccacctcttttagatatcatcaacagagaaagcaaaaataccatctgcattcaaaaagttgaaggtaattaaaaattttattatatttctttcttgtaataaaaatgatgttgttatctgggtatgtagaactagcaaatgaagtcctatttaattttgacttagggtgcgtttagaagtaactgtgtaattattaggtagggtaattactagggtggtaattacacagtgtagtaattacactatattttaaaatgaaaggtttggatatgaggtggtaattacatatgaattcctaatatcttgtttggcaaaatagttagtaattatatgggaaaataatattttttagtaagtaatgtttaatatggaaagtttttagtaattacacagtgtaattacattcaattctcatgggggccatgagaattggagagtgtaattggaacccctcaattacttccaattacacagttacagtataattacatggtcagacaaacatgtcaaattgtgtaattacctccaattacacacaaatccaattacattgtggctttccaaacacaccgttaagaatttgcatatatatatatatgagtgaataactcaaaattgatgtgccatgaaaaaatatactagaagatgtctacatatataaagcttttatagcattttttttttctttcttttaattattttttcttgtagttacttactaaaaaaacgtaagttattaataaaaaagtgtatatttataattattgtaaataaaatt

SEQ ID NO: 213635 - DNA, 541 bp, Cannabis indica
ataaataaacaaataaataaaatcaaagcttacgaaaaagtaaaaaaacaaaagaaaaaaaaatctcgaatgaatcaaaaaacaataaatgtattgattataaatattgaatgtaaaaagaataaacaagtaagtaatacacaatatttacttatcaaatataactcacaatcagttattaatatctctaatacaaaaataaaataaaaaattatttgaactccaaaattgttatgaaatgtagatgctaatgatatataaaatgggatttttttttcatatagctttattttggtaaaaatttacttttttgctctcttatacattttttttaaaaaaaataaatgaaactcaattttttttttcaaaaatacaatctctacaataaccttttcaaaatgacttttccaaatatttatatctgaattcaccatgaactcacccaaacaatttaagatctactccataatcgacgtagcttctccaaacaacaccactaacaatgtaaaagctttttctgatcaccatgaatgtcgacgag

SEQ ID NO: 213636 - DNA, 1000 bp, Cannabis indica
gtgcaattttatatacctgaagcgagtttgagacggggtagggggtgatattacccaccccgtattcgacccaaatatatagtttctaaactttttatttagttttccgattattaagtactaaagttattgtctatacttgcaaagttaactattaatcttccctaatttactgtgtaataaaaactttttaatatgtggaatgtttacttatttaaagttaatatcttattttttattttcattttaaattgttatttttatttttaatcttaatgggtacctattgggtccccatacctaatggagattcccttactcggaacccatcgaggattaagtagggcgggggtggggatgaaaggcatgaatataaaacagggatggggttgggaggtgcattactcgtttattacccacccaatttttatccctactcttgagatttccataaaaataaaaaataatagtaaaaaaatagattgatttatataattatctatttatagtgtatttggtaaaataaaatatttcttaatagcattttgtatgtaatctcttatattttttttttttttttttttttttttttttgaattatttgtggaatttaatatatattgatttgacgattaaaaataagagaaattctcaaaatgtctcaggcattcacaaactttggctgacttttgaaccaagttcatttcgttctcaggtttcacctctgatgagtcaaattaaagcttcatttattaatattgaaattgaaatgtattttgggaagtttttatttgttgtgttcaaactgtgtattagtggccataagagttttttgaattgtttaaatgcctcatattaggctttaactttcttttttttttttttttattctcttcaagcattttatatttgtaaagaataattcattatttgtgctatttctttgttttttttcgttgttctatgtattcgtttgtcttttaaatagatttaaggattg

SEQ ID NO: 213637 - DNA, 1136 bp, Cannabis indica
ttggaagatcatgcttgtgagattaggcggcaccaagacgactaagatcatcgcaccaaagaggctgccgacttaatacgaagctacttcaaccaaaacactcaagggaagggtactgatgcccataataaacagataccccaaacctatccttaggaggtccctatcgcgaggaactagagggagagggtggtctatggaccttaagagcgcccaaggaaccaagagaggactaggagtcatctctccaacaaggttccctgcaataataatcgaccgctcccaggcgatgaggaagttctacccagtcatcatatgggacgcgatgactcccacgatgtccgtctaaggtggagtggtggagaaaactctaagaacaacaatggtgactgtggcagaaacggtggaaggatgccccaacgtagggagtggcaaccccgcgaccaacacggccaaccacgagatggcgatgatcgcccaagaaatagtaggcccagggggagaagagaagaccccgaggtcaacagtgactaccgtccaaattaccctgacggtcatggtgatgatgaagctgaaagtcaggctaacaaccaaccaattcctgagctggggggttatcaagccggagggccgtatgcccctaataggcaacatcaagctgagaatctaccccaaagggataggaatgaccaagtaccacccccggttgatggaagggctgatagtcagaatgtaggaggaaggccaaaccgggtaagttttgaacaagtaggccctcgaagtggtagagacctgcaggactctctgaacaaaaatagggacaatcatggttccaacatagcaaatccacctgagtcggttcaaagagaccaagcgaatactgacgttaatattactcaacctcaaacagttgcacatccggtgatccaggcttggttggacgagttaacccgattagtcaaggaccttactgcaccaaaacccactaacttggatctggaaaggaggagagggtctgccttctcccaaatgatcaatgacctccctattccaacgaacttcaagatgcccacttgcaagtacccgggtagtgaagacccactaactcatgtggagaacttcaaaatccaaatgga

SEQ ID NO: 213638 - DNA, 767 bp, Cannabis indica
gtaagtgttgatgcccaattaatatttatattaaaatggaattgttattatgttgtttattcgttgctattaagttattttggtatagtattttttaggtttttgtcttataaatttatttttgtttgcataatatgatgaactttaatttatttatatgttatagtttagttgttttttagttatttttgtgttgtcatttagtcgttttgcattgagaaaacaagttgtgcacgttaaaatctactttgtctgaattcaccatgtggcaactactgatatgctctgacactacagtttgtaagtggcgccgttgccggggagtgatagttaatattattaaaaattaaattttgttctaatttggttttcctttctaatttgagtactaactctgttgtctcaagatcttattctgctttccggttcaatagtttatgagaattcaaggtccaattgccagattacctgttgaccttgagatagaaaagacttgtagaagaaacagaaggaggaggaaattggaaagagtggcactagagattgaacaagaaggagtcatggctgacaacgccaataatggcaacaatggacacaacggaggaggtgtagaagaccaggctaatggacacaacaacaatgaccgtagcctgagggactacttacttcctaacttgacaggggcccgatcctgcataaggccacctgctgttgacgccaacccttttgaaatcaagccagccgtactgcagatggtccaatcttca

SEQ ID NO: 213639 - DNA, 557 bp, Cannabis indica
gaaagggtaaacaaagttagatgatgattttgttgaccatactaaaacagataaaggcttctgctaagaagaaatttgaaattgttaaaggagagaaaatcgagagcagtcctatagatgttggttaaaaggggaagaatcatgctcctaatttgattgagatttctattgcgtttttttttttttaattttgacatattttagggtttattgcttttacgtatggttctaggttttgaaaaatattatttcttaggttattttaggtttattatgttgcttagttcatttgagttttatttctatttcgtattagttgggtttaggtttcatttctgcttctccacttcgaaccatgtttctctttctaatagtttatggtacttgccgattttgatttttgtagttttaaatttatgtaggttaaatgcttattgtagtgtgtattttttttttcttttattaatttttttaaggttttcgtttgttgatttcatttattgttttggtttgattattcgtgatgatatttatagactgttccaatgtactatgta

SEQ ID NO: 213640 - DNA, 676 bp, Cannabis indica
gcaaaaggaaaatcaaattcattaaagacaacatctcttgacatgtaaattataccagaagaagcaaggaatttgtaacccttatatttcaaactgtagcctaggaaagagcactttttagatctaaactcaaatttatgcttgttatagggtctgatgttaggaaaacagacacatccaaagacttttaaagtagcatagtgaggatatttgagaaaaaaattgtgtaagggagtgtcattttgaataactggtgtaaggagtctattttttttacatagcaggatgttctaacagcctcatccaagtaagataagggcatggaagcctgagcaagaaaggtaagagcagtttcaatgaaatgtctgtattttttttcagcaacaccgttttgctggtgagtggtgggacaagacaacttatgcttaatactatgcttcatcaaataaggttctaagacttcctactctccccccaatcagattgcacagaaataatgggggattgagctttttttttcaacttgggttctgaaattaatgaatgtttgtaaggcatcatatttagtttttaaaagaaaaatctaagtgtacctagaatatgcatctataaaattaatataatattagtagcctgggatgaaatcatgacaaagggaccctaaatgttagtatgg

SEQ ID NO: 213641 - DNA, 850 bp, Cannabis indica
aaaaatagatacgctttgaattatctattgtttcattctaaataattaaaatcctctacaaatgattacatcgagtagggataaattttttattctatcattcaatgtattttatccttaaattacttagctacttgtaaatgatatttcagtaaactaatataattacttaaatgagtgctgatcatttattgcgttaagtaaagctcgaagaaaattattgtttcacttctaatatttatagaagttatagattctatatcaatgattagcgatctcactcaattatactactatattccaaagatataagtattgagaagatccacttggtcaactttaacgaacaaataatacatataagccagaacctgaccatctcaggattaagatctattgacctaaaatcaactaagtgatattgacatagaaagatataacagtaagtttatgatatcttttttattatcaatatcggtccagtccgatataaactccatacatccgattctaacataatatcacgtcagtgtaaatccattgcattgataaatcatgagactcagaactttgaaacatataattatgattattttttactgtgtagacaacactataatcatgaataactatatgttctggatttgatagaatttatacattaaacatataatcatgaaagtattcatgtgaactgtacaacataaaatgatttctgatattttattagttagtaaatttgattatattgaaatgaattttatttagggataaaatcccaacatgctgcccatgtggtgtcggcatcatctcagatgtatgctgcccatgttgttggaattattttacc

SEQ ID NO: 213642 - DNA, 718 bp, Cannabis indica
cacgtatatattatttttgaatatcttgacgccattgcccgtgtatcagataatgaaataattgaattaattcatcaaatatcaaattataaaatccagccaaatttcaatttaattattatatagtttagttgtcccattatatttcttgccgattctcttaggattattgtttctactttaatatattttaggcaggtaattggaagaaaatacttgagccatatactaacgtgcgagagagaaagtaatgataatcttaaattgaggaagtgtacgtgtaagcattaatatatgtataaatgtagattctatataggcaagttgtgggtatgtggattctatatacatataggaggggacatgacattttatacataatactctttgttaaatgtttatattattatatgtacagttacgtatgtgtatttgcctatacgtatataatatatataatatacacatgaatcttcgcgttgatgtgtgcacgtgtgggtgtgtacatatgtgttggcttctttattaattaatgataatcattaattttaggttttttttgttgggttgtaataaatttatcacacaatataatatacattttattatttttttttatgtataatgttgtcaataatatttaattaattataaacaatattagtatatttgcaattacaatattaattattaattatttttaaataataataattta

SEQ ID NO: 213643 - DNA, 2000 bp, Cannabis indica
caacgaagaagaacatcagtgcaccttcgggagaagggtatttacaagctttcgggagattgcttttgaagtcttgcatcgggatgatacaagcacacaaccttcgggagatggttgtataggctttcgggagatagcctttaagccttgaatcgggaggattcaagcactcttcaaggtgatcgaagggagttcgagctcttggagttttatcaagattcggttagtaggtggaatacatcaagcttgcggcatacaataagagggagtctatttatgcataagtcaattactttgtatttttgataccgatctaatgaatcttatctctgggcgtggccccgtggactagtaacaatctgaaaggattgttgaaaccacgtacaaaaatcttgtgtgtttttacttttatgcactgtttgtttttctgggtttctctggagttacagagttgtattctgtaactacagaaaactgttttcagtaccagttttatattccgcatttaattaatcatttaattaaataatcaaactgggaatattaaaatacggaatttcaaattctaatgtaaaatcccctagaatggaagtttctatccctatatatttttgtatctaaaagaattttttagtctattttttttttttttataattgtccacgttataattatttagaatcacatttaaatttttagaaaattctaaatagtttacagtgctcaaaataagattcaaatgttttattgatgcgtgtctgttatttcttatacatatagtaagcaatagttaaaactttattttcggcattgtaaaatatttagattttttttaaaaaacgtacgcgcttataaaaaaaataaactaaaaacttttttttaagtgaaacaaataagatgtgtaccaaaagaatcttttaagggggtgcaatataatttttgtagaaacttttatgattggccaccctagtatttaagtcctcgctctgccctgattgatactatatttcttttcacaataaaaaattaaaggttcaatatatatataatagtttaataaaaaaaaagatttatatataataatgtgtgatatcataattatagcattcttaaaagatgttatattattagagtgtttttaaaagtagagatgtcaaaaataatgtggaagaaagatcagataaaatattatatttttgaatgatgtgaagatctataacacctttaaagaatgctaccattagagttgctcttagtaattatattagaaaatggaaaacttacaaaatactgaaattttggttaacttttacaaaaatattgttacatggaattttttttcaaaaatactgtgctttataaaacaacagtggaacactaaacaaaataaaaaacaataatggaacaacaaaaaaataatagtgggtcgggttgagcaggtctgggtgggttggtcgagtctgggtcaaatccggtcaaaatgttcagtcctactaaaaataacagtggaacaataaaaaaacaatcgtaaaataacagtaaaaacttaacttaacacagtatacaatataaaaattatacagtatttttaaaaaaattttacaccacaataaaaaaattaaaaataatcctaaaatattggtggtgccacatccattttatatttatttatttatagcaaatttgaatgaggcgcaccgacctgcaaactatataatatgcgcgtacgtggcagttgaattaaattagtccatttagaaatttaattccaattcaatccaaatatgaaacctcattgtcattacattttcactctcattttcatctcatttacaaaacaaacgtctaaacttttatattcaacttttcataccaaaacaagtaattgcattgtaacccttaattagaagtactctcccttttgcttaccttttataaattctatttgaacttttacaattaaaaacgttcttctaagtgtttgaataaaaaataaaaag

SEQ ID NO: 213644 - DNA, 552 bp, Cannabis indica
tcagctgagacatcaaccggagccgccagctcaaataaggccgccagagccagaaaatagagacccaccagctgcggtggtatatcctgctgcagaggctagacatgagatgttagcagagaggtttcgaaaacaacacccacccgagtttgagggaggcatagacccagtggtggctgaagagtggatgagtcgcatagaaaatattttgcagatgctaagggtcgatgggaatgaccgagtgaagtgtgcatcatacatgttgaggaaagatgctcgtatctggtgggaggtggtggaacaaacaaaggatgtaaataccatgaactgggatgatttcaaaagggtctttaatgagaaatattataactcagcagtgttagcagcaaaggttgatgaatttactggattagcccaagggagccttactgttacagagtatgcacaaaaatttgatagactggcaaaatttgctccagatttggtacctactgatagagtgcgagcacatcgatttgtggaaggcctgaaaccaatgattgctcgggatgt

SEQ ID NO: 213645 - DNA, 676 bp, Cannabis indica
tgaaaccggttttgttcttagcttcgggagataaatgaaaatcccaacatcattgctgaaaattatggttggacagtggtggtgtcacaagaatcaacccgggatggtcactagagccaacgaagtatgggttgtcttcattggctggatggtcatgagaaggaggctgcaaagaaatgggatcgtgagcactgtgtgaaccaaggtgagagagagaaatgttaccaacaatcacgacatgagtggatcttgaaggtatggccggagcatccatggaagcgactccgaccagaagaggaacggttgaggaaggacgagcattttgaggaggagacgggatgacgtgttgaagattgggagccacagcaggcggctcaatcggagcttcggctgacggaggaatcgtttcttgaacgatcagagcttcaacggaggacaccacgggagtagtggtggaaccggcgagaacgttgccggcaatggaagcagcagcagacggaagatcgcaatgaggagcagagaaccggcgagttcgtgccatggaagaaggtgagctgttaaagttccactaagccgtttgaagaacctgccagatccataaaaagaggtacatgcccgaaaaaaggggatctggtctcctaaagggaaatatttgataccatataagtaaaatgtg

SEQ ID NO: 213646 - DNA, 674 bp, Cannabis indica
atatatatttattaataaaactacatttttcggtagatgcatgaacttttatgaaccccacgtagtatttggaagggaaggatatgttgagcgcaatgcagacagggccatatggctaatgtaggtagttgttgtttgaatagggctaaagggtactgaggcatatattatgtgaagggtttgacataaatgacacttttggctccgaaattcatatcatgtttttcctctctcaacacattttgtcagctcacccagttaattaattgcttggtctatttttttgttttctttctttctcatcatctgtccaaaacttctagctaataatatgtatacatatacattaattaacgcgtttttaaataaacaattattaatattaattgatgcatcaagcatgtgacacgcacaatactttgtatatataatatatgagaaatgttaaaaagggtactaatggattgtctaacatctttattatacatgtgaatattggtattggttcaattaattattaagtctcatatagtttaaaacaataatttttagagaatatcgttaataaattacaaaataacaaatctagagaaggaaaccactggtgaccaataacaatactaataatatatataacgacaatccttattacgggaaactttccttctctattg

SEQ ID NO: 213647 - DNA, 1048 bp, Cannabis indica
atcatttttacatcgtatgggcttatattgttctatcagttgaaaaaataatataaaaaaaaaatttttagcaaaaaaaaaaaaagataagtaaaagttgagtttaacttaaatattttaacattaacatatttttgatgtagtgtaaaagcgatatttttgatatttttttaattaagtagttaaactaagcataaaaatttaaatttctcttttattattggttatttgatcaaaatttgattgtttattatttttaaaattaatatttataattaaatttatttagtaatcatttatgggtaatacccattaaaaggtgttctatatatatatatatatatatttatagaagataggctaaggcaaggttttgcttaggaacccaacttagaggtgcaaaagaaatgctaaaaagtaccattggtgtctagcaccctcctatgtgtcaatattgttattggttcaattaagtattcagtgccatataatttaatataataatttttagagaatatcgctaatcaatcacaagagaacatgtccaaagaagtgctaggcaccattatgtccaatgacaatatgtaactcacattaatgggattgaccttgcgattgggcctttcctttttccctccttgttttcgaaattcataaatgcctaataatgaaatgattaagtaaagttgaagatatctcttggatcacaaacttcttgaatccgatgccctaattgatgcacttacaagcaatcagtcttgaattccgagaagtaatgaaggaaccacatgatcccaaataaaaaaaaataaaataaaataaaataaaaaaataactaaaaaaaagttttacttcccttaagaacagaaattttcattttcttttgttatgacatatagatgttagattgtagatgtaaaggtttttttttaataaaaaatattcattttttctcttgcttgtattaattaaataaaatataatatatataatattctttcactacataaaataaattttatttagaagaataatttaagaattattt

SEQ ID NO: 213648 - DNA, 602 bp, Cannabis indica
aaaaaaatggggtatgaattttttgtggtgttctatgatttgaaattttaaattttgatattgtagttcaaaccacatgttaaaaaaatttaaattattaaatagtcttaaaatttttggacttaaatatttcaccgctattaaaattaagattaattaagatttttgccgcctaaattttgacatgtaccaaattatgcttctgaactttttgccattaaaattttttcttaaattattaaaattgttgggtttaataacttttgtctaattttattggattttgctaatatgatgaatgtccatatactaaattgcctccaaaattcgatatttacaaaatcatatcccctaaactttaacatgtaataaattttcattcatgctagacttttgttaataaaattggacaaaaatttttaaatccaacaatattaaatcaatagtttgagaataatatttaacgacttaaaaaattcaaaaatataatttggtacatgtcaaagtttaagggacataaacctaaattaacctaaaattaattatgctatactgttgaaaaatgagaattttagtaacttaaatttaaagaagagttgtgt

SEQ ID NO: 213649 - DNA, 1127 bp, Cannabis indica
aatccaagtcgtcgtcctaaggttctccttttcccttcaacccagggccgccatcattaccacccttcgagctccacttctctcaaattcgttcaagctagactaccccaagatcacactgtcgtccacatgcctccctttcacatgctgcccttctcgctacacaaatctgaaacattttgaacaaaataggtctttagagagaggtttaaaaatgctctattgtcaaagcctcacccctattttattcactctcttattctcttacaatttccccacaacaagaacaaaaaaaaattctcacccacaccatgctcagatttgagatcaaaaccatattgatgtcgttccagagcctgttctgggttggtttttgtcatcgatgaccagagccatggtttttgatgcgatcatcatctataaccttctacgaatcacaaaaagcttgtgtagacaaaacccatccataagttaagtagttttaagatatagttgtatgttaaggaatttgattttaagttttgggaatttgaaggagttgatgatggttctgacttttgtgaaggaatatgaaaaaggaaaaaattcataaatttctatttataagatgatgatggtgagtttgtgagagataatagaatcgttaagtgatgagttagatattgaatcttagtttttttttttttctttaatttattatatttttttgcctgaaaaaattattagattctttgaagaagtagaagaagaagatcaagatggggcttggggatggtgagaatcatggggtccatctcaaaactaattggcgatgagtggagtaacacatgttgttcaatacgtttacatttaatccatgtgggacaatattgtccaatagggattaataaaatgatttagttttaatttttttagatgattttttttaattttaataacagagaaaataaaataaacaacattaaagttttaatttttttatataatttctaattatttgtttttttaatatatttattaagtgtactaatattgctttgacactagataattttaataacaattaacagaccatttaacttgggaaaataatattttatgctcattttttattttaattttaattt

SEQ ID NO: 213650 - DNA, 1081 bp, Cannabis indica
gaccttctacatctgcactttaacttaaaaaacacaaaataatattacacatataccaacttttttttaaaataataatattttactattacaaatttattaataatattaatatattatttgtaagattattaaccaactacactagatatttttgaaattttgtaacttgtttgattctacaacactcctccttcattcatccatttttctttttttttttctaaattacatggattacaaaattgctaggcgtaccttataatcaaaatctatttttgctggcttaattatataattaacttaaaatttatgatttaatctttggtatgagttcgatttcatataaggaaatgcaaaaaaaatagttggaaagcatattatattagcatatgcttgtcatatataaatttaatatatattaatggcatctaattaatttttattttataattaaataattctaaaaaaaaacttaaaatgaacataaaaaccccaaaacttgtaaagtattcttgaatgcttctttagagcaagaaatattctgtttttttttttttgtaaggagcaagaaatattcttgaatgttgattagtcaactgattttttttttccttaaacagcctcaaaataccataaatattttctacaataaaaaacaataataaaataaatttatgtattctatgcatgatttatataaggagaaaagtaaaactctttgtaattttattaataataaggttatgttacgtgaacacgtattttcgttaacaacttattaatcaaatattttattacaaatatatatatatgtatgtatatttatgtacaccacgatttaccactaattaaactcattattgtataacctcttgccaatgacatatcaaataattagtatatatcattaaaaaaagaactaaatttaaaactttaaaataaaaaaaaaaactaacaattttacaaccatctaaaacaaaacttgcactcataggtagtttaatttatttttccttaaagatcgattacaatactccatggccataaccatgcatgttctaatcttatcttaattaaa

SEQ ID NO: 213651 - DNA, 604 bp, Cannabis indica
gaggtgttcataaaatggaaagcattggttgaaaagcaatttaatctacccattaagtctgtacaagctgattggggaggtgaatatcgaccttttaaacgatttcttgaagatcaagggatccattttcaacatccatgtccccacactcatgaacaaaatgggagggctgagaggaaacatagacacattaatgaaatcggtcttactttattggcacaagctggtttgggaatgaactattggtggcatgcttttagttgtgctgttttcaccatcaaccgattaccaacaagaattctcaattggtcctctcctcttgaaacactctttcacaataagcccgattactctatcctcgagacatttggttgtgcatgctttccacatttgaggccatacaacaaacataagttggattttagaacacaacaatgtctctttttgggctattcgtctcatcacaaaggatacatatgccaagcaccagagggaagaatttatatagctcggaatgtaattttttaatgaagcacactttcccgggtacacaacctgcatcagtaccatcacctgctgaacaaatcaggtacattctccccat

SEQ ID NO: 213652 - DNA, 848 bp, Cannabis indica
atttattaataaaaattaataaacttttgatatatttttaacacaataaatttttgatatttaattatattaatatttacattaaaaattaaaatatatatatgcactatcatattattagtatgggtaaatattattttcaaccctgcgttttgcaaaattattaattggaccttctgtcttgttaaatgataaaatagacctagtattttctaaaatgataaaaataggacactgagctcaattttcaacaattttattttttaataaaactaactttaagacaatttctaacacgaacaaatacagaaaatagaactaattttgtcatagcatctctagatcatattattattaagttttattttgacacaaaatcagttcagggttctatttgtacaattttagaaaatataaggttcatattgtcatttaacaaaacagagggtccaattgataacttttacaaaacacaaagtccaaaatagtatttaccatattagtattaaagactagtatattgttattagataccattttattattatattaaataatgttggatctaatacagtacaatatctctatatgaatattttagttaaaactaacttttttaatatgttataattttttcaagctgcgtattaaattgaaagtatacatttatataagaataattatattttaataagtacatatacatataatttataaatttatttatataaaatgaataattttatgttctaaataaaatgtataaatattatatttactctattatgttataacatgccttaaaaattattttattgttattatattagtattttgactttttttaa

SEQ ID NO: 213653 - DNA, 739 bp, Cannabis indica
tatcacttgatgctcgtttgagtaccggggtctctgtttgttcaggtactgacttggccttcttattagtgagttgtactaccatgtggcactaattttttccatgtaagcatgccacgtcacgaggataaaaattaggatagcagatggatctaaattttattcattcaatagagcacttaagttgctaaaatttctataaaagcttttgaggaagattaagaacttcttgcttcttctctcacatgttaatacaagtaaaagaggagtaagcccactatcatgggactaaacttctataacaatctctgtgttctttttacttaatcattatgattaattgtttctaatcgttttaattgactcattgtcgatggctaaaaacgaggtgaacaagctcaatacatgtgtttttgtatactttatattatttatcgtaaacatgtatgcagtgattttagatactcaaattagtaatatggtgatggattctatttggttatcaaattatcgtcacaccactgattagattgactgaagaaaatgaagcaaaatctagaacctttgcacggaaatttaatttttagtttgccaactaatttattaagatccatcacaaatcttagtcttaagaaattttttatatgaggttttaaatgcccaaatcaaaaggtgttgttgcatgcctgcgacataatgtagagaaatattaaaaggaaccttaaggtaccaagcatca

SEQ ID NO: 213654 - DNA, 734 bp, Cannabis indica
gtaaagttaatttagtaaaaagtttttttttaaaaaaaaatctaaaaagtgtaattttttaaaaatgatatttatataatggccaatatattatttgtaaattaagtgaagagttctgataagccattgttagtttgtaaattaacctagaactagaagaaggaggagatattttttcaatgaaaagtaaattaagtcaaattattttgtaaattttagtattttatattgttagtttgataagtttttctaaattttatagagtgtaaataagattttttaaaatataataactttttttttgatgtaaaatataatataatagcattttaatattatggtattatggcttgttctaggttgaaggtaggtagaaatttaattaggttgatgcttgaatattttgaattgaatatacaggtgaccacgtgctttgaaatcgtattaaattgaatttaattatacaataaattgttgggattctttcatgaaatttcatgtgaccacatgctgtgaccatttcttatgtaacatagaaaatttaaaaattaattgaagaaattgattaatgttttctcctttcaaacctctttctttgtcaacctattttcttaagctttgaattgaaatctctgcatgcattagtagtaatggattttgcatcattttttatttttatttttaatctctggtggaatgaaatttgaggacgcgtttaaatttggtttgtgaaa

SEQ ID NO: 213655 - DNA, 824 bp, Cannabis indica
acttttaaagcgtcacatgtaaaattcaatacatgaacgtaattatgtaaccttcaaagaagaagcaattatcgatcaagtaaatttacatttgattgtaaattttacttttaatgatgaggcaaccgtctatcaagtacattttttagacaacaaaagccaattaatatttaaaaaggcaaccaacagttaattccataatcgcaattatgtaacctttaaagaagaggcaaccgtcaatcaagtaaacttttaaggcgtcacatgtaaatttcaatacatgattgtaattacgtaacccttagagaagaggcaattgtcgattaagtaaatttttaaggcaacaataactaacttaattgtttcaaatgggaaccaatggcaaattccaaaagagtaagtacgttttctttaaagaggatgcaaaggtattaaaaaccaacttaattgtttaaaatagaaaccagcaacaaattctgaaagagtaattaaggtttctttaaagaggaggcaattatctatcaagtaaatttcaaagtcatgaaaagttaatttcaatacttcaaaaccgtcggttgatccaaaaccgtttgaacaatacaaattctcacacagtggcaaaaggcaacattcaaatatctttgaatttttgaaacatctaaggaaacattatctatcaagtaaagttctgagataacaaaagttaattttaacttttgaaaaaacaaccagcattaaatttccaaacaacaattattctttatcgttcgaaactgtttaaaaatgaacaatacaaatcttattaacagtggcgaaagataaca

SEQ ID NO: 213656 - DNA, 797 bp, Cannabis indica
actgacagagataagggaagagaaaaaaaaaaaaacgtctagtcccatcaaagcttgtcttatcaatcttcaaacaaactatcatttctttcttttcatctacacaggctgcttgtaagcttcaaaacataacaacatgctcgtatacaagctaccaacctcatctgactccattgaatcctccacctcaaatccttcagaaagataaacttcaaaccaatgtgtttatatgcacactctttgtttattttatcttttcctttcttcttcatcttgttttctctacacaagcaaagtttacgttaatatcgcttctattcactaaaatacccatttacatacaattgagaccattgttaagaataaacttcttaaaatttgtagtctccattttattaataaaatctaatcatagcttaaatgctaccatagatatagacaaatgatattctgtcgaactacttaaattcgtgtgttacacattctctatatatatttatacttatatgtgtatctaataatatatatacatatattttttgattataatccatatatattatattataattacgtttattcatataatttatattacgctcataattatttactacgtgttatattataagctcttatttattttaattatatatataattaaatgcttagttagaacccctaaatattttggcaattctgccggggaagcgtttcctttaaaaagttcatatatacttatatatatatcaataaatatacttaaatatataataaggaaaacactcaatttgttc

SEQ ID NO: 213657 - DNA, 508 bp, Cannabis indica
aattagaaaatataattaagaccttaattacttctttgtttttagctcattctctataagtataatagagtattctttacgatttcaattcatttattagcttatgattattataattatattgttgtcgagtaagtttaccatatgtgcgagtgtctttgtgtgtaatttatgtctataatatatcattacaggacaaaacaacgcaatataaagttacctatttcaaacattttttaggaaaaccatacccaattgttttttttttttttttggaacaaatattcattaccttttttcaaaatcctttgccagaatacttaattctataaaattaatattatttccaaaaaaaaaaaattaataacttgtgtttaaattttagtcaattataaaggatcatgatgacataatcacgtgtaacttgtgaacagtttatagatattatatttttattttaatttattttttcatttcttatagtagtactaatacataatttttctat

SEQ ID NO: 213658 - DNA, 1047 bp, Cannabis indica
atcgatcagaaataatcatatggaagaaaaaaaattaggattataatccattattatacaaaaaacacaaaaatagtttattttgaagcctatatatgacatcctaagttatttaaaattttacaaaaacttgtaagagtttctatataactatactgcacacctaaaaagacaatctacccttgagaaaatgcatgcaaccacgaaacaaaaattgaataaaaaaatcctagatatataagttataacttataacatacaatattttttgttttatttacagagaaatacaaggaaactactactatagtatattaataattataattacctgctgaaaaacctgaagtccaactccaacggccaaagctcgcctaactcctggttccataagatcactccaactcaccggtttagcaacatcattctgtactggttgatccatattgataaccggttctatcccaccgtcttcttgagtacacattttgattggtccctcgggaccaaaagccgaatgactaaccaaagcagctacaggaaccattagcactgcttcactactctcttctgcaattgctgcagcagctggaactgagattatggatccggttcgggacggcgcagttatagcctcctgatgaataaagattctttgaagctctccttccttgttcccatcttcgcctactcgctcaatccacttccatgctatttgccaccctcctcctatattcgcaccctggctcactacttcacttggactattcccttctatacaaagactactgctccgtctcactgcttcacctgctcgtggggttgatctacttagatcatgggacagcaatgggcttctcaaattcatcaaatgctcttcctctattccttctgtgtctacttcatagtcatcactatcatctctgcacaaccaacaaattgaacaaaacaaaacagtgcatgtgtgtgaagtttatactatcttaattaattaaaggagagtttatacatatatagtgagtagtatatagggtcataaacataaga

SEQ ID NO: 213659 - DNA, 874 bp, Cannabis indica
aagtgttggccagcctttgtacacttttttcttgcaaaggttaggtttccttggttgaacgggccctatcttagtctgataatcaccttttggtcggccagccataccagctcctccctggccagcctatgtactccctttggccggcatgacatggttgtgcagcttttaaacggcttgcttagctcctctcgcttgttgctttggtggttttgccatggcttgtaaagagactttgtcttgctgttgacaatgttatatttcacgtgtcttcaatataggcttatgtggacatgtcacgttaggtggacaaaatttgagataataataattaatattatttaatcatttagttttattaaatgaaactatataactagttaaatataatattattattaaataatattaaagagagaaatattattttaaagaaaataatatttattataatccttgtgaaataagaaatgaatgagaattaatcaattattatttattagtagaataaataataaattttatttgtggaaaaattgagaaatcaatttggacgttaaaatatgacacacacgtgtagggtgacatataaagacccatgattaatttaatttaattattttattagttaaaataatttaaattaaattaagttaattatcttttaattattgattaaatgaattaaaaaataataataattaaaataaaaaagataaattgtttaaattattggatatttttattttaaataaaggatttaaaatggtttatttataacactttatataggatatatagtatcatgaataaaataagcaattaacctgaaacagacagaaaagagtttaacaaagttagagaaaaatagaaa

SEQ ID NO: 213660 - DNA, 811 bp, Cannabis indica
tggctaccaaggcctaatggcacaattgtaaaccggcccatagaagcgaatcctaatacaacagtgagtagcctattgaataacaaggatgaatggaatatagatactctcaacaattactttcataaggaggatgttccttggatactaggaatccctatagacactcactctgaggacatgcttatttggcctttcacgaaggatgggaactacattgtaaaaagcgggtatcgagtggctagggagataaaccttactcctacccgaagctctaatatggatcaaactcatgcttggtggaagatgtggtggagtctgaatttgcctccccgaatgaagctcttcggttggaaaatgtgtcgaaattggctcccggcaaaaactaatcttgttcatagaggtatgaaaattaatccaatttgtactaactgtggcagatttgaagaaactctctcccatgctctatggaattgtgaaaaggtgaaaaaagtttggaaacttatgccttcttacaaaatcattaaagatagtagagggaattcaatgatggacttgctggtagaattcagacataagcttgctaaggaagagtttgaagatgttgtcaaggttctttgggctatttgggagaatcgaaatagacaatggaccaatcaacattctatgcatggtgctcgtttgctggaatgggtgtttaatagctacccgagagagattcatggacaagaaagtctagcaaagatgcaccctgctgccgagaataatcagtggcaaactcccccggttggcacatattgtgtgcattgtg

SEQ ID NO: 213661 - DNA, 505 bp, Cannabis indica
aaaaaaatgaagtgagaagtccttatttcgggaatagaataggaacccctcttattttgtcacatatagatagaagaagatgatgaaaagaaacattcttaccatttcaaagcttgtcattgtgacgagttcctgaatctattatctttttccttgaaattagaataaaaaaaaataaagaagttgacgaagatatgagtttttgtcatacatagaaagagaagaagatgaagatggactcccctactatttcgaagtccttcactacactacgcctcaactctattatcttcttccttgaaatttgttttacaaaacacccacttcaaaatatattttaccaaaaactcacttcaaactatatttcacttgaagcccacttcttattggagacacatggagagtgggggaagaaggaaaggagtagaaagaagttgaaaaaataaatagtaataattgtaccaaaaagaaaagtaaatacaaaaaatacggttatgggctgtta

SEQ ID NO: 213662 - DNA, 630 bp, Cannabis indica
aattacataatattttagttacttaattttattttctcattatttttcgtaaattctgacaattaattgtaacggagattttaatagaagctctcacctatataaatatagggtattggtgatcatcaagattatgactcatatccattctttaataaacatcatccaagagggttagtgagagcttggatgatctagaccccactaatttctttttctcgtagtttttaaaatctaaatatctacattttgtgggggcttatattcattaatggctagagatacataatatcgatcatcttttcgtatatgttcaattcctaaatttattctacatgcatacatgactatttatatgcctatagttattctaatattttttattgttatataaatacccttataaactcatgaatacaaaaaccaacaattgaaaaaactacaacggatcaagcacaagttgctttcacatccttttacccttaataaaatttagaaaggaaaaaattacagttacaaaagaatccacaaactcagaacgtaccctacgtgctataaaaacgagaagagaagactaggagtactacctgctgcattatatccatctctgtgagtgaagagttgaagaga

SEQ ID NO: 213663 - DNA, 610 bp, Cannabis indica
tttaagttgcctttagtaagcatttataagtacgagatttttccaaaattgaggattgttatcattacgggatagaatatctagaatatgatcattcataccacttatttttatagaataaaattgagtgacatcataagcagatattttataaatcttattgtccaatgatatactatcttaagtaatttcttaatgaaaaagctatagaagaaaactaaagaacaatttcgattaaagtaaaatccaatgatgtcccgcttaggcgagagttaaagttattcttattttacgagttatccattatttcgacattgtaaaaactagcctaagttatcatctattagggatgagtcaactagattttttacttacaaatacttatctgtcgagatctaatactattagattgtctaatggatgaccttcctttaggggaaggtgaagcgccacgaggtcccactaaaaacaatcaaccaagttatatcaccaatgaagttcgaaattgatactacatgattaataacagaaactaatgttggttcaatataaatttatacacaatttttaaaaatttgtaaacattcaacaagtaatgaagatatgaaaa

SEQ ID NO: 213664 - DNA, 732 bp, Cannabis indica
atatggaactcgatgaagtatcattgtcctcatcgttgtcatcttcatctcgttctagcagatgaagagttgttcggtaactatccatcacttccaccagctctagaattagtgagttctccatctccgttaccgatccttgctccgattctaggacaaggggcaagattccgactgccttgacccttatttcaccgttggtagccaaggttttaattgggctgctcagtccaagcgactatggagttgatggcttggggaagaagaagaatggggagagagaaaagagattggcaaatttctggtgtgatgatttttttttaaaatgttaataatatgaaaaaagttaaaatatactatttgaatttttcttacaaaaatatgatataggaaaacatgtaaaaatataaacaaacaaaaaacctatagttcaatgcaggtcgtgctacgttgatcaaatcaggtcgtgctacgttgatcaaatctgtaggccttgctttgcctgctatacgatgcaaacgcgaagctatcaaaaagcttgcctcaaggattgacggaatggttagagatttttggtggggttgtgaacaggtaacagagggatctgtcttagggcctgggaccacctgtgccttcccaagtctcatggtggacttggtttccgaaaatctttgaaatgaatcaagccctgttagccaagtggggctgggagcttctcaatgagaaccagtc

SEQ ID NO: 213665 - DNA, 710 bp, Cannabis indica
ttacaaaaagtccaggttcaacctcaatcttcaacccggatcctgagacttggacccaagctggaaccctgacccgaacgtggatctagaacccgacccgaacctagatctgggactcaacccaaacacagacctggacccagattcaaacccgaacccagacccgagatatatccagatccaaacctgaacccgactcggattcgagacccgacttgagacccaaactcgatccgaacccaaatctgggactcgacccaaactcgaacccaaacccaaacccaaacccaagactcagactggactcgagacccggatccacacttgaacccaacccggactccagccccaactcgcgaccaagacccaacttgagactcgaacccagtctcaagacccggacttggacctgggatctaggaccccacccgagacttggacctagacctcaaactcggacccgggacctagaccgaacacggacccggacccacctgacccaggacttggaccccacactcacacccgaaccaagaccaaactcagactcgcacctgcacttggacccagaccccaaacccagatgggacccaagtcttgaacggaacaggacagtactcgggacctagacccagattcgacccaagactagacccaaacccagaccgattcaagatagaacctgaccccaaactcgatcccatacctga

SEQ ID NO: 213666 - DNA, 516 bp, Cannabis indica
taataaatcgagatatacacacagatcaataagaaaatcgttgtcgcactgtttccactttcacataaggaatccatcgatcacgtataacatttatctcgtcatttgtgtacggagtgagaaacctatcttgtaaaacaaatgtatatattaattagtaaagactattatcatatgctatttaataaagaataatatatattataatccttattaatttgttttaccggttgtgtcaacacgtatattggatcttctacggtcatgaaacctttcaatgaatttcatgacgtagtatccacattatttgtcatcaggctgttctggacatatatagagttatccattgggataggtctattaggtacgtcctgtcatttaatttgtatatggtgaacgatctacataaaaaataaagttagcatatataaatttataaatataaaacatgcttacatattgggatgttagtatatagaacttacgtggaaataatgaattttaaatgtatcatct

SEQ ID NO: 213667 - DNA, 653 bp, Cannabis indica
ctatgatagacaatggagctttctcgaatatactattgaagacaacttatgagaaaatgggactccaacttaaagacttgatcccctgcacccaacttgtatatagtttctccggccagagtgttgcatctctgggacaaatccacttacctctcactgttggacaagctccgaggagcataactataatggcacaattcttaataattgatgtcccttcagcttttaatgtcatgctaggccgaccagccctatatgacttaaaatgtgttacatcagttttttatctgtgcgtcaagttctacaaaaaaaaaaagaaaagcggggtggggtgtctcaaagaaaaccaaagaattgcatgggaatgctacaacattgctctaactaaggtcacgaaggaaaaaacctctagccaaagttcaagcaagggaaagagcattgccaataagaaattgccctaggcggggacgaagacatggatccctgacttggggagacaaacacaaatgttgggccaattgaagagctggaacaagtggaaatcgacctaaatatcccagtcaggaaactcaaaattggtatgggtttgttactcgaaataaaattagctttaataaaattgctgagcgtaaacctggacatttttgcctggt

SEQ ID NO: 213668 - DNA, 586 bp, Cannabis indica
actcttagactacacaaaattagttttccaggaatctctaactctaccagtgagactaaatgttaaagtgtccagaaggctactagataattattcagcctatggaaagttctatacagtttttggtgtaattctagtcatggattaactactagtgttcttcttaactaacacaaatatagttttcacattgtaaagaatccagcatcccaagaggagtagaaatatagggaggaatttcacaatataaaggattttgtgactaaaaagatgtaatattggagaaggtttgtattgaatacaacctgtcaatttctattacaaagataacactacgtactacacttgatagggacatcaaggtgttgagattaattgaaatgcacttttagttttatattagtgcaagtaggagtttgttgggattttatgccctaaataaatcttatttccatataatcagataaactaatgaataaaagaacagaaatcattttatgtttcatggtgcacatgattttttcaccattatatgtttaatgtataaattatattaaatctataatatatagttattcatcattat

SEQ ID NO: 213669 - DNA, 646 bp, Cannabis indica
aaaaaaaaaaaaattgagaaaggaaaatgaaactaatactttcttattttatatatttgttgtgataataattgagttatagcatttcaaaataataaaatattggcttatttgtgtagcaagttttcaaattatacttagtttggcaagatgaactcttacttttttttattcttcaaattggtccattttaattaggattttagccctttaaattttaacattttaaatgttttcgagaactatagatattgagattgttggatttaaaaattatcagagagtataatttggtacatgtcaaactttactgaatataatttaatacatagacaatcactatattagtaaaattaaatgaaattagaccaaaatttttaaatttaacaatttcaatactttaaaagaaatttcaacaacctataaaattaaaagggtgtggtttttttttttaagaacgggcttgatttaattcatgttaaaatttagaagggtaaaaaaaacttaaagtcaatcactaatagaagaagactattaattaaaggggcagtttcctaaaaagaaaattgagaattagcttagcttgctattaatttttcttatttatttatgggtaaatagcggcataagtacccaaagtttagag

SEQ ID NO: 213670 - DNA, 691 bp, Cannabis indica
cattaattgtatatactttaatagttataatatacacactcttttgtttggtgggttcggttggactaggtatatgccattaatctcttcaaaaaaaaaaaaaaggtaaatatgccattaattttccatggtaaaattgctggctaaacaaaacatgtagataaatagatactaatatattattgaaattataaaaattaattaaggtgatgatgagtagatcatagaggaggatgaaagaaaattaagaaaagttgttgaaagctttctctgcatattcacacaagtgggttagtggagggaccgctgtcctaaaaattattgtatatatatttgcaagtgagattttgttaaatgatctctctctttaacaatattacatcacatgaaattgcttgaaagttatgtgcgcacacacatgcatgatcaaaactagtggcgcctatgagttcatggaaattattatttgcttggataactataataatattatatttacataatcaatgacaccccattgaattttaatatatatactaagaaatcctaggtttgacttaatttttgaatttttttttagggtaaattaatattttgtagttttataaattttatggatgggatcctatgtttttgttaaatgataaattaatggacctttgatttttttaaaatggtatataaataagcc

SEQ ID NO: 213671 - DNA, 1342 bp, Cannabis indica
tgtgcaaagcatgactcatacaacacacgacaatggtgaccatttactaccattatgagcctataaataccccaatgatgtatagaagaggaaacttttgagaatactctgtaagaaaatactcattaataacagtgactcgtggactaaggctcattaatgccccaaccacgttaaaagttctcttttttaactcccattaattactacaaatagctctaattaatagttgctgaaaatctcgatcaataggtacttttcgggataacaattatatataaatataaaataataattaaaaaataaagaaaattatcctatatactattttttaactttttattttcaaatttacgacttgggttgttctggtggtttctatgtgggttgctaggtaaattttagttgcgatttaggttgctccgttggttgctataagaatttttatgtggatttctttaagggctcgtttggtacgccgtataagagtcgtattatattaaataataaataacactttgtttggataaaataatgtattgtattaattattaccaccaaaatttttaatttaatgtatgttgtattatttaatacataacaaatggttcgtattagcttgtattataatatttataaatgattcgggatcaacaccaatctcccacctgaacctgaccctgaactcgagacccggacccagacccgagactcgaactcgaacccgaaccccggacctggaccccagacctgaacccgaacccgaacccgagacctggacctagacccgaacccgagacctagacctagacccagacctggaccctagacccgtgacctgtactcggacttgggacccagactcggactcgggacctaaacccgaacccgaacttgggacccaaacttggacccggacccggacctagactcggacccaaatcgggatccagaatccagacctagacccgggacccaaatcaggacctaaaatatagacctggacctagacccagacttggacccgtacccgtgacccggacttggacccgagactagtgacccgggaccgggatctagacccgaatccggactcggacctggacccggactcgaacctagacccaaacctgcaacctggacctaagactcgagactcgagacctggacccgggacccggacccgacccgtagtttgtgttggggccgagtatattgaaaatatattataactttacacaatctattaatataatactaatgtaatacaatacaatataatacaatataatacaatacaatatagcttaccaaaagagccctaaaaatatataaaaaaaaa

SEQ ID NO: 213672 - DNA, 657 bp, Cannabis indica
caaatctttgtgtttatttctttttcattctatttgtgtaacacgtggcaaacatcagctctatacgacccaactgtcagttgatcattttttaaggtcaacaacatatttttttagtaaaatattatatgataattatcttttatgttaattaaatactaataaaatttaaaattaatctagatattttatagatatcataattgttgacgcaaaaaagttaccaacatcagctcgctgattggaaagatgattaataatttaagtaaataatttagagacacacaaaatatttattgtagctcactccctatatggtgatagtaatgggactatgtctatttcgagtttttatttctaacaagatggtaattacaataatagactaagtattagaatctccaaactctagagagagagaaagtctaaagagagaagctctaaccttctgggtagttttcaaaaaataagctaagggaactgtccttttataggtgaaggagacaaacaaaaaaaggaaaaaaataaagaataagttattttcctactattgacgatgatataatggtgaaattagcttctagttgtgatggcgtaatttttggagcccagtgggtcccgcttcgagtaacgaagagcttattttcgtaactccct

SEQ ID NO: 213673 - DNA, 556 bp, Cannabis indica
acaattaaaatcgaagccctaaccttaatcattgttaaattccttacttgctctttatttttcactatttttttactattttctagtttaatttctgcttagaatttatatagccaaatagaagtaaagatttaattttaaagtacttaacaatccttgtgggatcgacctcactcctggtgagtttattacttgttaacgatatgtacacttgcgtgtgcaaattaccacaacaagtttttggcgtcgttgtcggggattgatagttaatattattaaaaatcaaatattgttctaatttggtttttctttttcaattatagtactaattctgtttgttttagaatctaatcttttttaggtttaattagtttatgagaagtcaaggtgtaactgtcagattacctgttgatcctgaaatagagaaaacttgtaaaaagaacagaagaaggaagaaattggaaaaaactgcaatagagattgaacaaggagtcatggctgacaacgccaataatggcaataatggaagagcagtagaagaccaagctaatggtca

SEQ ID NO: 213674 - DNA, 830 bp, Cannabis indica
ttatgtccaattttcttggagtatccctaatccatgttcgtcggacagtcaatgaggttgcacatggattagctcgttatactcttcgggtggatagagatctagtatggttttttgagattccttattttattggggtttcttaagatttaaagtttgtatgacattataatttcttttttcaatgaagttattcattggtacaaaaaaaaaaaatgattctaccatgcactcccttaaaatagatgtattgatgcactttctccttgttttggcatcctgaaaaaaaaaaaaaaacaagtctaattattttacatattcatgtatgttataattatttaaaatatcttacattattttgggaaattcggaataatttacaatagagataataatgttcaaacggtctattttatacgcgcataaaataaaatactcatgtgtgcaacacattatttgaatgtaattttcggcgtgttaaacttttccgaattttttaaaattttacaggatgtcttaaataattataatttatatgactctgagaaaaaaatttgacttttcgaatactaaaacagataaaaatgttacaggtgcatcatagaattttcctataattaattattaacaaagaaaaacataaattcaattaattattgtaaaaattgtattttggatgcatgttattgtatagttaatttattattattctttttcttattagttgttgaccgaattgggtagtgttaggtcaactaacagatgaggtctaaatattcgactagaaaagcgaatgtatatattacatagattataatttatgtagatag

SEQ ID NO: 213675 - DNA, 625 bp, Cannabis indica
gggactatgagctgtaactttttatttacacttttcacttttctaaaataataaagaaaattattctttctttgtctaagaatgtagaaagtctatatttgttagagagtactcttaaattgttaatatgtaatataatacatatataagatactttcattcatactttctaaacctcatttttaccacactcgaatattctagcagtatttgttatgcccatattttgagccataaatataaacatgacatgtggataattggacataaaaatcatagaaaactcattaataaatgaactgcctcaaggagatagtaaatgaagagccatatctgtctcgcattatacattggcaatgaaacaacgagataaacaatgtatggcaagatgataaagatagaagtcatcttgggtataacaaactaaagctatataattgaaaagggtagataattagtttttttaagagcttgcaacttttgtctcagaatctcaaaagattaatccaagagttactgtgaaaggctatagcaaggataaacatcttaactagtatctcgcaaacacgaccaactatccctgaacaccatcaaataatgcaagccatagctggagtgtgtcatc

SEQ ID NO: 213676 - DNA, 709 bp, Cannabis indica
atagaaactatagattccatatctatgattagcgtcccactcaactgattctcaagatgtaagtattgggcaaatctaattggtaaactttaatgaacaactcgaaaagcacaaataacacagttgagattgaacctaaccatctcaggattaagatcttttgatctaagatcaactaagtgatattgacttagaaagatataactgtatgtttatgatatctttaccaagttcaatattagtctagtctgatgtatactccatacatccgatactagcatactttactaatgtcttagaaatgacataacacttatccaaggtgtaagtaaacattatcgatgattatcatgtcaggataaattcagtacactaataaatcatgggacataaaatttgaaacatataatcacaattacttttcactgtgatgacatcactgtaattgtatataacaatatgttttgaatttatcaaaaattgtatattaaaccataatcatgaaaataacatgttaattaaaggacttctttctattattaacaaataagattatacggaaataggttttatttatggcataaattttcaacaatcccttctatcccaaattgattgtctttctccctctcgacttctctagcttctcatcatctttgatgggaaaccacgtgattcccgtcctcggtctctctcttttaaaatctct

SEQ ID NO: 213677 - DNA, 665 bp, Cannabis indica
aaaaaaaaaaaaaaattctactttcttttggcatatggagaaaggaaatgggggatctgaaaagtgaggattttctatgtttactacttcaacatctttttacacgtttcacaagtttatcttttgtttcgatcaccctttttccctgaatcacagggttgatgagaagagattcattcttatcttactttgttaaataaagtaccaattactcatctaaaataaccctttttagtattatgttatatgttgataattttgtttagcaactttgtaaagtttaatgttattaaacatgaaaggatcttctcttgaactaaggaggatgccattttgcttctacttgaaggaaatgcagtaaagattacaattatttataatagtagagagtgatagagtatatattcttcaatgcttttaatttgtactgaaaaacctgaaactgtataataagaaatcaaaccagaagatatataataaaagctaatttttcattaataagaataggaaacagatcacaagctacaccagctaattaaatgctacaatacagatcacttgacagatgatacagtagtatatatactttcaaatacaaagctctctctctttctctctcactaccaaccacaacaaactaattattctgagccatcttattattt

SEQ ID NO: 213678 - DNA, 623 bp, Cannabis indica
agcaacattacccttaaaagaggaaaatgtcaactcaaaagattgtctaccccaacaatactcatcccatctcccactattaataatgtcaatttctgccctactaatctttttttcccttgtgttactaagaagaaagcaatgaataaaatagaacacatcaaccttcaaacccaaagcatcatcatttccccatacacaacccgaaataacatcctcaaaacatttttgagtgatttgtttaacaccccaaaaacatgtgtcaataatatagcttgaattctaggaaaaatccattttgttgcaatcccccatacaatacaaacccgaaatcaatgcaaactctttgacactaaattaaacacaacgacctcaaatattagcccaaaattccttaacatttgactactgcacctctcttaatagaattccatgaaaaatttgtgggtagaatttaaatgaaggaatgtataagaatttattgaattgggtagcactgaacaaaatcttggcatttgctgaaacaatgtcattaagcttcttaattactccgcaactacaactagatacaactttagacttgtaatgatcagacacagagaatttgcattctcattcttgaa

SEQ ID NO: 213679 - DNA, 691 bp, Cannabis indica
agaaataagaaagaaaaaaacataaacgtgagaagactatttatcctatttaagagaaagaaacaaaaaaaaaatgagtggttgagcgattgtgcttgcatcaagttctcattttggtgccctcaaaaaaaaaaaaaaaaaattctcaatttggtgtagataaaattgcaatcttctcctctaattctctctctatgtatcatttatacttaaaactctattatatataaattatattcctaaactctatttctaaataaatgtatagtattataaaattaaacaattcataaactctctcaatatatatatcaaactatttctattagtttcataattcaatttattacattaactttctttaattttatttatctaatattctttccttaccgaattaaatagtaatatagatagttagaaaataaagattagagtttataaaatatgaaagtctcttaatttggttaatttacatgttgatgataacacaatactctcaggtatttatgcaattattaactttttacttagcaaaaaaaaaaatattaacttttatatttaattttatttattattcattttatattctaatatctttatacaatttctatattatatatcgatgctatcgtatgttattatgtggtgttggtgatattgaaattgttaaaaaaaagaaacaatcaaa

SEQ ID NO: 213680 - DNA, 739 bp, Cannabis indica
tttagtcacaaaaaatttattttataaccaattttatgactaaaaataacttcttcgttttttttttttttcgttctgtagtaacataataaatcggttacaatttacatgcaatactaaggagcacaaatctctaagaagagagtacgctaatagggtgagatgggagccaacactatactccctgttccaccaatttcataccctgcgtgcaacggcctatttgtgctgctttcgataattttgactcgaaagcatgcacaaatagtcgagtagctagagagcgggtgaatatagtcaagcaccctaatattactatatattttctaaaataaatttaaagtactataaaattaaattaagttttgcacatatatatatagtcttcactcttcatcataaaacctagatattatatatatagctcgattcgttgtattacttaattggaaacatcaaacattacatatttttatactgatgaattagaaccgtcaagaaaggggacattatcaattgctgtccaatatatatatatatatatatactagtaaaaagctacgtgcgaggcacgtatattaaattttatgctaagtattttttactttatttaaaagtgatacaattaaaaattaaagaaaaatactattagttattaggtaagattattatcatgtatatttaaataatataatatataattttgacaattaaaaaatatatgatgatctcaatacac

SEQ ID NO: 213681 - DNA, 675 bp, Cannabis indica
aatttgggttgttatgtagattttagttgcgatttaagttgttccgttaattgctatgtgaatttctatgtagatttctagtaaaaatgacaaaaaaaaaaaaaaaaaaaaaactattttaaagtgtaaaaataaaaactcttaaaaaataatacatttgttgacttttatatataaaaaaatattaattttacccctaaaaccatcttcaatggttataccaatttagcgtagaatattttatttttagggatcgtttggtaggtacgtcgtacgtataaggatcgtattgtattaaataacaaataataccatgtttggataaaatattgtatagtattaattattacggccataaattttaacataatgtgagtcgtattatttaatacataacaaatgacatgtattagcttgtattgtaatatttacaaagggtctatggtcaaccctaggattgaactcagccttgaacctcaaactcataccttgaccatggacccaaacccagacctaggccccggaccccgaccttagacccccacctcagaccccgatctcggaccttaaccttgaacccgaacccaaaccctaaacccagactcgaacttggaccaagacctgaaccgctacccggaccctggaccccagacttggactccggatctagacttg

SEQ ID NO: 213682 - DNA, 769 bp, Cannabis indica
tccatataactattttccaactctgcagtacctaataataaaaataactattttcaagtgttaataagtaatatagatattaaggtgatgataattttgtgaaaaatattaagtaacagttggatatagatgggttaattattatatatattgtccttttattttcatacattaatttctagagaggtacttaggtttcataccatcgtgcaggtccaacaaaaatgttcacgtgaaactccaccatgcagcttttattactattactacttacgtacatatatatagcactttattaactaagaaaagacaattaagtaacttttttttaaaatattacccctcaactattattcttgttagaccatctttgttatttgaactaaattttgttaaaaatatgagttaataatatatttgatcaaaattttataataataataattagaataaataaaaaatttatttagagagattagtaacccaataattaagcttttaatcttttttaagcaactgacaatctgacatgaaataacatgtctcagaatggattgttcattaaaatagacatctactatacgtctcaaattggagaagaccacatataaacataatattggacctatttcataaaattaattaaataaaaaaaactactaaattacaaatttgatgggcaaataagaagtcgaagactcgaaattatcaaaatctcaagtcccgtctacaaactctagttttgaaccttgtcttctaatactcttat

SEQ ID NO: 213683 - DNA, 1307 bp, Cannabis indica
ttaaaaaaaaaaaccaatgaaaaagttatattcagcgtgtacacagtataattgaaagaaaattagaaaagttagtaaagcatgtaaatttcgcttaatatttttaaaattaatatttatagttaaattatttagcaaccatcaatgggtaatacccattaagaagtattcctatatataacgaattatattcaagttaccaaagtgtatttgtatttatatcccatatatctgcatatgaaaatacactaccctaaactaaatgattcgtgtgattgtgtgctattgtatttttaaatttagatcaacttctatgtgataaatttagataatttttaacatactaggtgaggttagcacgtgcgatgcttgtgctttgctcttcttgttacattttatttttatttttgtttgtttaattttaatactataaatatttgtaacaaaaatttaagtttgacattttaattgcagtacaaaatttgaaaaattataaaattataaaatacaaattttattattatataagaataagaaattgacttttcaaaaatgtatataaatcttattatgttacactttacactttattagtatcaatataattatatattgttgtaaatggtaaaagttggtaattaggggtgttcatcaaaccgcccacaccgcaaaaaatcagtttgaaattctttgaggtgcggtcgcaatttgaattttttctaaaccgcgcggtgcgatttgcggttttaaattattaatatgcggttcaaaccacaccgtaccacacattataaaaataccaatttttatatttatttaggtccaatatgtaaatgtccaaacaaaagtccactaattattgtattgttgatttttttttcatatttattttcaagccttatggtatttttgacaagtgttgctcaaattttgttgtatatgtgatagtccaagccgcaaaaactaccgcactgcactattttttgcggtgcgcttctgcggttttttagtttcgcggtgcaggtgcgatttggaaaattaaaaaaaccgcatgtgcgggttggtttaaaaaaatagttaaaaccacaccacccgcactgcgaacatttctaatggtaacatcatgagatgagttataaatgacccaaataattaataattgtggtaataagagaataattaattatatgtgataaaaaaaatataaaagtaaaacaaaataaaaaagcactatatcagaaaataaaaacgaaagcatagaacagaatcaacaattgttgaatgtcttcgccattgatgaacaatca

SEQ ID NO: 213684 - DNA, 656 bp, Cannabis indica
gtattataatgtgacatgttgaattcctattggttgattttaaacaagttaagattacctcctacaacatgtagtttattaaagaaacaaaccgacatgaaatcaagtcttaggcatggaagagagatattcaagtttcaattcccatgtagtatagttactttgctccatctctaacataccccatttgtttattgtccttccctacatttgtcacccaaaaaaattaaaattttaaaaattaaaaattgaaaataaaataagttgtggcatagaaatattcatggtcataaatcataaataaataatatgatttttctccatttgttttggtaagtcggcggaattgaatacaagatgtagttgatagcaaaatcatgtctcttgagagtgcatttattttattacattttttttttaaaaaaaaaaaataacaaacacaaaatttttttgtatagaactcttcacatgcagccatgtgaaagccttaccaagtaagacaaaaaatttcttaaatatcatgagcatgagtcatgagcaatgcatggctttggctcctcagtgattcattaataatgagccttggcttaattgctttgcctttcatcttcataaatcatataacacattttgtctaaccaattatgtattaaaca

SEQ ID NO: 213685 - DNA, 519 bp, Cannabis indica
caaaatggtttcagtctatgcaacggtaaaacaccgagcctaagacctggactcttgttccatatcatcctgatatgcatgttattgacaacaaatgggtgtacagaattaagcttaatgcagatgggtccctaaataattacaagtccagataagttgctaaagggtatttacaaacacctgggattgattatgaggagacctttagccctgtggtaaaacttgtcactgttagaacaattctttctcttgttgtcactttagattggcctataaaacagttggatgttagtaatggctttttagaatggtgatttgcatgagatagtatatatgaggcagccaaaaggttttgaggtatccagattaaacccaattatgtgtgtcatcttcactaaggctctctatggactgaagcaagctcttagagcttagaatgaaaactagaaatcattgctgcagtgaggttttcatgcttaccagatttagactacctcttttttttatctatggttcaga

SEQ ID NO: 213686 - DNA, 542 bp, Cannabis indica
ttttaatgattaaaaaaatttaaattgtataatttagtacatgtgaaagaataaaaaataaaaatctataatagcataaattatatgcaacaatattcatatgtacaaataagatattttgttttgtaaattgattccaaaagatatatattatatatactatcaattcaattatgatcaaaattatataaattttcgttgttgatctctttgatggactgagctgatgagaatataatatcattttttattactaatgtacaaaataaatattctgtttgtataattattatatttaagccgaaagtgaccaaatatttataaactcttattttaaattataatgattactactagcttagcttagttagttcaaatatatcggcaaataattaatttagttaagtcgatttaaaattaaataataatgaaatggtttccaaaatggatgaaaatgatgattagaaataagagataattaaaaaaaattacaaaaatatagtttgtagagagtttttaactgcatgtttgacatcataact

SEQ ID NO: 213687 - DNA, 935 bp, Cannabis indica
gttgaaaaagcaggaagttcgcagtagcaacattaacctttatgggaatccaaaaaaagttagttagcatccttaaccatattaaactaattaaataattcaaaggacacaaacttgtctttcttgcacccataactctcctcctacaccaaacatagccaatccaataaagtctttcatcaccggtattccaaccacttgatccacgtggcgcgtggcgtatgcgggctggtcggaaggtcagacttgctaaccaacccgcatctgtcacgtggattggggtggtcgggatactcgagatgaataacatggttcatagacaatcaaagaagaacactagtttgcgtcatcctctagccctacagaaagacaaagctaaactagagtagtagccttaaccccatttagggaataggacgagagtcgtcaaagcatcaatcacactgcccgacctatccaacacaataacaactctaacagaagtaactccataaactacaacaacatcaattagtgatacatgaatcacttaatttttcatgttacatttttgttgaatattgtaagtagccatgtccattatttgttctaatagatgttcccatgagtaagggtgacaattcgtatttacgggtcgtattcgtgccatgtcgagattcatgtatacaggtatatgctcgacttgtaagctgatgattagcccgccttagctcagacccttgaactactaattctattcaaatataagttaaatcacataaaattaatagaggaaatacttcatatacttatttttttagtttttttttcaagtttatggtttgggttgtttcggtagttttatgtaggttgctatgtggattttgattgcgatttaggttggttgctatgtggatttccaataaaaaataaacaaaaaaaaaaaaaaaaactaa

SEQ ID NO: 213688 - DNA, 1028 bp, Cannabis indica
ataaaaaaaaaattaaaaaactatgagattttccgaatcaaattcttttgttttacataaattatttgttgaatatatttatatatataggtcataatgaataagctatatatagctggcctagccatacacacaacacaacacaatcttttttggcttaagaatcataccatttgacgttacatgcaattctctctatcagaaaaccaatctctatcagaaaaccaacgatgatcatatgcatccaagtgggatttgaactagaagaaagaaactataatggtcaaatattcagctacaaaagtctgagaacatatgatcaagtgtatatatgaaaaattgaacatttccagtcacaacagagaccttgatttgaaaggggttggaggaaaattcagtaaaaataatttttaaaaaaaaaataaaagaatttttcaattaatatagtgtagttttcttttttctagaaaaatgtagttttatactgttgtttgccgattttagaagctataagaagccccagcagaaagggacaaagatatatatggttgtcaacgctgaatttcataaaactcatcaattatatatgtatgatcattattaatattatgatgatgatggtgattatatggagaggttgtaacttgcaatacaggacataataaccgtccatctcccttttcaagctacacgcaatgaaatatatgtgtgcactacttaacattaattccttatatatatacatatagttaaacacacacacgtacgagcacaaaaaagtagaagaggggtatcatataaatctcaatttttgtaatgaaagccaattatttaaaacagtgaatatggaaataagaaaaacatatatatcatgaaaatatccttagttcataagctatatagcaaggtagtgaaataataagtgtcccatatatgtatacacattggtttcaattaaaactcttgataattagatacttttctcccttgaaaattaatgtaaaggtcagtgcttgattgatcaatct

SEQ ID NO: 213689 - DNA, 851 bp, Cannabis indica
tgttatgcccattttactaaagggaagtttattctatttgtctccagatgcgagcactgacacgaccaaataagggttctcgatagcgcatgttttcagaccccttggggtgtgttttaacttgttttttgatggtaaatcatattttgggagtcttgggaccccaaaaccttattttgacgtctgaaaccctaacgggagaccactgccatcagttggagcaaaaagatggcagtgatcagccatggcttatgggaagccttggatggtgtttcttgcttattttagtgatatgaattctacaaaaccactttggccaattggttaagagagcactgccatctttttggccaaaaagatggcagtgatcgcctgtgtggattatggacccttgagtgacttttctcacttgtatttgacatattgatgttggaaacacactttggccaaaaaaactcattccatattgtggtcgaccactgccactatttgtgtcaaaaatatagcattggtcgaccaagtagtttctgttaacgtagatttttgttaactaaaataaaatagcctttgcgtaataaattctctacagaaatatatagaagtaataaataatcagataacaccagatattttatgtagttttgtagttaaaaattattagggatatttattgagtacggaatacaatctcagaatttgaataataatattttctctcttaattttgtcgtctattttttcatggaatctgctcctatttataggaatataggttggcagttacccttttttgggattgattcaaatacaactactcatgaaacgtgaataatccccacgtttcatttaat

SEQ ID NO: 213690 - DNA, 648 bp, Cannabis indica
atatatatatatataaaaatcttaattaagttcttctaacctttactaaaatatgattcttttactttcacagttttttttcataatttttttaacactctttctctatcttaaaaaaaattaagagcatgcctcatatatctttctttcttttacatgattaataaaaagctaattaagatttttgcccctaaactttcacatgtaccaaattatgcctcctgaacttttcaggtcatcaaaaattccacctgaactattaaaattattggatttaaggattatttttttttctaatttcatttaattttgttaatgtggtgattgtccatttactaaattgtgccataaattttgatttataccaaatcatacctcctgaactttaacatgtatcaaattgtgctcctgaaatttttatatgcagactttctttagtaaaattggataaagttccttaaatctaataatctcaatagttcaagggaaatttttaacgataaaaaatattcaaggggcatgatttgatgtgttaaatatgagggggaaaaaatccaaattagcgttaataaaaatagtatttttttttggatgttttgtagtttattctgagtggatttatgattgatttgcatattttaacaaagt

SEQ ID NO: 213691 - DNA, 1382 bp, Cannabis indica
tgacgtatggtttctcattaatacacgaggcaacagtttgtatatctttacctcacataagaccttatagtcaacgagtcgcaattatactctgttatttacgcaattaatgagttattccatcaaaagagatttcatcgatccatattccccttaacttggcacgtgtcctctattgaaatggtagccaaatttcgggtataacaattgccccttaaaaagttctttttaataaaaagtgcttttgaataattatagagggcattttcgtcataatcccttttcagaaaaacgcgtcccttgattttggcggttgtacagtttcaagggtcattatgaactatcttctcatcttctacctcactcccaaccattagatttcccaacctttggccttcttattaatggactttgagtataaaatggtagcttaagcttgccatattccacaatattgtgagtgtctttcaaacactctttggttaaacgactcctgtcattctagagttgttcattttgattaaaaagttgtctttaaatgttcactctttatcaggctgtaggggtagctaatccctgtggtcctaagagctttttttttctatgtaatatcttatgcccctaaatgtgtgccaggtgggcacttgagtcatagtccaactttttttggttgctgtaagtatgttgatgatttgaaacttgacattaaaattccatgttacaccatattaaaatgtgaggttgcttctagctccccttttcacatctacataaaaggcacacacatgcaactggaaggcatctaggatgtatccattaattaaaaataaacaactctaaaatcaaactaactccttacttggatttcagggaccattggcatctcctcactggtaatatttttttaagtattctacattccaagctggggaaatcactgtgtcatctatgtgtactagcttgtatgtgcctaaaaaggatgatctgtgcgatgcaatattggccttcccagtttccccagtactccagctctaagctccctggtgtttgggagcacctttctcagtaaaaattctctggtcttaaaggcgtgcacatgcaccctagagttgtaatatatcattgctcttttttgatacatagccaatttcatctaggacttctctcttttctcttctaggatgtctaaactccttgtcaaagcatcctcattcttcgattccttgaacagtgcacctcgacaaggaataaacgcttcacagttgtaaggtcacataaaaaagggagtttctccagtggtggatcgaggtgtggtcctgtagggccatagcacgttaggaagcttatcaacccataggcttttgcgcttttctagcttggtt

SEQ ID NO: 213692 - DNA, 645 bp, Cannabis indica
attgaaaatgtaaaactttatattaaaacatggtaataaatagaaaattttacataagatagactaaaatttaaaggttagtaatatatctaaatacatgttttatgtcttaggggtgtttacgaattagtttggtccagattttcaaattttttaaactaaactagtattgtggttttttaaaaatttaaaaataaatcagactacttaaatgatcaaatcaaaccaaaccaatccactcaaaaatggattagtttggttcaaaaccataatttttattttgtagttattctaaatttttttacaataattatttattttttcgataattttatttacttttaagaagtttataatacataaataataataaaaaattatcatcataacaatataaagtcaatattaatattttacttaaaattattcccaaatattaatatttcgttcaaaaatatatattaaatataaataattatatagattggtttggtttgaactgctaccgaaatttttaaaactgtgaccgaaccagagaatttaacacagtttggattgatcaaatcattcacaccagattcatttggtacggtctcaaatggtttagtccatattagttagggtttagaatcacagattacggat

SEQ ID NO: 213693 - DNA, 657 bp, Cannabis indica
gggtttgggtttgggtctggatccaggttggggctggggtctgaggtatgaggtccggtcagaggtgggatgggtttatctcatggtatgctgtagaatattgaaactttttttagtaaaaagaatttaaaaatagttttaaaaaacctaagccaaacaacattaaaattttaaaatgacaaaaaactgttttctattcttacttttaaaaacgcaattttaaaatctgaataactaaaaacacagccaaatagtctcctattttctcatgttaaacttttcttatttttattctctcttatttggtttgttgatgattttatatgggaaaaaaattattgataaaaaagaataatttatattgacataagttttaatttaatttaattttttaaacaaataataatttttctaatctttcagttgattaatatatgatgtaaagacataataagataaaactaatatctattcaaatttttatttaattttcatattgttccatatatatataataagaaaaatgttatagcgaaccattttttttattattatttctttgtttttattcttaaatgaaaataaatttggataccttttggtttgattattcttactgtaagtattttttatgaatataaaaattaaaataataaa

SEQ ID NO: 213694 - DNA, 555 bp, Cannabis indica
catgaatgttgtaattaaatcaagtccaaaattaaaaacatttttttatgttggtgatgtcagatttaggatgtcaatggattcttccaatttgttgtttggaacatttgtgattcttgagaggcaacagaactatgacacctattggtttatcaatttgatgaattttcttttgaatctcaactgttcttggagatgcgtagacattcatgttgaatcagaggaggtatgtttattactggttttatttgattttttttgctgttatttcaagtttatattattaatatattaaatgtatatgtgacattaatatgttcctttaattctatacattaaggctcttatgtttcccgatatcttgaagagggtatgtcgttctcctttggtcagttggaaacatcttcgatttttcactgaatgcaaacctgagagggaatccgacttgaaaaatgctctacaatggatttctcctacattatctataatgaaaaggcgcctttcgaaaaggttttttaaattgtaatagaaagaagaatggagtgtttggtaaga

SEQ ID NO: 213695 - DNA, 1120 bp, Cannabis indica
gaagatacttttgactaagacaacgtgagaccagagcagttgaaacacttggatgccaagaagtagtttaaattgtcaaggtctttaacggaaaactttgtgctcaaagcagtgaaaatattggagacttgagaagaataattataccatttattaatatgtcatccatataaattaaaacatacaaacaactagtagaaaagatttttataaacaatgaatgatcagtttaagcagaggaaaattcaagattgaaaaggactacatatagcttatcaaaccatgctctacgagcctcttttaattcatatgaggccttagacagcttgcaaacatgggttgaattttaaaatgttcatttacaaaacttggtggtttggaccattgaaaattttctcatgtaagtctccatttaagaatgcattatcaacatctagttgcctcagtgtctagtgatttgtgatgacaatgttagacatttattatgtataaactgaaacatatatgtgtatataacatgcggaataaatgaacatatacactatatgaatataggatcgaaatacctccagccattgaatctttgagctttagtcccacataagcttgatctgcaaaagaaaccgattgatgtgggtaatcgggcttcctcgctctctcaactctctttagatggaatttgctgttatgaacagaatgagtgaggagctcggggaccgagaaatataggtgagatactccatcagtatctgcgccacattaattgtcagaatattttgacaattaattcaggaaatcaaatcaggtaatgaatataaaatctgaccatatatagaatattacataattgattttgtccagattcaatgaatataaaatattcatttatcagaaaatcaattatttatttatttccttaaatagaaatttatttctttaaatagaaatatatttccttaaataaaatattcttatagagaatggtaagaatgactttaatattgacatgcttaacaataagatcgtctcaagcaagtgaggggcatagggtaaaaaataaaacgaggcccttttttataattaaactagggaacagtaccgcacttcgtgcggatttaat

SEQ ID NO: 213696 - DNA, 896 bp, Cannabis indica
gattgaaaaaaaaaaatcaaaaaatatttctatggcattcaaaggaaaagttaagagataaaccttaattgtgcagagttattgatgacggtgttggcaaacggcggtgcgagtgatcggggaaggagaagattcctgcgattgaacttgaggagccgcaatatacaatatgtctgggttgattttacgattgaaaaaaaccctcaataaaatgataattttttaatttaaatgagggtaattgggtcaactaaaaaattcattaaacccaaatttcagcttcccgtaaaagctaaaatctaaaagttggtgtgtgccaactttaactaaaagccacaattttagcttaaattttaaaataagctattttttttattttaccaaacactttttaagcaacaactttttcaaaaagcactttcaactttttaaaaagctattccaaacgggccctaaatacattataatatttaatttttagatgatagtatatacaataaaatttctttaaaatgttatttgaaataataatttcgatatagtcatctagttataaataaaaataatttaagtgcattgattaatttagactttaatatatgtatttttaatattttatatatataattctattaaggtataacctatttataattataaaaacatattgatatctagttataagaaaaatattatttaagaaactttaaaaaaaatttgttaaatctataaaatagtttaatataccaaaagcaaaaatataaaaaatttatacacacctacacatagagaatttttaagctattccactataaatttaaattattactaaatatttataaaaaaaataaatataaaaattataaaaaaatataatatataggaccggattttgt

SEQ ID NO: 213697 - DNA, 1219 bp, Cannabis indica
ctattccactagggccagttactctctactaactattaaatatttaatcatcgagattgagattgagattatatattcaattatagaactaatccataatttattaattttaatatctatttaattacagattgcagatgatatgaaaccacctccactagtgatcagtattttgagcaagctttctaagatcattccatcttggaaaataattcccactaacgacattattgaccttgctttcaaagttcccgaagttagacaagcggtacaaatatttatataatattatattcttaatatttataaattatatatatatatacaaaaatatgtagtaattttttatttaattaaaactaaaacctaacactatacatgtttgtgatttatttaattaatcaggttagagctaatccatattgttacaagggccggcctaggttgaagacaggctatgaactttttgagagttagtactgctcttgaacagaaacttgaagaggtaaaaataaaaatttaatatatatatatataattattcagagtaataaataaatttaactataaatattaatttaaatatattaaactattagattttagtccgataacgaataataaaagagaaatttgaatttctataattaatttagctacttaattaaaaaaaatataaaaaatatttaaatcaaattttaatttttttatcacttttttgttgaaaaattatttttttttatttatttttttcaaattaatggattaatttcagcctttataatgtaaaaataatttttttttctaattaaatagaaaaataattataaaaattcaaaattttttaatattactcatttataaataatagccagtgcacctatatttatatatattgaagacaaataaaaaaaattaaagaaattttatggtgcaaatttatgagaaatttagtataattcaacctacacacatgtctttgaaaatttaggtgtgtcttaattgaatactataatctatatatatatatatatatttaaaatttgattttgttttgttttattgtttgtttagtatctcattttccatttcctagttttacattggagaagatgatcgagtaacagacaaatcagtgagcaaactgttatacgaaacagcctcaagtaaggacaagaccttcaagttgtatccaaaaatgtggcatggattactgtat

SEQ ID NO: 213698 - DNA, 534 bp, Cannabis indica
ctccaagagccttcaaaatcccttacgcatgctcgtagcatatcttcaagtatttgtattgtcctctcagactgtccatcagtctaagaatggaaagttgtactaaacttcaatttggtacccatggcccgctggagattttgccaaaattttgaggtgaacttcagatccctatccaatataatggacttcggagccccatgtaacctcactatttctttcacgtataactctacatatagatccactgtaaaggttgttttcaccggtagaaaatgtacagacttagtaaattgatccaacacaacccaaatagaatcatacatccctgtggttctaggtagcccagccacgaaatccatagtgatatcttcccatttctactcaggaagattcagaggctgcaacaaccctgcaggtctttggtgtttagccttaatctgctgacaagtcaagcactgagatacaaattctaccacatctttcttcatcccacaccactagtagaagagttttaaatcttaatacattttg

SEQ ID NO: 213699 - DNA, 683 bp, Cannabis indica
tctccagctggtgccttttccttgaaaggggtttcctcaccgcccttagatttcttggccggaggagaagtgcttaaacttcccccaactctgttcttcagggcatcaagcatcttctgagacatgtctgcacgaaacaaaaatagtatgattagaggaaaaaaggcatcagaaggattaagcatgatagtcaaaaagtttaaaaataagacgaaatatcgtacaaggcgattgtccaaacaagactcgacagtccaccatcacctgataagtctatcgcctccgccaggacgattttcccttttcccagcacgggaaaagatggctaagcaggtgaactgggctccctaatgcgaattgcatgttcaacgggcctggacttggccggaagtttcttcctccttttgaacggagtcacctgctcttcctcagcctcatcttcaggattcaggggctcatgagcatactgtttggcccttgcacctcccttcaacttagcctcacgcttcagttgaatcagctcattccctcagcccgtctagcaccagatttcctcttcctccccttcactgtcttaggaatgaaatcctttggatagagcccgtatttcacaaagttgtcctcggaggtcaactgaataatattttgatcataccccaatagctgagcaagctcttgagctc

SEQ ID NO: 213700 - DNA, 820 bp, Cannabis indica
  modified_base (730)..(730): a, c, t, g, unknown or other
atttgtacgtttaatttttttttacagttttacagttttatatagagaaaacacgaaaataacagtaaaattacataaaaataacatgaaaataacattaaaacaacaataaaaaataacatacagacaacaaaaaatcagtaacaaattaacaagagtataacataaaaagaccgtattttctataaataaaattttaaaaattataaaaatatttaaaattctgtatagctgtatatttatagattttttattatttttgtgtatttgtgaaataatctcttaattatttatctctatatataattgacttaggaagctaaaaaaaaaagccactgctcacataagtgtggtgtattgattgaatgagtcatgcctaaacgaaagcatgattcttttgatatagttcctcctattgaatctagctacctatctatttgtattatttataggtaaataaataaaaatttaaataaaatagcatgattcttattgttttcttatattatatttgcatttatgtagtagaattgcatgtaacactaaattatagcttatgctaaccgactatcataaaaatataaatacatatattattatagaatacaaaatgtgtgacacatacttcatagttaggtaaaacaatatatatatctattaatagtcacatcatatccagcttatgaactccccccttcgttcctttttttttttttttttaaatattatntatatatatgattaattaaaattataatttttgtttgtatcaaatatgtagacaaaaactccgtgaaatatacccgtctttttccatttt

SEQ ID NO: 213701 - DNA, 754 bp, Cannabis indica
attagacattagtcatattcaatttctaattcgagtttggtattgttttcggttagattcaggaatgggaactgaagtacaatcgaagatgtatctaccgggatattattccacaaaagacataagcaataataaggctagctatggtggttggtctttgcatcatgaaagtagttcttcgaagaatggccagcattatgccatgttttcgtcgaaaccagcaatggagggaatggattattatgcatgtgataaggaaaagttgagacaaaccatattgaagcatgaatccatattgagacatcaggtatgaaatggtgatatttgatcactttaagaagattggcttctttcctagttatcttgttcaagttattgcttgggtttgtggaaggtctttgttttgagtatctaaaggaccatatcaattgtatgaggcttaaaatattttaaggtgtttttggaagtaattgtgtaataactaaggtagtaatttcatagcatagtaattacactctattttaaagtataaggtgtgtttggatatgaggtgataattacttatgaatttctaatatcttgtttgaaaaaatagttagtaattacacccaatttttattggggtgtatgagaattggatagtgtaattacgtggttagatgaacacacaaattgtgtaattaccttcacttaaacccaattccagttccctgttggctttccaaacacgtccttaatataataatctgttaac

SEQ ID NO: 213702 - DNA, 903 bp, Cannabis indica
atatatatacatcacaaagccaataaattatttggcgttgacaaatcaaaagcttcataaatatgtatgggtatttttcctttaatatttatatatatatattattaattatatgataattgttaaaaattattattaatgtttagtatttttttttatcatatactaatatttgtgtagttatgcattgaatttcatataacttaaaaaaatattttttaaaaaaatatattattaactaactataaagtattacttataaaaaaaaatattgaatactatgtctaataataataataataataataataataataataatgatgttattatagcgatacaaccaattttaatttaggcagcagccattatagccaatgcatttatgtagttctagagagattttttggtcaaagttttggcgcaagcaattcagagtcaaactaagtcttttaaattggtttttgaattggatgatgaacaagtaaagagagaaagaagcttctaaatatatatataatatattggtggctacaaatacaatcaatttgttggcctaaatatatttgtttttttctcattaatatattttactcttcactcttgacttgagtagtaattatttttttgatggaaccaaagttagattgactagtattatttagttaactttacacttgagtgaaaattatacactaaaatttagaaaaaaaaaaaagtgaagagatagattgaggaattacattttaatagttagtgtattctaactgtgctcatcaaacaaactcattagttaatattataaagagctgaatctttaaaaaaaaatgagctccagttactaattatatatataaaaaataaattggatagtatttactgaaaattttgaaaattcaatat

SEQ ID NO: 213703 - DNA, 625 bp, Cannabis indica
taataatcatacgagattttgttttaatctgaatgattttgaaatttaagggccagggccaaagaaactttcatcattttctgattttggttcattgagattacacttttcatgtgaatcccatttgtatgtatttgttcctacatattatatttcagcactgtgtttaactttgggataattctatatcttggtgttgatgaagtgtttggtgacattgagaatcttttctccagataaaatttaatttatggtgttcctaggcaatttgaattataattattttaactactcatagtgacaaataagttaccttgaacaatgttgtgttattgattggagagataatttgtagctatttgtttcaagttttatctgatattttagtaagagaaaagaaataagcaatgcttcattgactagttaccaattaataacatgtttagagaagtttcgaaccaaaatggacaatacttcattgaatagctaccaactaataactagtttatagaagttgtgaacaattatggtttattcatttgcatctctccagcattgttgttagcatttgacacgtttctgttgaaactaatagaattttaaaaatgttatgttaagccacaag

SEQ ID NO: 213704 - DNA, 574 bp, Cannabis indica
ctcgccaaatcaagtgtttaactatagggggaacatttgaagaccaaactgtagtccaaaaccgcttggtattatgaaaagaagaacccgaagcgatactacggttggtcaaggcaaggtgataagcactctttacactcaaaatccctgaagattcttgaccccagatgagattatcagatccacatgtgccagaaattggaacattaaggatatgagttaccgtggaggagtcaaaatgctggttaagcctatctaaattccaagcacccgatggggagagaaaataagaaagagttgagttaggaggaggaggggaggcataaaacttataacgaagcccagggatccagtgatcctgaatcgcatgaatatttgagtcatcaccaactttccaaattaaccctctcttcattagatcacgcccccaaaggagactacgccaggaataagaaggattaaaaccagggcctacctcaaggactgaagaatgaggaaaatacctagcttttagagtttgactaagcaaagagtgaggacacattagaacccgccaggcttgtttagcaagcat

SEQ ID NO: 213705 - DNA, 968 bp, Cannabis indica
attcatgttcgtcgtacagccaacaaggctgctcatgaattagctgtgcatgcacttagggtggatggtgaattggcttggattgagaattttccctcttttcttattgatgtattaagctccgattgttgttaataagagtttaatttacaaaaaaaaaaaaaagtgataataataaagttaaatatgtaaaccataagtaactttattagttagttagtttgtcataggttacaacaatagagaggttcaataattgatttgtttagcaatggtttggttaagaattgaaaaattgaatctgtgtacagtaagtgcatggtcttatatttataagtagaaactaattatactttacctctctcattgagggtttctaattgatggtcaaatgatttctcggatcctaattcacggcccaatgagccaatccactaagaactacgacctaggcactagagcccaaaagatgagactatgggccctcctcggtggcccatactaggcccattctttaacccgacagtcacccatttgggtcttggccctcatctcccttccaaagcaaataatgatacgtatccggtatccttaccaaaaatatggacaacatgatatatagcataaatatattttatataatatataagatattcctttttttttttgaaaatatatataagaatatccttaatgtatctaattataataataatataatatcactttcgtaatactatttatatatataacaataaaccaaaaacaataaaatatttgtgtcggaaatgtccaatattatttgttaatttataaatggaattaattaattaaataattgtattgtgaccaaattaattatatatatattaattctctatttgtagatgacattttaattcatttaatttttttttttttttttatgaatcagatgaagttcattattctaggtacgtaacgtatat

SEQ ID NO: 213706 - DNA, 813 bp, Cannabis indica
actatccacaaatgtcgcatattccacaacaacagcgggagagaagttggaaatgatgatgatgatggggacgaggagtccacacaattaggattatagtgtacgtcatttgtcgtacaatataagtatcaatttgaacaatgaatttgataacataagtattttatatttgaacactttattttagttattttaatgtgacaatataaatatttttatttgagcacttaatttagtagttgcatgtaattatttgaatgttttattattttgattattgtaatttttattagtttttaatgaatattttaaatataaatataaattaatttttaattataaaattatatttttaaaaaaaataaataccaatgggcgcgccccttgtggtgcccactgctatggataacaactttcagcatttcaagtggacactacacctatcgtgccatttgttttggctattggcacgataccatttgtggtgctggttgtaacatattggcacgaacctattggcccgaccaaaagggcacgacatgtcgtgccaatcaacagatgggcaaaaaaatgaatttgttggcactaatttaattgtgtcaatacccattttttcttgtagtgttatgaatggaagattacaaggttcttttaaaggagagcaggggctgagacaaggagatcctatctttcctttactctttgttcttataatggaatatttgtcacggagattccaattagttgctaaagagaagaaatttaggtaccatctgatgtgcaaaaagctgaaactaactaatctttgctttg

SEQ ID NO: 213707 - DNA, 703 bp, Cannabis indica
taaatgacctcatttagaattttcaggtgaatgacctcatttagatttttttttatagaggtgaatgatctcatttgggattggatgaggtgaaagacctcacttggaatttttttgtgcatttgtgattgttgttaggattttatgccctaaataaaactcattttaatataattttatttgctatcaatagaagatttgaagtcatttaggtttacatgttattttcatgtttatggtttaatatacagtttccgttaaatctagaacatatagttattcacaattatagtgacgtcatcacaatgaaaagtaattgtaattatatacttcaaagactttagtcccatttatcagtacactagatttacactgacgtgataattagcgataaggtttacttacacttgtataagtagtatgtcttttttctagggtattagtaaattatactagtatccaatgtatggagtatatatcggactggaccaatattgacattggataagatatcataaacttaccgttatctctttttaagtcaatatcacttagttgatcttaaatcaatagatcttaatcttgagatggttaggttctagcttaactatattattagtgttcttttacttgttcgttaaagttgaccaaatgaattttcccaatacttccatcttagaaacattgtagtataattgagtgg

SEQ ID NO: 213708 - DNA, 987 bp, Cannabis indica
tgaaatagtgcagagatataatcgttgcagtacagccaacatggcaacatacatcaaagttttgcatttagtattattactaacaacagaagtctcattaatgtattttgaggagtaaaatgaggaacagtgcatgcctactctaggtaaatgttatctatatatacatcttttatttttggtgaaattcgagaactcatttgaaacataattaattagtttctaacttcaatttttgactttcattaatcacaaatctatatttaaaatataccctaactaccatttttatcttctaaattttgacattattaaattatatctcctgaaattttctgattgttcaaaacttttcctaaactattaaaattgttagatttaaagatttttgtctaattctattcaattttactattttagtgattgtttatgtactaaattattatctctaaattttgatatctaccaaattatatctctcgaactttgacatgcaacaaatcatgcccataaattatcatccatgttaaattttttttactaaaaatagacaaatatccttaaatcgaacaatctcaatagaaatttttcatagccttaaaaattcagaggtataatttagtatatgtcaaaattcgagaaacaaaactaaatatttagaagaacaagacaaaaccaaataaaattacttgttcatattagaagaaaataaaaaaaaagtaagcacttactaaatttatgttaaagactgttttcatgggattgaattaccacttaattatttttaaaaaatataatttaagaagtaattaattaattacctcgtggccattgctgcctgaatctcttctaatatgttttctaagtttctttccaaatcttctaacagagctagctcttagcatatcatgctcagttgttcttcttattggaattgttccttctgggcatgattctcctgataaactccataactgataattttca

SEQ ID NO: 213709 - DNA, 566 bp, Cannabis indica
aaaaaaaaaacaaaacaaaattacctgaatgcaattgcaatgtcgttgccgaatttctcaagggctttatccataatttcaagaggggaagcattttcgagatctttagccaatttctcaaaatcctcagtctcaattctttctttgtgtacctctgcaattttaacaatcctctcagtcaggcgaccacgcatgaaaaacccaaaacaaaacttagaaagtaaaaatttagaataaatttatttaccaggagcagatacggttgctgctgaaggaacaatggaatcgtttcttctaggctcggcattaataggcttcacagcgctttttctttgtgaaagattcaaagatgaactctgaccttgtccttgtccccgttccaatattctaaatgaaccaatctgcggaactgcaaaatattaacaaaaaaaaaaaagttaatgtcatgttttcaggtagatcatttttctttcattttgaccaaaattagataaaaaaaatatatatatgaaacgatgcgccggaccataagtccacctctcgtattttccggtaaagattttcac

SEQ ID NO: 213710 - DNA, 567 bp, Cannabis indica
tgttggttcgagaaggacgttggaaatgtctcggtgggcaacccacctgtcccaggttgagtcccaggatttccctcattctcatcggggaattcatgttccctggtcccgggtcgccttatgttctcatttctgtgagaaggctctggttggtcgttttgttgttcattctcagggggagtgacagtggttccccaggttgttcttcttgagcgttttgaggattctcttgagttgtatcatgcctcctagttcgtgagccacaaggtctacctcgtggtctttttactccaaaattaggttggttttgtgtgttgttctcttgttctgccctagccgtgtctgcctcacattccaactcagcatttcgttggttttcctcctccaggcgacgtctgagatggcaattttctaactcgacaactggcaagtgtctcatgggatcataggcaccatcattctcatactccatggtttgagaaccaccagcacttatgttgggttcttcattccctatttctggattctagccattcccacgttgggtccttcttaactgtgtggacc

SEQ ID NO: 213711 - DNA, 508 bp, Cannabis indica
gtaaagagtaagagcttgattaagggcagcacaagaagtgggattagcagaacaaaaaagtatgctatcatcaacaaacaaaagatgagaaatagaaggggcattcctagcaattgcaaggcccctaagaaggcctcgacgctgataattgctaagaatagcagaaaggccctcagaacagagaatgaacaagtaaggtgacaaaggatccccttggcataaacccctagtatgcttgataggctcactaacaacaccattgacagcaaaagaaatagcagcagaggataaacacgtaaagataagagaaacaaaactgacagggagttaagatgaaacataacattccttagaaaatcccattcaaccctgtcaaaagccttagccatatcaagcttaagagcagcccaaccccttttccctactttcctattagttatattatgaactaactcattagctagaataatattatcataaataatacgaccagacacaaaaagcactc

SEQ ID NO: 213712 - DNA, 925 bp, Cannabis indica
aggtaatctatttatgagatacacagatgtttgaaaagcatcaacccaatattttaaaggcatgctagcttgagcaagtaaggttaaccccatttccactatgtgtctatgtttcctttcagctctcccattttgagctgaagtgtgaggacaagaattgtgaaattgaattccatgagtagttaaaaactgatcaaaagcctgaaactctcctccccaatcagttctaatgaatttaatttttgtttcaaactaattttcaaccatggttttgaactgagtgaatgcattaagggcatccgatttctgttttaatggatacagccatgtaaagcggctgtagtcatccaaaaaatggatataaaacttgaaattagtgttggagttgattggagcaggcccccacaaatctgtgtggatcaactcaagcattttggttgctctactatcagacaatttaaaaggtaaggcatgggactttccatattgacaagcatcacagaaattttcattgttgttaaaagaaacaggtacattactagaattcaagacaagtttaagaattctagatgaaggatggcctagtctcctatgccatacatatttcttggaaatgaaattagattgtcactaacattagaagaacaaacaaaagcatgagtagatggggctgactgagtaggttgatacatagactttggcagtgaggaatttagttggtatagcccatccttaagcatccctgtgagcagcaccttccttgtgaccttgtccttcacaaagcaaaaatcagagtcaaattcaatgaggatatcattatcggttgttagcttggaaatacttatgagatttttggccatatcaggaacaagtaaaacatcttttagaataagagttttgggtggaacatttgtagataaaatac

SEQ ID NO: 213713 - DNA, 518 bp, Cannabis indica
cacttcagctggagttgcaggctttcctcttggggttgcaggtaggaatacaacgtaaaatccatcgatttagcatagaatcggattgtctacaagccattcaattaatccaaagcaaggatgaaggctgtctcgatgtcgattgtttgttagatcaaataagaactttattgttgtatgattgtaacgcccgtattttatatttactaaacttggaagattaactttaatatattatatctttataactatatagatcgggatcccgagtatcaaaatacaagttaaaagtattttactaaaatgtacatacaacattttttttaaaaaaaaaaaacttaactacgctaaaatgcaaactcctaaatacagactccaaaatactaaaagaccgaaactctccaggttgcactgctgcgatatgtacaatcattgccaagttctgcctcactctcctccagcttttgcttttcctttacctacaccaggtagcaaactgattagtcaacagactcagt

SEQ ID NO: 213714 - DNA, 722 bp, Cannabis indica
aattttttactaccatttttcttttcgaactggaaaaaataatatttataatacaatattaataataaatcatttgtacctgtaagatatatatacatataaaatatagggtaattctacaatagacactaccctaaaattggacctatcggtagacaccctaaatactaaagagtaattggttgtaatatgtatgtccactatattttgtgtgcctcatcacattgaatctttaatcttattttacttaaaaaaaaattaaatttaaatagggttaacaaagtgagaggggagattgagtgatttgattcgatctctttcatcggggggcttttgtttgttatctcttatctgcaagtttccctttttatctggttcgtaagcataatgttgttttttatatttttttgcattcatgtggatttggatttacaaaacttctataatcaatcaatatatcttataaataattaagctacacgaggagaaacaaatttcattattttttttttgtatgagttcagtattattaaggtcaatatgaaataacaaaataaagaagaacgtgaagaaaaagaaaagaaaaaaaactgctttgtacgagattaaattgaaaaaaaaaatgaagagatttgtgatgacatgaggaagattttagtgaaaacaatatatgtttcatctcgtaaaaatttaatgccatcaattccattcgttttcttttt

SEQ ID NO: 213715 - DNA, 954 bp, Cannabis indica
cctatatcgagttaaattcataaaatatggaattaattaaaatcggagaatttccccaatctaccatcttgaaccacactcgaaccactaacgacccaaactaattttactacattttattttttagaagtgacgttaaaaattaatttattcaaatattcataaaaatatttagttatttactattttattattacactttcaatttttgtcataaacaatagacgaagtgtaacaatgctcctaaaacaatttcaaataaaatcactgtgaaaagcgaaaaccgaaggcattattggtaatgggtagtcatagaatcgacttcaataggaactcatatgaacaagttgactggttttcccgacaaaagctaaggcttacgaccttcttcacctacaaaatctaacccacctcacactctcacactctcacactgctttcactttcacctattgtttctttctctaactcatccacaaaccctaaacttctctctctgccgccacttctctacctctgtgagtttctctttctttttcatttattttatatgattttggttttaaattttagaaatgtagcaccaagtttagatacttgtgagtgaaaatgaaattccggctattactctctgaccagataggaaattcaacaaatgttttcgtaccttctatgattgttatttttttttttttttttatatttttttttttaattatgagttttgtagaatattatcatttcatgtgaaactcactgtttggtgtttgtttagtcagttttgagaatgcttatatataatatacttttctgttgtagcaataattaatgcctatttccatgtgaaactctcaatattatgcagctaccttttcctgtgttgcgattgttcatgaaaagtttatcttccatcttgaatgagtgcaaaactggagcaaagctggtattcaggag

SEQ ID NO: 213716 - DNA, 585 bp, Cannabis indica
cttgaagggattcaaaggacagtattaacaaataaaactgtggaaacagaagctgagttgagaaatcaacatgataagcctgtggagcagaataatgttgtggttgagacggtggaacagaataataatattgtggttgaacattcatatatgggtaatgcgggtatccaggtcgaaagggtagttgatgtggtaaatgaagatggtcatattgaggggaaaaccaacttaatggatgagccactccggttgggcgatggagaaactctagttggaagggaacaatgtgtaacactttctggaggtacatctacttgcagtgcggtgcaggcttttcaaccagaagagttgatttttgaagatgcccaattttcagtgaaagatgaattaagaacaaaagagggtcagaaagagatggaagaaaccttcactggatcatctgaattagaaagggatgatgatccaaatgaagggaaagaatcagtggcaatgtcgccccttcatccctctgttatatggccttctgatgatataattaccctcgaatgggtgaagaatttgatgtttaaacttgaacactcttca

SEQ ID NO: 213717 - DNA, 945 bp, Cannabis indica
tatagttgaaagtgatcttactcttcttgctcaagtctctctccatcttagatattaggatgaagcttatagttctactgtgtttcttatcaacacagtgccttctccacttctcaactatatctcttctttagagaaactatttcaaactacacctcattattcctctctaaaagtctttgtctgccttaattacccaaatctcaagccttacaacaaagttaaactccactacaggtcttaaccttgtacattcataaggtatatcctatctcacaagggttacaaatgtttgttcaaagatggaagggtgtacatctcttaagatgtcctttttgatgataacgcgtttcctttttcttaggtttcctcctctcatcatgttcattcttcagtgtcttctctaaatgcttgttgttcatcaaggttattcggaaagcaataaaatatatgtgaaagttaaagaaatagatgagtaataaagaaataatattggagtttttacgtggttgaggcgttaacaagtcttagtccacgagtcaatattattacgataagactagaaaagccttatgagattctaaaccctggatttttcatgagcaattaagaaatgagattgtaaacctttccttgaatgtgtgttcttatatttatagcgctagggttcttattcgtttcacttttctcactaacggggtaaatacaaataacatattgacttgggctcaaccccctaagtttaagggagcctgttaatgaacctaagccagctgagttgacatctagtagttaatgtttgttagctcaatatagttagttagatatcgattattagttgttatgttagttacagttttttattttagctttattgagcttgtgtatataaacctaaattttatttttgcttgacccgatgtgcatatttatattcgttcatgc

SEQ ID NO: 213718 - DNA, 665 bp, Cannabis indica
ggttcaaattgtgagacaaaatagagaaaactaatcaaatttacatacctttttctctttaccatgttttcttcaagatttcttagaatgagatcttttagatgattcagttttactctggtgctaggttccttctgagtagaataagtaatgatgtttggatgaagtgcgacatcctgttctagttcacctgctttagttgcagcagcagattcgatatgttcttcttcaaaattcaagtgtactacatcagaatctacatttgctacttcaggtggagaataaagaaaactatctatctcggcttctgtagaaaattctaaaaaaaaatctttaaaatcatcaacaaccacattagttgattctataacagtttgagttctcatgttctaaacatgataggctttaatatttgtggaatatccaataaacacaccaacatcacttttagcatcaaattttccaataagctcacgatctctttaaacatagcgaacacacccaaagacatgaaaatgacttatatttggatacttacctttccagattttataagatattttggaaccaggacgactaaacactcggtttattgtatagcaagctgtatttatagcctgttcccacaaatgtttagttagcttcttactatttaacatcattct

SEQ ID NO: 213719 - DNA, 563 bp, Cannabis indica
tttagcaaagagccaccttattgactataatgattggtacaattgactataattcgaattgtaggcgagaaaataactaatgcttaatattcgaccaagttttttcataaaataaaaacataacaaagaaaatgtcaagttatatgtagtaacgttaattgtcttcttctttttcttttcttttttccttttgaacaacaggcttctgctggcagcaaaaagattgttggggtattctacaaagccaatgattatgctaagctcaaccccaattttgtgggctgcgcagagggagccttgggtatccgggactggctagaatcacaaggtcatcaatacattgtcactgatgacaaagaaggacctggctgtggttagagttttaacttatactatataaacttgtacaattgagttgtatcatagtaacatgttagtgggcatgatcttctggttcttctttagttgaacttagtatctacaacttaaatatatcactatgtccatattaataatgctatacaataatttgaactgatgtgtaacccttctcttgttttttt

SEQ ID NO: 213720 - DNA, 692 bp, Cannabis indica
aattctacataaaagtctctattacaagtagcgctacaacgtaaattgcaacaaaaaatcgtatagaaacccctattacatgcaactagtgttgcaaccactttaaaaacccaaactgtaaatataaaagaaaaattaaaaaattggtatatgttcccctaaatttaattatcaaaatttgtataaggtttataatatcaaataataataaattaatttataataataatataaaataataataaattatatattctaaatttaatttggaaaaatggagtgtatgataaatatatatacatataaatatattaaattaatattttgtgctttatacttttattttaattatgtatatttttagttgtataattaattttttatgttatttaataaataatatttttttattaaaaatatttaatttaagtacattttgaaaatataataatttttaaaatttattgttaaatttttgttggatggtaacacttttaattttataatatatattttttttgtgacaatgaacaattttataatattttttattttttactaaacatcacactttttctatgttttttttctctcaaaaaataataataaaaatattattttttgggaactacaatagttaactacatcacaatatatagtgaatctttaagaaacattgtggattggggaaa

SEQ ID NO: 213721 - DNA, 901 bp, Cannabis indica
aaaaatattactaataagtataagacgatatctataaaaaatgttgaagacggctattacctaatagcaatgctcttatttaataaattttgtaaaactttgagaatttcaaaaaaaattaacatgaccaaaacatagttctgttgcacactattttattttacacgcgtgtaaaataaaatttttgaaccttattttcacgtattaaaatttttataagatgttttgagtaactacaatataggcttaaaaaaaaaatagagtaaaattttttccaaaagagataaaaatatattaatatgcattcctaaagttaatatatatttatatatatatatatatttcctacttaaaccatgaataaaacttaaaaatatatatatatatatattataatctgtattgcaggaataaaaaaataaaggtatatgctgtaaatctacaactatgaattcaacatcaaatatgacaaacacaaacacaagaaatcataaaagaaacgattcaaagcataccaacatcaaaatcccgtaggaattagtgagccaattttaaggcccgaaacatcaaaattgtggcaagaatgtgagatatgcttagatccgttttgaaaagagttttcatatactacttgaaaagcattatttggataaaaattaactaatttatggccattttacttaggggtgtgcagtgttgaaagtgactattaggtcaagtcgacctttgagcgcccaggttgacattaacatagaatgtcaacttgggctcccaaatcttgtttatttggctttaggaatattttgagatacttggataatataatagctatccttagttcattctttgacaccggtaaagttctctttgcaattttattcaatacgcacgagtgatgtcc

SEQ ID NO: 213722 - DNA, 803 bp, Cannabis indica
tatcttattttataattttgttatttttttggttgttaagtgacaattaacttcgttaagtgtcaactcaaaaatatgtgacgacatatttttttagcttatttaatacataatctaataatatgttaccacgtgtttttgagttgacacttaatgcccaaaaaagatacgattgcaacaaaatcgtaagctaaagtatttttattgctctttttttttattagagtcatatgtgtaattgtcataaatattaagagggttgcgccgcaaatatcccataatagtattaataacgtaggttaattattacattttgttttcaaaatacccttctcttaacttaacatcacttcttttctattctctctatattctcccaacagctccaccatatctcccattctttcattttctttactaaatatgactaaaattttacacaaaagtgatcatttttgttgcaccaaagcacgaattggaggtgggacgaggtagacgctaagctaaatagaaccacgggaaccaatgggtaattggtatttttttgtttcattttgttgttggttgttatgtttgttttagaatgttgttttgatgttcgatctgttgattgctattttttgtgtaaaaatagttgttcttcaatttttttgctttatactggttcctagtttattttcccttagtccgatctctcccattctctcattttctttactaaatatgactaaaattttgcacaaaagtgatcattttttgttgcaccaaagcacagattttaggtgggacgaggtagacgctaa

SEQ ID NO: 213723 - DNA, 873 bp, Cannabis indica
caaattcactttaataaatttacagattcaatctttatatacccagacagcaattaatacaacaaaatctaaacgaaaaattaaatataatgaaatttggggaacaccagtatagtttaattttaaaaaaaaattacagagaaaaatttcactacaactcagccacatccccataatataaataattttttgaattaaaaaataaagctaaaaaataaattaaatttttactacaaaagatccgaatgaagaaacttcaacggctttgggtgtttgtttgttagaagagtaaagatagtggctggcttcaaagccggagccataatccagctaaattggcaccgagccgagccagccatctcaacatcctttcctaacccacacaaacggctgagcctgagccgaagatggtcttgatgattctgatctttacctgaccgcgcttcggaggaggattcggctgcggcttcggcttcggctgctggcacgatttggtatcagctgggctcaccatttttttttttttttgagagagaaaagtttgagtagaaatgatttgagattgagtggtatttatagggggagagatgagcatgaatgatgactcggtgagtttggggtgttctgactcagtttcagtatccgagtcactaccgttacttgatgagcaagccttatacagtgtccttttatttatttatttatttatttattataattgggttaacaaaaatgtaatttcccatgtggattcatttttattttcatattaatttatatgatttaataaatggatgttttaattagaaaattaattaatgttcagtaatgtcgtggaaagtgaagcaagttgtgtatgttgcatataattgg

SEQ ID NO: 213724 - DNA, 541 bp, Cannabis indica
agagaattttgttacaaatatctcttttgttttattttattttttggacaattatcgttatttatataaatatttatgatcttatgatttgttataaatatataatttttctataaatataagttatttttaaataaataaataaatgataaacagtttaatatataataaacatactttttttttttttttttataatagtgtacatgtttattttttattttaatataactattataaatatatatttattttaataaatatttaataaaaataataaacaataacgtattgataatttacaaatttgtttgattaaaattaagaagaaaaacaaacatacaaggtataaatatattttatatctacaattaatttatatttttttttaccaatatatatatatatatatattattaataatattacatgtttattaaaaaaaactaaaataaacgatttaataaaattaattaaatagttagaatatattttttttaaaaaaaactaaacatacaaatatttttactaagaataagta

SEQ ID NO: 213725 - DNA, 581 bp, Cannabis indica
gcaatagtagtattactttttataaggattccttacgaatattaacatacctctctcattcatttatttatttttcttaagaatcatcatttaaatatatgtacaatatgttaatttatagagaaagtattatggtacatactttataagttttggatgtatcatgaagcagaagcatttatctaatttaattcaccttattttactcatagtatatctaatttatattgattaaatacgaatttcatattttaaattagtttatttttaatattaaattatttaatatttataatttttccacattattaacaataaaataaaataaattattattattttatgtctttaacaataaattaaaataaataaaataaaaaataataaattaaaaggaagaagaaaaaaaaattatatgtataaagaaatatttcattttgttttatattacattttatttataaataaaaataaaatatacatttaatctattaagttctaataatatttgaatcatgtattaaatttttaaattataattttttacttaaaaatattaattgtatgtacataattttttt

SEQ ID NO: 213726 - DNA, 864 bp, Cannabis indica
ttctaaacacttggcttggctaattaatttagaaagtatttaagactaatttaaaagcaaccatcatatccttgaactcgatctccttcattttgactcccagatgaactgcttccatagttgctcaaacacttccaaagtataatatgggtgaaaatttcacatttgaagaatttgatgcatcgggtgattccttcttagcttcacttattaattatcagggcattttatttatttttgggttattgaaaacaacaattcttttggtgcacaccatgtgtttgataaattgaatgagtgaaaatcatattagaaagagtgaaaatgaacaacaagtagcatttcatttagttagctctttgaatttatggaggttttttttttggtaagtgaaattatggaggattttgtcaatttgttctagtgtagttttgtatctattattgtgacatggtggctgttatttattgctccatcaaaccagtcaatataagattttgtgaaaaaaatattttttttaaaaagaaaaattttaattttaattaaaaaaaattatgactaaccataaattttatttgtactttatcattaaaatgtgtttgtctacaagtactagtcacaaaaattataatttaatgttactaaatgtgtttttaactataacacttgtgattaaaattaaattaagtgataactcgtatttaaatattatttagtaataagtaatttttgttgtgactaaaagtgatatttagttacaaaatttatgttgtgattaaaaattaccattaaaggtagtatttaaggtaatgattacaaaattacaaaattaagaatttatagttttttaaatattttttacgg

SEQ ID NO: 213727 - DNA, 594 bp, Cannabis indica
attcatgagtgattggaaagtggatggagcattggtcatttcgaacgacatgactagaaattcatagtggccatcatgttgtgaaacgttgttttatatcttcttgccagacttggatctgatggtaaccagatttgaggtccaatttagaaaaaattagagcactatgaagttcatctaaaagctcatcaataacaggcattggaaacttatctggtattgtcactttatttagagtgtggtagtccacacaaaatcgccacgaaccatcttctttctgacaagaagaacgaggctaccggtggtgggttgaattattcccaccgtaagcatgttagacattaacttttcaatataatctttttgagaataggcatagcggtacgtttaacattgattgaggttgtttcgggctgtaggataatggcatgctcatgggaacggttcagggtagacctttacacatttcaaacacatcagctgggatttgagaatattctggtacagtttgacccacattatcggtatcatggcatgtgtaattgaactctaaaatgatgccttgtggcttaacttgaatcttttccattattt

SEQ ID NO: 213728 - DNA, 1099 bp, Cannabis indica
ttatatatattcatacccattataactctctttcttttcttctatattgatggtgatttaatggggttcgatgatggtccatgctacctattttttatttttattttttatgtttttatacataaaaaagtagcatcaggtgatcggaccactatcagactactattgggccatatctacatttatagatgttaaactctatgcattaagctcgtcaggaaggcattgggccaccatcagaccaccatcggactccattgaaccatatcatcgcgctaccatcagaccttcgtcttcaaccataactcattttaacaataggatggcatcggaccactatcggactaccatcggacctgacagatctggccatttttgaccctaaatctaatatttactcacagataacaaacattaatcatacaatttattcctttgacaacattgccgatagtgaagccgtggttgatggagaagtcgttgggtccgcagtggtcattgggtccatgggtccttgggtttgtggtcatggtggttgtagagagaagggaccaaggttgtaggtagtgtgcttctccgagtgcgtgtttacagagagcgagagagagagaggattgttcaaatgaggagggatagaaaatggggttttaagaaaaaaaatgacatattctatctagtattaaaataatttaaggtttaaaaaattttatttgatgaaatgcataattagtcaaattttcaaatataaatctccatattgtttttcaattaattttgatgtgaatatatattcatatataataatatagtactggttttactacttgttatcgatatcatagtaaagtttgtagttatacaagctgcttgtaaataaaaaatctacgagagaagtgaatttttctttttttttttgtaatatttggtaaacatcgatcaattactcaaaaaatgttggtttgaaaatggtgcccttaaattctttgattatatacataaatatttaactatactttaaaaagtatagagaatgttttaattttcctatcattataataattcttttgtttgtagaaaaataaaataatagtttctttta

SEQ ID NO: 213729 - DNA, 550 bp, Cannabis indica
taagatactttaaatttacacggaacaccatgttttgaatttttttgccctttttttttttacgtgtatgtacattttatttattaaaaaaaataaataaagtataaagttcaaattaggatcaaacttatgaccactagaataggaggatgctgttaaaccatcattccacttaaatttaactagttatttattattttagattatattaaatgtataagtaagcctaccctaaaattcaatcctaggtccgccattgcagggaacccaaggagtttataatgatattattgatctatgcttattatgataatgtgttaatagaattaatataatttatttataaaaagttcataaataagtttaaaaataaaacatttatgttcattttattttaagtaaacaaaactataaccaaatgtgaaataatgtataaatattatgttaatattttatattaataatgtttataattattaatctaatatattatatatagttttataaataaaataatatatgtttattttattttatttttttgttgttt

SEQ ID NO: 213730 - DNA, 739 bp, Cannabis indica
agatagcctttaggtgaagtggaaaaattctattttcctaaaagatcatagtgtgtggagcctttctattaaacaagatatgaactggtacttcaaaaagtttttgaaactccgatctagtaccaatgagacatccttgtttcttgctgaaaaggttggtaaatttcatgctaaacacttttataacttgcaattggatgcccaggaagtgaagcatagtggcgctgtttggaataaactaattagttccaaaatacagattcatattatggcaggcttgcaatgttcagctcttcactcgagatcatctttgtaagttcttgagcttatcctcgaacctctatccggtttgcgagaaggacactgaaacacatactcaccttttctttgattgtgtatatgctaggaaaatctttgctgaaattggttgttggctcggtaatgtgaattggccgattgacattagtaatattcagtagtggtgtactcgaggccctcttaactttaagaactgaataattaacacgatttttgttgctgctatttatatgatttggaaaaatagattttgatatattatttagcttgtacctcttctcttaagtttagcatggaaattaggaaggttactcaatctaaaattttgagcatggcttgtagtacccttaagaaaagggagatgtgtctaattaatgtaattaggtcccggtagcaagtttttttggctgctgttgagtta

SEQ ID NO: 213731 - DNA, 985 bp, Cannabis indica
tttttgaagttacgtgcaatatgcacgtatatttagttatatattagttagatgcttttgtttaatgttagaggaggcaaagacgacaattttttcaatatgcagtaattttgtaaaaaaaaattaacaaaaacaaagaaaaaaattattatcaaaattcaaataatggacaattcaataaaatttaaaataaaaaatagtgaaactaactatttttatatcactggttcaagatagttacatgaatttttaaaataaaattattaagataaatgataaagtggtttgggaatattcattctttaattcattgaaagaaaagaatattgaaaattgtcacttaaccatttagagagtctcatattattaatcggttttgaaagccgaaaaaaatcataacaatactatgtcacaataaagaaattactaatctcataaataaaaaaaaaatagcatttcaacttatttaataactatcagcttatatatgtcataattaattataaacataacaattaatatactgctactatatatcaaataagacaaacctggtacataatgtttctttcaacaagttgatgttattagctaatctaaataagagagtacaagtttatgtgagagctaaggaatttttttctattgatattgagacatatattcaaaagtaagtgtttaattaattaaaataatataaaattaagtgttgtatcgacccaaaaaaaaaaatagcagtaaaaccagtaaggccagcatatatatgaacaacataataactaaccaaaagtcaacctcaatcttgcctaatcaccattaccaaccacaattaattatattgatttacatgacatatatttaattagtttcttgagtgtatatgcgtaaatcttctacaaatcactccacaataaaacaaattctcatgaatcatcatagctgaacagatttgattcacatgtcttacaatataaaatatgtgagc

SEQ ID NO: 213732 - DNA, 825 bp, Cannabis indica
agaccagtacaagtggcttgactgggattggcgcccggagccttgaacacattagggctacaacaataaatcccttgcgagattatttcaaggacttccttaaccacctcgggcttgccctattccaattgaatatcatttcacatagaatccttgtaagtttgagggttctgtacaaaatcttgaatttggagtgccccactcccatggaaattgagtatctctactccgtcaaggctgttcaagcgaggaagaatgcaacagggggtttctactatcttgggattcacatcggtgattgtaagattattatggattctccgaataaaacttcctttaaggatgatttcttttggacgaccaacctctcccacattggcacaaccactttccgtataattcataagttattatttgcacaagacttggtttaattaatccatgccttttattcgagtataactgattgtaattttgctttatttttgacagctgtctcgaaaagacttgctcctactcctgggatggccgagcgacacaggctcttgctgactctcccatacggtcttaggtcctacgaatttcttccaaacgaggtcaacctgaggtctgtggatctcctaactgacaaggagtttacttatgattacaaatatcccaagtgttatcccaatttttgcactctaatgtgggaacacacgatgctgacatgtggaatcaactttatgtatctgcacgcaagaaatatgccgaacaagggaccacatatatttgctcgaacgaagccctcctaaccgggcaatgagcaatccgcacagcatgcca

SEQ ID NO: 213733 - DNA, 509 bp, Cannabis indica
ttcatggggaattaggccaatgtttaggcgaaactcgaaacaaacatctttgcaatttcatttacttgggtctgtgttttagtgaagatcatcaagttggtgttggtgttggtatttgccaacattttccactagttcaaagggagttcatggggaattaggccattctttaggtgaaactcgaaacaagcatctttgcattttcatttgcttgtgtctgtgttttagtgcagatcatcaagttggtgttggtgttggtttttgccaacattttccactagttcattcataatcatattcataattgcatacacaatgagagaaggaaaataattcttgaaaagttaccaatagcttcaactagtctgagaaccatttgaccagtatgaatccctttaacacagctactccagtaaactctatatgcatcaacaatgtaaatgcatccctgcaaagattgaatctaatcttttacacttctgttgatgatcactataatttgtacataa

SEQ ID NO: 213734 - DNA, 530 bp, Cannabis indica
ctccgctacaatacaacaaacaggcatacaaacttcaatatagatatcgatatattcacacaaatttcaacctcccgaaacgctgtacaacaaagttgactaaaaaaaactcgatcgaagcgtacctgaatctgaaaaattgcgggcgaagagagaagcggcggaggctgaaacaggcacccggtcaaccaatcgtgcgactccggcagcggatcgggagggagcagcagcggccgatgcggatgccgctagggttagggttttgaggtgggatgaagagagaagtctccgccacatgactaatgaaataggtcagagaagaatctctaatggtgttctggtctcaggtcacgcccctgcggtgttgagagttgagatctccggagtgtgttggatgaaatgctggaaatgcaattgtttgagaagagaagagaagagaagccaacaaacaaagaagaaaaagtctaagaaagggacgatggtattggtgggctggaggtggccattggattggggtcgggtcgaaagtt

SEQ ID NO: 213735 - DNA, 515 bp, Cannabis indica
tatatttagaaactaggtattacctttggtcttcacttcaaaaaccttcttaaaatctcctgatttccttgctgaaatgttgaagttttggtctgaaagtagttgtgccctcgggttctattttcagccaagagaaaaaaaagaggatggtcttgattctttgatgtttatctactaatcacctttgttttattcaacctaatattaagtatataaaatttagtcgaatcgcctctcgcgtccaggcagccccatccctcggcccagccttcgtcgtcagcaaagggatttgggtcagtgttgatttcgtattcggatcccaaccctccattcgctagtgggtggaggtgtcaccggcgtgagaagagacaagagacaaagagagaggtcgccggcagtgggcagttgtggttttgttaaggttgatggtggtgatgctagaagagaaggaggaggaggaggaggaggaggagagtgcggcaggatagaagaagaagaagaagaagaagaagaag

SEQ ID NO: 213736 - DNA, 968 bp, Cannabis indica
tgtaatcaattggttatcacatgaggtagcccaaaagtatttcattgccataaatatgaattattgaaaagaataagacatgtatatttatatatttctcttcaactccacaaatatatataaataaagtaattatttatttgacactcataattgaagtgaattctcttaagaattagatctacccacttttagttgtttttactccaaattaaatgcatggatcgattagaattagaatctcgagaaaaacccataaaaaatacgtcattttgttatgtttttggctagagtttctttgttacccgactagactagaattaggttgtttgactcgttttgaaactgctggaggttgaagacaacctgcctgggacgaagcccacttgcggctaccgaagagtgagagagagtgaggtagtttcgtgactctattttcaatgattcttttttttcagcattattatagtttgatttctcatttttggtgattttttaattaatcttttgactttgtttagtaattattattaattaaataataattatacagctaaataatatttttgatgatttttcaaaatctataaatcataaaaaaaaaattgggcttcttctcgttttatttgacattgtcactctatttgatttatcttgactatataatctccacaaatattctttctttcacatctttttattagggctgagcatcggtcagtttggtcgtttttttctatatgaaaatctaaaattcggttttcggtgtggattggtgcaatctaaaaactgacaccgaccaattcagaacttatcttaaaaccgaccgttttgaacctcaatttggtcagtttaaactgcccaaaccgaactttttaaattttttttttttaaaaaaaaattaaattcaatttattttataaatacattattcaatattttactactacaaacatacaaattaatta

SEQ ID NO: 213737 - DNA, 491 bp, Cannabis indica
aaaaaaattaagtagatgattgttaaattatttcaactctacaaataggacaaaatttactaatttgtagccactcaacaatacattcttcatgatacgcatgagtgcatggtaatttagtagcttccaaaccaatcaaaacatcctccaaacaaatagaacaaaaaattggattatcttttacctccactttttctaattttttaattgactcttcacttgccgccacaaaacagataggaagatcattgatatcatattcatcattatcatccaaataaagttgaggtagttcatcaacataaattataatatgaacatcaacaccgacttcttcatttgaattataataatctatgttgttcatcatctctctactgcaatcaataacttcatcagcaagaaaagagagaggaggaagtaagacttcaacaagcatgtcttgaatggcaacaagcatgtcttgaatggtaacttgagtttgagtatcg

SEQ ID NO: 213738 - DNA, 672 bp, Cannabis indica
attttgattaccgatactaatgaatcttatctctggccgtcgccccgtcggactagtaacaatctgaaaggattgttgaaacacgtacaaaatacttgtgttgttttacttttattgcactgtttgtttttcttgggtttctctggagttacagagttgcattctgtaactacagaaaactgttttcagtaccagttttattattccgcatttaattaatcatttaattaaataatcaaactgagaatattaaaatacggaatttcaaaattattttaattaatagataaaaaaaaatattcctcaacttatatatatatatataaaataaataaataaataaaaaaataaaaaataaataaaaaaataaaaacttaggctttaaagtgaaaaaattaagcttaacaataaaagacagaaagatttccgtttcaaaaaaaaaaaaaaaaaagaataaaaaaataaaagacagaaaaattccagtatctcaccctacccgaactcattttctctcttctcttcttctcaatctcttctttccatggctacggtctcgaatcaaactgtttcaccacagaaacttcagggcgatgataaagataatagcaatatctttcagttgattcgctctcaacagttaggtattttcatttttttttgtttaattagatt

SEQ ID NO: 213739 - DNA, 565 bp, Cannabis indica
tgggagagaatgaggaagagagatagagagaatttgtcacacacttagagttctagatctagtttctagcttggaggcagcttaggcaacttaggttttcagtcagaggttaaggcctttatataggaagccttaaaccctagctttacaacagaccaaaattcccttgattctagatattattcagccattttgttgggcttcttgggcccaattcatagcccattactcctggccacgtgtaggagtgtccaatgaggcctgcatagcagtcctttgccagtcaggcccttgtgctggccaggctggcaggccatggtgctttccctatgctagccggccatagggtcagccatgggtggccaataaactcctaagagtgagctggtctgtcacttgatccccgtttgtgtgctgggggtaatagtttgctatgatgtttacttggccttccttttagtgagttgtactaccacgtggcacgggttttgtccacgtaagtataccatgtcatgaggacaaaacttggaataaaaggtatattatacaacaccttcacttagat

SEQ ID NO: 213740 - DNA, 951 bp, Cannabis indica
acttgttgtatgttgtgtttgatctttgtgggtagtaaaatctacgtttttatatttgtctttgcatattagtaagtatgatttgaattatgactatccagctagctagagtattgtcttcctttagttaattagaggatcataactggtggctatttagaacacgtatatctagttggtgagtattgttatggctctacatttttatgtctagttatttttgccacattgagcttcgatatgtatattttggttttgtctagtcggcgttttgctttccatatgtttatgtttttggtgaactcgctctcagtccagtacttttgttttaggtgggttttttgctaattctatcaacaaccatggtgattgtgccacttcatctaataaggcgaccagttcgtctaatgatacttcaaacattcgtacttgtgtggtaggttatgttctggatgatgagtgtgaagatatggatgtccatcgctatgcatctggggttggagtagacaccgatcgccctatgagtgacagtgagtcatgcgatattctttcggatattaatccaaggtcagaaataaccttcaacgacttgccaaaaattcgtcgtcgttacaatgttcccatacacattagtttgtatgctccggctagcgggaaacgggctgactggaagacaccgggttggacgtgtttatacaagcttccattcaagtatggttttagatttcctctccctaagttaatgtctgaactatgctcctatcatggtatctctcctagtcagttaatgcccaatgcttggcgtgttctatggctatacaagtgttgactgaaaagcataacattacattcacggttgctgaagtcttgcacgtctattacttgaaagaacatatacatgataagggtaggtatcagctcactgtcagaaacgatagtgaccatctgatt

SEQ ID NO: 213741 - DNA, 747 bp, Cannabis indica
aagattaaaaaaaattaacgaaaccgatgccatagaggggatttttcgaaatataaattctgatcctacaatatctaataaatgatatagctacaatttttattaaaaaaaactaccttcaaatatcaattttaaactaaataagtatttttacacctttcaactttttttttttataaaaaaaaaattgaaaaaacaagcaaaaaaaatcaaattactaatttttacaaaatacataattaaaaatattatttggtaaataaaaattaaacttggttgtttttattttaataccagaacagggttttggcagtttacaatataaattttgataaaatttgaataagaaagagaaaagggacccacgtacccatgaagaggcgaaagggcagaggcagtagtccacaatcatagtgagtggccatcccacgtgccaacctgaccagagcgtgggctgcccctataaacaacaatctcaggtccaccataaaagaaaaccctataaaaatccatatcccataataataataaaaataaataaaaataaaaataaaaaaagctcacaaactcacaatgcacgtgctaatgtaattattacatacccaccatagctccttctttctcttcatcctaatctccatattacaaaaataaagtaataataataatagcaaaaaaggaaaaagagtacactcataataaacccaataacggcactccgttatacgtttttgtccccctatcttt

SEQ ID NO: 213742 - DNA, 816 bp, Cannabis indica
ttgagtgttaaaaaatgaagggtaaattgcggcataacccccaaaacttaaattttagcggtaaaacccccaaaattagaaaactgttagcaatttacagtttgcattttaggtgttaagtgtcatgttagacagtccatgtgtacatctatgtggacaaggtgtacatatggcacaattttattactccgcgtaaaaatatatttaaaaaattaaaatattaaaaaaaataatttaaaataaaaaattgtacattaaaatatacatatttttcaaaaaaaaaaattacttttattttttcttcttcgctgtcttcttcttcaattttttttttcttattttcttttctcttccacatataccatcaccaccattacccaccaccaccctccacaacccaccatcacccaccataagcgcatgcaacaaacccacgaactcgtccatccccatcgaaccaagaatattgttcccatcatcaaacaacaaacccacaaacctagacctccctgtcgaaccacgaacccattaacctattcccatccctttcgagccacgaaccccatcgtcgtcctcttccaacctgcataaaaaaaatacaaagagagagattgagagaaagagagagcgagaaacacagagaaagagagggagggaaaataaaagggatgagttttgggaggacctcagttttgggggcgtagatctcgatttcttggcccaaacgcatcgctgaagtgcatctccagcaccactgacaacttctccgtgagtgcatctccaccgaaaaacgagagagaggggcgatgatagagg

SEQ ID NO: 213743 - DNA, 1393 bp, Cannabis indica
ctcgttaagcacattacaatcagtaatagaggtctcaggccgttccgcttctgtaactactagacctctaaagcagactataaggtgaatgttttaagaacttagagaaagaggagtaccacagaccttaaaagtctttatcagcaattatttaggattaagcatgttcttaaaaattgatatatttccaagaatgaagatctgagcaagagttacaaagacgctaaagaagcttatagcaaagctcaagagcttgcggcaaatgatcctcttagtgatgttgcagcaagggggaaaggaaactctatgaggcttttttggagactcaaaaacagtatttcagctatcttcgacagaattcaaaggtgaattgggttagatatggggatgaaaacacaaagtacttttgtgctatcatggaaaagagaagggttgagaataaaatttgttcctttagtgctaatggggagattattgatgattacgatcgggtcattgaccactttctcactcattttcgtagctatatggggaggaaaagtacaacgactagaagactagatttggaatgccttgacaacggaaacaaactgaatctcttgcaacaagtgagactaactcaacctttcactaaaaaggatgcgaaattggccctgtttggaattcactcttcaaaaagtccaggcccgaacggttttggggctggcttctttaaagatctttgggctgacctgggagatgagatctctacgacagttttgggtttctttcagtttggtcatcttccaaaggaggtgaatgagactgccatatctcttgttcccaagtctgagaacccccaaaatgctagtgactacagacctatcgcctgttgtaataccatatacaaatgcatctctgagatgatctgttcaaggctatcagaagttcttcccgatcttatacatgacaatcaaggtgccttcattaaacataggcttcttgctcataatattctgatcttgcaggatttgttgaaagggtatacccgaaagaacttatctccaaggtgtatcttaaagattgacttaagcaaaacatatgacacagtggactggaactttgttgctgatcttttaaaagggctttgctttccatccaagttcattatgtggattcaaagttgtcttcatggagctacttactcccttatgttgaatggaagagtccagggctcttttaaaggagagaagggtcttcgtcaaggagatcccatgtctccgctcctctttgtgctcataatggaatatttgactagattactcatccaaaagacgaaggagaagggatatggttgccatcctctatgtaaatctctacaccttgtcaacttgtgttttgcggatgatctaat

SEQ ID NO: 213744 - DNA, 867 bp, Cannabis indica
aaatattaattttttttacaaaatattcgaatgatttttcttttcatttcactatcaaatagttatttcactaaaattaagagtgttcataaaatagtcgatccaaattaattcaatccgcaaagtgcggacatcaacacttgagcgaattggattggaaaatttaaaatccacacttgtgcgaattgaatattaattgacatgtaaaagtaactgatccaatccaatccatacatatttataaaagaaaaattaaaaaaattatatatacaattaatttattttttttgtaataaaacttagcaactttgttaacaagcaatcgttaataacaatagaacgcactttgttggaaaaatcctccaactgaagcacacgagtcacgacctgcagagaaacaagaatccctggctaaaacatgagccaacttgtttgcagatcgtttgacaaaacataactcaacattatttaaggataagagaagagtatgaacatcatggactaaaagaccaaaagaggatgacaaagtaatttggctttgcacggcttgaacacaaactaaactatcagtttccaaaatcacttgtccccacgaatgacggtcaatccagcttaaagcttctttgatgcctacaatttcagctatttcaagttgcacccgccccatctatcccatcgtgtaagcttctaccaaattacccgttggaatctcgagccacacaaccaaaaccaaaccggccttctcgctcaaacaaagcgccatcatataactttcatctatttatagcaggtacagtccacgctcaagcacacacgtcccatccaatcaacggacgacgaaacgaaaagaacccgttttcctttttt

SEQ ID NO: 213745 - DNA, 515 bp, Cannabis indica
aatttgttataacacaaaacaaaataaaactaaaaaaataatctctgtatcaaatccaatttgccacaaaaaaaaaaacccaaattaatatctcaaaaaaataaataaataatagaaaaaaaagaagagatctaaactgcctaaaaccccatccttggatccacgaacagaccaccatcggccgtcattggcctaggcgaagaccccgtcaacttccccatggttccctaagtcccagaaacctccaagcccgagaacgccgtcaataaaggtcgtcctccacccagaacaaacgactttcccatctcgatggtctctctctccattagtccttctctccaaatctgaataatcactggttcgcacacagagaagcagggaaagagggtgataaaatcgtgtcctgtgttgattttgcaagaagaggaaaggatgaagaaaggaagaagaagaaggagtgggtgggtgtgggtgtgggttctgctagaggaggaagaaaagtgtaaataaaaaaa

SEQ ID NO: 213746 - DNA, 540 bp, Cannabis indica
aaaagagagaggtgtagatgcctacaaagctatagcatttgaaaaatatatacaattaataatctctttaagtatgcatgtatgtaatattataataatgtctatccttcttttcccatctgaatttttaatattattattaatttataatttttcttttcttttccacgatatatttccaaataatagttccaggaatttaggaccctgtatggaaatgattaaaagagtggttcaattgaaccaatataattagaaattttttttttttttttggcgaggtgatacaaataattacaaaagatacataaatcaaagaagttatgatcgtccaaaaatggtcagtgccctataatgggacatatgattgggttgtaatttaaccacattcttcaaccaatcatagtagtgagagagaaaagagtagtcagagaaatgatcagcaacaacattgatttgtgaaattttacagaactgtgtaggaactcatgagccagactatacattacattcacatcagagaaatttaaaatataataa

SEQ ID NO: 213747 - DNA, 677 bp, Cannabis indica
attgttataccaaaaattcggttgtactttagaaggtgagacgtgtcaacctcagggaatatgaatcaacaaatataatgataattatatcgttaaatgcaaaatgaaataactcattaaatgtggaattaatagagaatattcgtaactcggtgactgtatagtattaagcgagacatggatatacagactatcaattcatgcattgatgagaactatcttgtcttggaaggcataatcctgagggagccatagacaacgcatagcgaggcttctacctcgttgtatgtaaagaggtattgacgaggcgaatcagttattagaacacttagcgtgtagtacacattataataactaagtgtaataacttgaaggacatgattatccagtctgcaaggccttatggtcaaagagcagttcttaagtttgctcagtaatctagtgctcatgtcattgctgtgcgtatcaaccaagacatctatgtacacggcgagatacctccagtgagatacctttagaagaaagttcatgttcctgtcagcgttgaccgccttaaagatagtttaagtcacaactgtgtgattttttaatgttatctacacgtatttaagtagaacgtaattaaagcccataattttggggaatattattatggaattcgaatttaaatgtaatta

SEQ ID NO: 213748 - DNA, 493 bp, Cannabis indica
atttttcaattctattttcatatatttaaaattctaattccataaactttctactaatatttttcaattaatgaaacgaaaagaaaaactttaattcctgtatgaaaaatcaaactttcaatcctaataatcaatagaaacaacatcaaatttcaagttctcaaaatctataaaaataaataaataaaaacagatctcataaacacaaactcaaacattagaacctcagtaaaacactaaaactcaaacattaaaaacacacacaataaaattcgaacccagaacttataacacacacatctgaataaaaattaaaccataaatgaagatttatgttagtattttttgaatttcggtatttatcagcaacaaatttaatattttaagtatttatatcataaattttttaatagtaaagttaaaattttaatataattttattaagtaattattattaattaaaatacacaattattttatatataatttaaaa

SEQ ID NO: 213749 - DNA, 1112 bp, Cannabis indica
ccatgttgtgtgagttaagtcatgttaagttttcttttgttaaacggtcagctaataacgttgcttcatgtgtttgctagagcggctttattagatcctgattgtatgttcagtatggagtctgtcccaactgatttgctaccttgcttggtagctgaatttgaaggttaataaaagttgaatttacctttacaaaaaaaaaaaaaaaaaagaatcaatcacatacaattgattcccattctctttagtaaacatgccaaattgaattgttggattgattgaggaatagtaatcaaaattagaataagtagtatgcttaatggtaatataaaggattaagaattagattgacccttaattgaattgttggattgactgaggaattgatgaattggaataaaaataagttgtttatttgacttacagttacacaaatcaaaaatcaaaatcagaataggtagtattgttattatgtcatgtatttttaatgagaatgaaaattaattgtatgacattgattctcatttattttgtttattaaacattgtaataggaggagtgggctacttaaatggggatttattaattatatacgtaattctataaatatttatcaaaataccactatttgaatagtataccagagattattctttacttcgagtgagatgttgagttttcaactttcctagtgctcttaaaggactttggttctgaagattttcaaatttttatagttactaactttctctacgcattattattcttcttcgatagagcctagtaatttgagtgagaacagaccgttagtggtgcagcctcatactgtggagaagtcagatgcaagggcgacgatgacactagggaatgttcaagaggagggtcaaatactgttagaggattcagatagagactaggaagtagagatggatgaaagagaagagatggaggatgtttttcaatagttcctagactcgatgtctatgtccttggaagctgactttgagttaagtgcaaatattgttaaaaaaggagtattagcaaaggtagttggaaggagaggcttgtcaaaaggtagagtgaaggaagtgctggaaggaataagaaaactg

SEQ ID NO: 213750 - DNA, 526 bp, Cannabis indica
tatttaatattcaagttgagttttataaaacgtgtacataataaacaaatcaaaattcacaacgtgctgctctctacacacatctcatcttctttctcactttgatggttaaggtttactttatcattttgttcttttttgaatcaagttgagctacatgacaaggttggttgtcatacgtacaatattatcaaaaaaaagaaaattacaaaattccaattttacataaacaaaagtgggacaacaaagtaaaatttattttggtaaaactacatgtttaccactttctacaaatccaaaatagatattagattatttttcccaaaactaattttgtagtttgtgttgtctctagactaacttaatagattgcatgcatttacagtacttatacatatttacatgggttcttattatgcagtaaatattttggttaaggtgggaatagggagtgagtagatgtcctcactactttgccatctttgaactcaatgttatgtagcttttgttggcaccatttaaggtg

SEQ ID NO: 213751 - DNA, 563 bp, Cannabis indica
ttcagagaaagattctcattgatcttatctaatcacttcataattacaagtagacacaactttcatcttttcatgatcaaaaatagggaattttcattcccattcctaagcaaacaaaaaggtaataaaaatagtgaaatgagaaaaatatatccaagcataaatggtaatacaattgttacgaaactacaagcaaaccactcaaaatcaagccataaatatctgttaagatttaggcctaataccaacaatgaacataaaaatacaaaaccaaaaataaatatcaagaaaaaataagaaaagtgaacatgtatacataaaataataaacttaaaaacggaacataaactaattgcatgtattgaaatgtttgcataaataacaaataaaataaaaaagaaaatatatgaaaataacatcaaaaagtaaaccctaaaatgaaattagaacaataaaactaactagaaacaaaaataaataaaattccagagctaggggtaaaactaaaatgaaacttcaaacaaaccttaagaaggacatttggttctttctttcccttctaa

SEQ ID NO: 213752 - DNA, 600 bp, Cannabis indica
cacgtgtacataatattttattttttaaaatttataaatactaaatgactctaaaatatgtatttttcatttggcaaagttttaatttcttttatttttccgttctaagtaaagaatatgttttaaattataaatgaaaaaagtaaaaaagaaaaaattaacatacaacaataacaataatttcaattgaaaaaatatataattaattaattctaaaattgataattaattaattaattaatttagaattctaataattattaacatagtaatctctcttttcaaagctcttaagaattaaaataaatcatgtaaaaaaagaaatatataatcatgcaagtgtaaaatttaactatgataaattatttttttcaaatgtcattcaactcttgaaaatcctcccaagtatactcagaacaatatatcaaaaacaaaatatactcggaacagataataaaactatcatataatttaaagtttaattaaagtactgcattacttctatctattttttcaaacttctcaatgactattcccacaaataacaacaacatttttatttgaatcatcaagcttataaatatgcattctctctgattt

SEQ ID NO: 213753 - DNA, 562 bp, Cannabis indica
cagtaccataaccaggcctgactagaggcctagcagatgccgatagaattgatggtctcttctcagttgccgccattacatgatcaatttctaaccaactatgcggcccagtgcaaaggcaggggaagtagacctcagtaatagatctagccctcgcgtcaacactagtgccagagtcttgagctggatagagtcgttattcctgacgacccttcctgagttagtcgtcataactgcatcagatcttagcttttttgcctaccccaaaacctcttgcacctcattgtgtttgcgtagttatactttagtggacgacgaggaacacgagcttgaggacaccagtggtcgatcaccttgccagggagttggctggctagatttgggtttttaggggcgagcaagagtatggtgagtgtttctaggctgcgtgtgttcatcttctgctctttcttcgggcgactaagggcgtagaccctcagtcctaatgatacctttggctaagaccctcctgacctttggccggaccctaacaagcagttaggtggccttccttcttctttct

SEQ ID NO: 213754 - DNA, 823 bp, Cannabis indica
tgtataaatcgatctaattcaataaaattcgactgatcaaattgcaactgacagtcaaatattagatatccaattgtgatcgaatcgaattagatgttgtttttaaatatctaattgcattgaattgaatagtagatgaagtgtctaaaaatctaatacattaaacatccaatcgaactaattatagtattttcatttagcttagatgagtaattagattttatattattatacgtaaattaaatctatatgtatatataaaaattagcattaaaattttactttttttcttggattggatatagatcagtccaacccaatacatactggacttaaaatattggattgatctaattcgattcaaaaaatagtaggtctaaaatattggataaatctaaattaaaccaataaatataaataaaatacatccaatgataaaatcgatccaatttaatatctaatgaatattagatcgattaaatgattgaaattaattagatcggatcgaatagtaaaatttaatatctaatatataattagatcgaatatgaatatgcctaaagatattggatgtatgatcaaacactccttacatatactttgattttattcttccttacatatataaatgaaatattcgatcgaattttatattttttgattttgggatcaattaataatatatatatatagttaatagtataaatgtataattattttatgatttataatagaaaaaggaaatatatgtttgtttcaaccgaacaacattagtaatatgacaataccatatcatatatgacatggagtcgtacgtacttgt

SEQ ID NO: 213755 - DNA, 506 bp, Cannabis indica
aaaaaaactacaaatcttaaccgtaacactataagattacctagctaaagagaacaagaattacaatatctaaaaggtgagaataagattggacaaaacatagaccataaaagaccctctcttatatatgtgggattaaaaagttggtcacaagatcatgtaccgaaaaaggtgaaaatcatggggagaaagaagggcaattccatttaaacctaaaaattaggtgacaaaactgaaagcaagaaccccagtaaatcagcattagaaaaaactgaatgtcctcacaaacaaaattataatattaatcgcgtcaaaaaaaaatatataatattcattgtcgacggggccctctttgaagctgagaatcggtttggttttggcttcattgttagagacaaggatggtaagcttgttcaagcggtttcaggcagtaaaattggtagggtttctcctgagattgctgaagttgtgggtttgaaagaggtcttgagttggataaagacgat

SEQ ID NO: 213756 - DNA, 568 bp, Cannabis indica
aagcagtaatagcaactaatcaaagatacatcctctaaaacacaagaaaaaaatttgcattcttccttacgaacgattttttctcagagtaatttttaaagtgtaatcgagcttgtatatgaaacaattatatattaataatttaacacaatatgaactcgtttggcacgcttcgtattgtattaaataataaataacaaatgatcgatattagcttgtattataatatttacaaaagattcggggtcaacaacaatcttcaatccagatctgggacccagacaccaaccccaaccccaacctagactcgaacctagacccaggaccgcgactcgaattaaataatactaataaaatataatacaatatattaatacaagtcaatactaaacatagtattgtattaaataatacaatacaacacaataaggggtaccaaaggagccttatatgtttgttgataagataaaactgttacatcaacaatcgaatagcttcgctaagccaaattgcagtcttgcaagataagttcgacattagcgaatcagaagaaagttgattcaacaca

SEQ ID NO: 213757 - DNA, 581 bp, Cannabis indica
gtggtaataagttttccatacctactagttaattttttaaaaaaaaaataataaataaaagtattttttttagttaaaatatacataaataaaattatttaaataaataaatatatttaaaaacaaagaaacaaaaattaaacacatcctaagcagacaaaataagcaaaaagaggatttaaaaacttttatactccttttagcatacatggtgtaataaaaaataaataaataaaaaaagaaaattgtaaagcgtaatcaaaaaaaaaaaaaaaaatgatacatttataataaaaaaacagtactcatgtaaattcccctacattatttgctagaatatcatcatcttcttgcaaactatagactaactaaaagaggagataaagaaaaaaaaatataaattaaatattaatacttttctaaaattccatgtaaaaataaaatattttttcaaaagacaaaaataaaaattgagttgagaaaattttaaacttagaaccctaaggtgaaattacaccaggctagtatataaccacttatctcatatttgttttcattgactagtacatttgtataaaaaa

SEQ ID NO: 213758 - DNA, 644 bp, Cannabis indica
aaaatatatggattttttggacgaaaaatttgatctggagaatgttgctacattgaacccccaaatatcatcggctgctgagatgagctcctaaattgatcaaacatcggctgctgtgactgtgatcctttaaacaaatcagagtagaaaaattgaggagactaggaggagcatccaaacatgttcagaataagagaaaattgggaggaacttccctgtatgttaggatagaactgttgagtctgttgaaacggttgttgttgcggcttttgataagttgcactaccttcaagttgtgttggtaaatattgctggaagaaactctcaaattgcgtgtcatacaaatcagaagtgttgagtcccggtggaaagtgcacgcaatcttttaaatatctctgccataataccaacatcttgggaaagagtagaccctgcttgagattgactttgactttgactagaagagtcaaatgttaatttttccccttctttcctaagttgtaaccaactccgcgtatatagtcacctatttttctttagcagcgtcattgacccaagctttgtcattttatctagtatgactatctctccaagtatggaagacatattaatctggctccatttgtattgttattagtgttagt

SEQ ID NO: 213759 - DNA, 651 bp, Cannabis indica
cttcacatgcattgacaaatcagttaggctatgtcataaatctagtctctcattcacagaattactcccatacacaatagtatggaaaaatactttattcatacctcatattctgactttgcaatgaagaaattacttgatttcctttaaaacctccattgacaaaagttttgagcctcatttgcgaaattctaccctcaatgttggtgctggaatagaactcccaccctaggaagacatatttcaccatctcatcaactttacttcctcttcttttagtttccaaaaatgcacaaatacccactttattctgcttcaacacttcttgtattttatcttgtttattcttgtggttaaaccccctaatgtttcagcatagtagattgcaattctccattaagaatattaaacgagtttttgcagttgtttgccaattttcttttaaattcgaaaaattttctccttgggaatttgccattcacctttaagttgagtctccaaagtgtccacctattgaatttcacattgagatactttagactttcgaactcccttgaaccagaggtgtgatatagctactgaatctacacaaatctatgaatcagtagaattaatatctgtttctccattgctagaacggtgaacctgctg

SEQ ID NO: 213760 - DNA, 569 bp, Cannabis indica
atcaaaatcagtttatgccgcgtgttttcactttcgcccttgggcccagagctgaacaagaaccgcagttatttgcaaactaagctgaaagcacgatctgaactcgggcaacaccctaaactgcctcaaaatagttgcaagctctacctctccaaaggtaatgatatttccgaaatgcaagaaaatctaattgattagtttacttttagatccgctttggtatacaaaaatgttgacaaggaaataattttgtagagagaacataatcgattaagtatctgttctttgagcaggatctcgattaagcttaccgggtctttattggattaaacttctcaaagctattcttaatgcttccctgtatggattgatagcagtcttttgatgaatacttgtacggtaatagtgcctgagtttggttcgagtgatggttttcggttttcaaaattgagtttcgatgatcaaaaacgaagatgtttagaatgtgcctttctctgatttatgtagagattagaaatgttttatgttttcttgttactccaatacatatacacattgtattattggtg

SEQ ID NO: 213761 - DNA, 533 bp, Cannabis indica
ccataaaattcatcttactagcatgttttctctcattttaatccatataatatatcttaccattaaaatctgaaacaagaatacaataagcgtaaacttgagcaataaaacataaaaaaaattaaaaataaacctaaatttggactctaaaataacctaaaaatagacccacactacaaaaaactgctatttttagtgtcaattttttagtcagacacataattttttttgatgctaaatgtgacttttagtcacaataaaatgttacttgtgactagaatatagtctttagttgcaagttgtcactaatttagttttagtcacaacaagtattatgattaaaaatacatttagtcacaataaattataattcttgtcactaatacttttagccacggactttcagtcacaatgtaggaatgataatttataattagtcacaatttttttacttcttaaccacgagttttgttgtgactaaaaataaaattttttgtagtgctaatagcgagagctgcatatttgattaaaat

SEQ ID NO: 213762 - DNA, 770 bp, Cannabis indica
cattcaatatttttaagcttatttagattcgattaaattatgtattagatgttaaatttcgttaaacattatgatctaattagtttcattcaacatttgaaccgatgttggattggatcaattttggatgtattttatgtgtacttattgtattagttcgagtttgtctaatgttttaaacacttattttttttttggatctaatcagatcagattcatctattgttttagatttttattggattggattggatccatccaatctaataaataaaaataagtaaatttaaaatctaactaattatttatccaaactaaataaaaatactaattaataatcagttgaatattggattgtattggatttttggacaacacatgacctaaacacggctcatttaataattgtattcaaaatatgaaacccaaacatggtccgttaataaaaggagttgacaaaacaggatccgtgtaacctgtttacaaatggattttatttaaacatatcaacttattaacattaatgatatatttaacacgtttatgacatatattcaacatatttatgatctattaaagtactgaaataattttaaataggttattaaaagtcacaacttcgtgctaaccgtatcaacttcaaacaagactctttattacccaaatccatctaagagaaatccaaatttattaatttttgtatgaatttcaaatcgtatattatcattcttgatttgttttacctaatctaattataattagattgtatc

SEQ ID NO: 213763 - DNA, 830 bp, Cannabis indica
aactgcacacgagtatatatacatataatatcaagatcatcaccccccaacaaagtagtacctttagtagctatatatatatatatatatatattagaagagcctaacagtttaaataattatattttcgaaaacattaatatatattccttttcatcaatttaatatttatcttcatctcttgtatatgtttctataaacttggacctattcatctagtaagtcaagtcgcattcctgtccccccaaaatccatattagaaaacggatataaatagttgaattcgattctcgctgtgatctgatcaccgtcctagctatagcttttgtaataataattgtgattgaagagagcgcagagatgagtgaaatggacaagtcaggggctacgtacgtactacttctaatgcaaattattaacttgtcattagatagtacacacgatattccacgtatcataaaatcaaacacaattattaattaattagcttcttgcatctaagtatcaagtatacacacacgtacatatatatatatatatacatatgtattgtagtaccaataaagtcgcatataaatatctagttcaaggacatgatgagatatcattgataaaaacaagaccaggaaaaaaatgtacacaaaattaattttagagagctatatatatgtgctgtagtttttaatttacatacatatatatatatatatacttcttctacgtacgtactatgtgacaataaatctcatgtaagctatataaatatataatattactaggtgattgttacgtacaaaaatcacgtagtataaatatataatattactagg

SEQ ID NO: 213764 - DNA, 668 bp, Cannabis indica
gctaaggtgaagatcaacgtggatcgtggaccaagacgaggcttgatgttgatggatcgagtttctccagggaaaggacaaaagactctgaatcgttgggtacccaagaaggtggctgagggagtgaaacgaggaaatgctgaaaatggtattatggctccagaaattttgaattcaggtgaaaggtctcctgctcaattgcctattttgaaggagttgactgtaggagaaaaggctggacatcctttggttttaaataatgagtcaaatgaggaaagaccattgggtaatgtggagggcttcaaggaagtggacactttgcccatttcaaaagctattgggccgtctgggccgtctgggccgaaaggaaatagctatagtagcaataatgctaagtttagtcaagctgggtttacttgtgggcagctgggtatgagccgtgtgggccctttggaggctattgttatttctgatgggccgaatgggcttccgtgtgatgggtccacttttaaaaattcgttggatcacggaaagaggcatggagatttggagagttggcccacggctattaatgaaaaaaatgagaatctagtggaaaacgtgggtaatgtgcaatatgggtctagtttgttggaaggtggtgatcgtggggtggcccacactgatat

SEQ ID NO: 213765 - DNA, 859 bp, Cannabis indica
ttattattatatggaaattttacaaaaatacttttttggggttatttttactgtcacatttttttctttaatatttttatggaataattacataagacaccattttttgtaaaatatttatatttttacgttcaaagattttttttttttacgtttttacgatttttcaaaaaataacacgaaaacaacataaaatcaacaaaaaaatacataaaagtatcattaaaataaaaacaaaaaatcaacaacaaatcaacaagattacaacataaaaaagatcgtattttatgtaaataaaataaaaaaatcgtaaaaatgtttaaaattctgtgaaactatatttttgtaatttttttgttgtttttatgtatttctgaaataatccctatttttattgtaccaagttttcaaaaatactgtgtgaaagttttaaaattacaaaactgtcgtatttctgtaaaataaaaaaaaactccagagcaacttaataaacaacatgaaaacaactataaaacaacaaaaagataactacaaagcaacaaaaaaataacaaaacaaacctaattgcaatatacaaaacaatatcaactcctcaatataattttgtattaatttttttacttagttttgacaacttgattatttatcttttatactattacattattttttttatggaatttgttgttacaatttcataatttgatcaatttttttttttgagtcagtgacagttaaaatgataatttatttttaaaaagttaaataaataattaaaaaataaaatctaataattttaaaataaggtatataatataatgggtaataataacttagcttttttgtataattggcaaag

SEQ ID NO: 213766 - DNA, 582 bp, Cannabis indica
attttttttaagaaaattataatcagttttataaggtatcatgtgttatgaggttttttattgtagaactagttttgtttttaatttatttttcagtatttttaggaactgatttctcctttattttttaattgtaatcggtttgaattattgtgtgttacttgtttgtattcattatgttatataaccgattctattttagttgtaatcggttttgagttatttcatgttattagtttttattcattataacaatgttatagaaccggttctattttaattataactggtttaagttattttgtcttatttgtttttattcattatattgtagaaccgattatattttaattatattcggtttgagttattttgtgttatttatttttatccattatgttatttagaaaaaacactattagcaacactttttttatagtaaagaaaattagaaggcaacacttgtaaaagtgttgtctcctagactgttgccaaaaatattaagaaaaaacaacacttataaaagtgttaccataggttgctaatagaaaaatacatatactaacatttaaaaataccaat

SEQ ID NO: 213767 - DNA, 518 bp, Cannabis indica
gtgttttcttacacttactgtttctatttgctttcttgttgcccttttcacagaagtgatgccttctgtaaatgccctcattctggtgtgctttgtaactcacatcttcagtatgctgccggtgataacacatccttagagttagaggtaggtactatttgtgcagatcaatagataatcacagaagcaaaattttatacttgtcaatatcttattgcagaatcaattctaaattgtttttttttcttttatttcaactaatgttgttccccatctccctctctttggaagagaaaagaaaaacttctcatccccttcccttctggtctggttagtggatatcctgtccaatggaggagtcaaatcttatgttttgcagctttgtgagattattataacttttcttttaaaaaaatttaaactttatcttataatttgaaataaaatagttttcttcctttgaaatggtgatgaaagtatggctattgtatgaaatatagtagagatttagcctaaga

SEQ ID NO: 213768 - DNA, 519 bp, Cannabis indica
atttttcttccagataagtgtccatgtgtactacccttttattatccacatcataaattttatttttcattttaaatctaaaaacttatttaaaatcattttaaataaatgatatattaaaatgtaataaaaataaaaataaaacttattttttaaattaaaaaaaattaacaaaattataatacacataaacttcaaactcctccaaaacatggcgaggctgaggatggccatggattcggcattctgggatttggacgtggctacgcctcaagtccttgaaggctccgctaaggctgtaccaggtgagccattccccacggacgctactcgagcaagtggagctattagaatacagcaagtctccttcttgggaaatgggtttcctcttggcattatcccttcttactttcctacttcatctgtaataagccctttcccaactagtaagtaataagcccacacacacatactcactacactattgtttctcttctgttttctctagctttgtttggt

SEQ ID NO: 213769 - DNA, 605 bp, Cannabis indica
aataataataataataattagtgtatttatttttagatatgtagacatatgtatagatactatttatgtttaacataatttatttttttaataaataaattttaatgtattttttttttcttgaaggtattgtgattgttttttgaatggcaattactgtgggaatttttgcacatgtgatacgtgtaaaaataaaatagaaacccataatgaggtggagggggctctcaaaaaatttaaagctcgaaatccacatgcatttgattcaaaggttattatttactatactttaattatttgactctaaacatattttttattgaaagaatttctactttcttcattaactttatacttattaaaactcacttgtgtgtctttatttggataaaaaagcagaacaatagaggatgcaactgacaaaaaatcaaagtgcctacaaaattattgttcttgttatggggtaagcaaatatcaaatatttgtattgtttatattatgacataattcatattttaatgaaatataattccttttaatttcttctgattgattataatttaatttttgtttttttaatttgatttttaagatgggaaatggtt

SEQ ID NO: 213770 - DNA, 701 bp, Cannabis indica
tatgtgcctgtctcttcaaagcaaaaataaatatatttatatgtatccatctttaatatttgagctcatcagtaaagttgctattcaacttagaaataataatcaattatatcttttaccttttatacatactctaaaaacaatatatttacaataatgttctatttcatgtgatttggaatatatgacatgataaacatttcacactaccttaaatagatgttgagattgtaacaagggtagaaaaattgatatcagttgtagaagcataacatcaacttatttgtacacattagtggtaggtcaatagaaagataatacttccaaaaattaagaataatttgcaattttcatattaatgttttaaaattaataaaaaaattaattttaaaattaaatttttataaatagtaaaaactttagtatttatcaaaattgaggggaaaaataaaaattatttaaaaaattaaatacaaaaacaacaaataattgaagcttaattacgaaaacaaaggtaaaacacaaaatctttttgagtaaacaactacaagaagaaatattatcatcatatgacaaagaccatgtcacaagatccttttcttcatcagatatattaatgcttgctcctagttatcgatgaggtaatcgaaagtattgtatggggcaacaacataatgtccctctatcgccattactacatt

SEQ ID NO: 213771 - DNA, 1055 bp, Cannabis indica
ttttgtaaattttttttacaatttctgcatgtaacatttactagttctttttcctctcattgctttctctcaccattttttttctcaaaaatttctctctccttgttctctctaatcattttttcagtcttgagtttgaggttgaactttgagtctgagtccagacctagatatttatgtcgaggtctggagtatttttagagaatacttgttgaggtgtacagcgtagttagcaaaatatgaaagtgatattattaaagagaaatgaatgttattctaaaaattgtattgatgtcatacaataacaatgatgttatcttcttttttaaataaaaacttaaggttaataataaagttattcaatttataatagaaacaaataaaatatttataatattattttttaaaggtgttatactaatagagtatttttaaagtaaaagtaataatataaaagagagatataaaagactctcaatttaataaaaattcatgcatggttaacttttaaaaataaatatctcgtcatcattatcatcatgtataaacaaaacagagacaaaaaataatcataaaattaagtttcaaatgcatatcacatcgtccactagactcataactctcactaacaatcttagaaaacgacatcttaaaccgggtagtcgtgaaccactaaatattggggctcaaattcaattcattttttgtacatattttaggtcttacacttacaggtgagtgcacactagatacctatgatgacattaagactaggtcatgaaaatataatatgcacaaaacatgataaatatgactctcatcagtaaagctatatatagacaccaaaaatagcaaaagtacatattctttttattttaaaaaattcgaaagcataatgactagtgtaatttgataaaaccctaaaatcataacgtgtacagataattgtacaaaaatatatttgacactcagtgcctctagaaaaatctagattacatgcagattaacttttctatttttcgatcaaatattttataaattaataaaattagaat

SEQ ID NO: 213772 - DNA, 860 bp, Cannabis indica
aaaactctaagttggagcgagaagccacagcagccagagctgcacagggaactgttcctcaaactcaactcggtccatctataaggagacccagaggaagacctcgaggttccaagactaagagacaggagaataaccaaggaaatcccagaaatgctcaggaagaataacccggggatgcaagggatgtcccaatggataaaaaaaatcaacccaacctaagtaatacaagaaatcaggaacatcgacgcgatgctccagaaacttccaatagatttgcgaactaagggaatgaatgaactgatatacctgagtcatctcgcatgaatgtagaggcaagacaaccacaactagggaactaagaaaatcctcgtaatgatggaagaaatcttgaaaactaacctaggtccggtggccgacccctaattcatccacaaacgccttcttgcacggatagagaaaatatgcacacttacttgaataagggatatatgtctaatatcttttgaagaggaagaccaatgcgagatgagatgcgtgaagcaattttgagtacaggagaatcacagtcctacaggcatagtaggttgactggaacaaatggataaacgtaagatgggagcagatctcgatgttattttactgaccaagaaagtataagtaactcgcatagttactagtctaaaagttacttaggactaggtccgtgagtaattgtgagcaaaggcatcgcaagcctaatctcggcgagcgattaaattgaaggcaactagaccttcacaagcacttgaatcgaaatgcacttgatttgcataatcaacttaatcaaaatgcaaatcaatagcatgtggatcccattt

SEQ ID NO: 213773 - DNA, 1065 bp, Cannabis indica
attcaattcagagtcaatttcccattttatcaataaccctggtggcccttctgaaaaaggcatctagaaactcttggaccacaagattgtgtctcagttccaccgatgtttccttgtaatatttgccacactaactgaaaggttggtacatccatcccataataaatcttctgccttaaatgccgtgattattttgggacccttgaacctcccaagaacacaaatagatcctcaccttttgattcaagaattgccacctttctttcacactcaatatttacactacactttacaagtcaatccaatccccaacattaccttaaattttcctactaaaactcataactggtgggtttgtaatcttttccattgagtttattagggttaacaccctttacccgatccaacattgaacatttactttcatggatctctctttatattgtttcatttgtaatctagtccttgcaccctcacaataagggttagctcgaccacctgcgcataaagacagacaactcctagttgtttagtcattacatccacattccaagtgatatactctttccaccttaaattaaatttagctttcctagcaatcttaccagccatttcatcaaaggcaaaactttgcccatcagtccagcttaatgtcattctccatcactgcactgccgggatcaactatacaagttcttcaaccttcccacttagatattctcttacttcatagtgtgaatttactcccagtcttgtggtagtggaagattcatactcacactgccaactctgagcctggtaagctcgcaattatccttactatatcgcctcaggtacaccttttagtacactcgcgaccgttcctttttgtggttaaaatctttcccactagaattaatgctaataagtatactgcacatgcataaacatatttaacaattttatatcaaaatacatcatgcttctatagtaactcacacattttgagtataaagtcaagcaattcaaaaaattgacaatagtctgtaaatcaactaatatttagtcacttactaagtctatgag

SEQ ID NO: 213774 - DNA, 771 bp, Cannabis indica
atatattgtgtttcatgtgtagcttattggtttgagttgtaatctctctcttcatctctattctctattttattgtgtatattttatttagtgttgtaacattatttaattcgtgattttgtcctttgtattatttgtcattgaattgtaatcttgttggtttgatatttctattgaagcacaacaattttccaacacattaaatgcaacacaagtgttgcttacacgtcaagtataagcttaacttctatcaatcaatccatcatttccttctctttttttcttcttttttcttttcattttcaattttgtttcagttttgatttttaaaaatcaaattctccataactgaactcgtcccccccccccctccccccaacaatcaaaacccattttcctctactttcttttctgctaatttttttccaaacttctattaaccgatttccataaccgtttgcactctgtttttattgctgtgaatctatatataatcatggctattacttgttcttcatccaccttttcaccattgccaaaaaaaattcaaaaataggtgttaaatctgtagctaataggtccaaaggaaaacgaccagttggagaagatgatgactccgactttactcatcctgtattgaaacacgaccgtggacctgtgaagaaaaaagctaaagtttctgctcctcagaaaatttccccaacttctgacaataagaaggagcaggttgagatgatcatgggttggaggtttgttttctattttttttta

SEQ ID NO: 213775 - DNA, 810 bp, Cannabis indica
gtttgtttggtttgtttggttggtattgctacttgagtcttctactgtaccatttgattagtttttaaagatcttaaagaagaatacgagtggaaaaagacagaggtgtgagcttatttaagggtaaaagccatcgaatttaagtgaaacacgggtgtatttgagtgacaactttttttgagtgaagcccgtgagggagtgtggtgtggtatttctatatctgttctaactttatttttgcagaattcaatcatgtcagaaaatctagaagaaaatataggcaatgaaactacaccacctacggttccaaatctacaaattcaagttttaatgggagatatgaggatgatgatgagagaggagtgtgaaaaaatacatgaagtagatggggaaggggtagtttctaatgaagagtttgataggacgtcagcaggtaaccataggacgtatggtcgagatatagaagctaggaagcagctacataactatttaggaaatataaagatgaaaattcttgccttttaggggaagagtgaacctgaagcataccttggtgggagaagtgttggaaatttattttaccaggatcttagatctactcacaagtatgtttattaacaccctaaatatgaactttctaaaacgatgaaataaacacatataaagtttaggaaaccttacattgggtgcagcggaataatatgactccttccgttcagatatctagcccttgattcctttctgtagcagagcattatcaatatctgaacctagatctctttctctgaatctttgatgttgaaacctcct

SEQ ID NO: 213776 - DNA, 633 bp, Cannabis indica
atatatttttattatttaagggtatatttttttttatcagatgatgaaatttaagctttgatatggatgtgtaaatgaaaaatataatatatatatatatatttatatatatatatatatatatattatttgtatcatttgaatcacttgccttgtttatttttccaagaaacaatccatatttataattaatatattatatctttgaaagacttattttatagtttgattgatattggagtggattaaatatagccagaactaaattcatgtgcagaacaatcaattggtcaaaatgtttatactgtcgtaacaaaatatagatattagtttctgaacaattaagaccaaattcacaatgaaaaatataatctgaaggctttcgaattttggataaatatgaaggaaagtgtttttttttttaacatacttgaatcagagattcataattcttcaatttcatttacgtacatacatacatgactttccttttcccataatgacattaaaaaaaaaaagaaaaaaaagaaactactgacagcagctatacatcaccaattcaggtttgttatatgaacatgagctagaattgaaacccttggagaccaattctttgattgtttcttttttgga

SEQ ID NO: 213777 - DNA, 826 bp, Cannabis indica
tttctttggtggtgatagggacattccttgcgccaaaaacgggttgcgatatcacttcggggtacttgcactctcttagggttaccagggacattcgccacaagaactgggcaactgccgggtttaggtatctaatgaagttaatttttagattccgaaataagcatacgaagaatgtgtctggttgcaccttattcgtccaggtacattgattttgttatctttcatttatgtgaatgtgtttattaagtttataatataatattctcatttattagttgaatgtattactaatacattgtttgtttgtcacagttggtgtagtaaacaatgtatatccgcttacaaatttggatatgttgaccgaacagtgctccccgttgatttttggggtagtaaacaatgtaaatctgcttacaaatttgtgaaagacaacgggggtcccaacagcgacaaggtacatcgaattttggttataatgtggtaatgtgattttagttgatattaattattttgggattgaaaaattaaatttgtttactttgttatgtttaatagataacgctcacttcgaatcccgtaatactgcccaactactacttcgactcggaaggaagaaagagcagtgaccactttgtcagctctatcaatgagttgaaggagtacttctccaatgagttaaagtctcagttgagatcattttctttaaaatttgtggacaaaggagaaggtgtaggtggtattgaccgagagttggaggaggatgctgctggggaagtggggaagaaggcggagtgcaaccaggtcgtggaggagtccccgttga

SEQ ID NO: 213778 - DNA, 679 bp, Cannabis indica
agtggagtgtgtggagcatctagttggttgactgtgtacaacagaatgtgtggtggatcttggtagttgactttgtacattagaacgtgttgtgcgtccaattggttgactctgtaaaatagagtgtgtggcgcgttcaggcagttgattctgtatgtagaacgagtggtgcgacgtccaggtgtcataacattaatagtctgatcaatttgtgggttatgtgcgtagaacgagtggtgcgacgtccaggtgccatggaaacaattcttcatataacaaaacaatataaaagatattaagagtattgtggactatgaacattaagaagatagccccatcatggaatattaagatttatataacaatattaagattcatataacaatttaaaatattaagatttattaagataacaaactagtaacatatatttgataaaactaactatgaattaagattctccactattatcaaattccatttcaagtatgtcatcatcacttgaacaaaataactcatcatcacttgacaaaactacgtcattattgaagaagatagtcccatcatcaaaatcttcatcatgttgatcctccatggattgattatggttttttatattcagctcactaaccagttcatctgcaagagctaatggagcaacatcttgtcgaactaaaga

SEQ ID NO: 213779 - DNA, 261 bp, Cannabis indica
cttcttcttcttcttctatatatatattttttctaccatttatttatttatatattttttacaataaagtttatttctttaccatatatgatacattcttacacaatcacacattttgttatttttgatatattattttccattactttctctcctcccaaatactcttacaataaatttgacatgcatacaaaaaatcacacttttttttttatatattttccattacaattttcactccaaccaaacactctttttttt

SEQ ID NO: 213780 - DNA, 1047 bp, Cannabis indica
atagtataggttgaagagaagctttgaacaagcgtgggtctttgggagaagacttttccaagtcttattttgggagaaagtgagcatatgtcttcgggagaagatttgtttaagccttactttgagaggaaataagcatacatcaatagctgaagggagttcactacttggtatgttttagagatcaaattagtaaggtggattacaaagggttgtggcaaatcactagagtgaaattgcttttgtaatctttgataatactaattgatttcattctctgagcgtggctctgttgactaatactatgtaagtttttaaattatgtactatttatttttggtttgtttttccaaaattgtgttctgcagtaacactattacattctgctacagactgatacaatagtatttttactaaaatttagtataattattggcatttgtaaaaacacgatttttcaagatggaacaacctcagccaaactctattctactaactcattccacatcctaacaagaagaaatcttgttatttcatctgggtttcgtggggcttcagctaatgaattgaactgaccaaatctagcaagaagttaaagatgactaaacataataaataaaaacacatttttataagtcgttcgtgttatgatatactttctccattaaagtggcagttataactaacaatatcagaacctaatagagaattagtggttcacatatatactatatatatatatttagtcaactcgtgtcatttgttaggaaaagaaggtaggaattacgagtatcattcaatctatgacctaaaaaaagaaggtatatatataaagtaaattataattaatatttataatttacaccccgaaaagcaaaccaggctaaaagcatgatcatgcaataatttcatctatggtatattctgccatgttttaattgaaaaaacgagaatgatagcaatattttaaattaagattgtggtcctaataaagtataaatcatgttattaattattgattattttttcatttatttcttgatgaac

SEQ ID NO: 213781 - DNA, 680 bp, Cannabis indica
gatctgaccatgtcctccgctaattgagataaaatctgaaccatactggctacctgcccgggaccatttctactcagggcatcggccactacattggtcttcccagggtggtaaaggatctcacagtcgtaatccttaactaactccaaccaacgcatctgtctcatattcaaatatttctaagtaatgaaatatttgagacttttatggtcagtataaattttacttctctctccgtagagataatgccgccaaattttcaatgcaaatactaccgcggcaagttctaggtcatgagtcggatactgctgctcataatctttcaactgacgagaggcataggcgataacccgatcagcctgcatcagaacacaccccagaccctgtctggatgcatcacaatacaccacgaacttctctctgtcagaaggcaaaagctaacactggagatgtgattaacctttgttttagctcttgaaaacttgcttcacacttatctgtccatacaaaacgctgattcttcttagtaagctcggttaagggtgttgaaattttaggggacccttctacaaaccgacgataataaccagccagacccaagaaacttctaacttctgttactggttttggtctcggccaattcctaacggattctatttttctggatccaccttgatccc

SEQ ID NO: 213782 - DNA, 707 bp, Cannabis indica
tattttcctattatttttatgtactttgcttattattttggtgttatatttataaaaaaaccataaaaatataaaaaaaaaatttaaaaaaatgtattatgcaattatctctttcaaataattgttaatagagagaataggtagaaaataataaaagatttgtttttaattgtattacaaataatttcgtatacaactattatatatataaataaatttgttaaacaaaaaatatattattttattttattagagtaaccttaatgaaaaccaaaaagaaaaaaaaaagtaaagctttttgtgaaatcgattacattaccattaaagtcgattatcccatttgtataaaataaaactataaataattaaatactatgacttatatgagaaactttcacaagatattgataaaaataatgataagggtttcctatatgctatattttattatggtcaaaagatttttttatatcactttatgaaatggggtcagtcgaatttatcaaatttctagctggaaaggtgaatttgttcttttttattattttatgaaacttactataattaaagaaataaatatattacaaagaaaaggtgtttcttttgagttaagaaagatttgcctaattagcatagcatattagcacaaagaagcatttcatgaagttcatatatatttaaattttatctatttaaaaatgtagatt

SEQ ID NO: 213783 - DNA, 698 bp, Cannabis indica
gataatcgcaacgcgacatgtcgaagagatgctaggcattgctggtgttctatagcaatgctacaatactataggatatgtgacaatattagggattatagtaccttgtatttttattattacacataaatatataagtttaagttttggtttaatttcttacaataataatatttaaattatatttttgaaacttttgtaggtatgtcaatggttatgtggcaatctctatgttattaaatttttatttaaaaatcaatttaaatacaccgataagaaagtgaacatgggtaatgacttgacatttattagcgaggtatttaaaatataatttaagtattattgttattaaaaaataaacttaagtatttatctgcaactgggagttacacttaagtatttacgcttcaaataactctatttttaattatatcattgtatttcgaaattgtaaataaaattatatttttataatatatcctagttttagagattttgttttaaattttttttttttcagtatttttgatactcaagggtttagggtaactagagataaataaggttgaattgaactatatatatatatgagaacagctataaatacgtgcgtgcaatgccagtttgggccatattttgaaaagccatcaataatatgggtcgtgccttgccggctcataaaagtatatgaattgtgt

SEQ ID NO: 213784 - DNA, 772 bp, Cannabis indica
ccttttgtccatttctttaaattaatattttttttattaattttataacatgtgtttgttattttattttagtgtttcagataatccagatctttgttcctcactttcatgtcgaaagaagaacaaaaaatatatagttcctatcgtagcatcagttcccactctatttgtcctcttacttgctttctttatcatatggaaagttatcaaaggaagaaaaagaggtatataaaaactactatatatatatatttattaaatataaaaatttactaattatcatcactatatcaattacttatattaatgaagctcaattattatgataacaggaacatagtatagggatcaagcaagacacacaatattgttcccaagtcaattggacaattctaaattggcgacctttttcgaagacaactatttgattttataatgtataatattcttcttgctatttcatagatggcttgcttcaacaaccacaaaactcacaattttaattatattcttaccatttgtgtgattatgtttttgtgttatttaattaaacttggatttcaactttacaaatatttttaaaaatttatatacatttaattttatttttttgttaagtaaagactttattgaaaaaacagaaaactagtaaccacataacaaaccagagttcatagtcttggtaactctagccaaggagctagagagtccgcaataacattttcagtcctaggaacaaacacaacctggacatccgagaaggacttacaaa

SEQ ID NO: 213785 - DNA, 722 bp, Cannabis indica
cagatccggtggggagtatttgctaggagatcttgtcttactcacagatcgcgtcctactcatagactctgtctttgagtggctcacagatttactagttcccataattactcgatcattagctcgttgagtactttctcctcttcaagttgatcgactatgggttctggatcgcctcgaagtcacacatgcttcttcacgctctgttctttcctcccgagagcggtttgctgtatttcccccattagggtctgtacgagtcctcgctttatgggtttgggaagaacgttggtgacttgtagtaagtgatttccgttctcccgattgaatcccaagatcctcctcattttcatgagggatttttcgttcatcagtttccagttgtctcccatctagctactcgtcctgatttttagggggtgtctcattctccctaggttgttcttcccgggtcttttcctgtctcctggttcttgagccacgaggtctaccttgttgtcttctcactgcaagttaaggttgattttgagtattcgtcccctgtgccgccttggccgaggctacctcacgctctaactcagtgtttcgatgctgcgcctctttcagacggcgtctcaggcggtggctttttatttcataagttccttctcccatagattggcacctctacgattgagctcttcatccctcgaccaggggttctgaacattcccacgcagagc

SEQ ID NO: 213786 - DNA, 548 bp, Cannabis indica
actagtgttggtaatgttgtgtcctacccctaaacaatatatactgtaccaatgcactctgtaccgaaactgtactagtgttgatagtatacaaatcacataatacaacatgcatattgttatcccaatttttgtcctcttgacatgggattcttacatggacaaaattagtgccacaagacattacaactcaccaataagaaggccaattcagtacctaagcaaatagagaccccaacactcaaatgggcatccagtggcagactagctccctcactagagctggtcagccagccttgggactacatcatggccgaccagcctggcctccataggggcctggccgagtaggaggtgctctacagggtttcttgtgcacttctacacgtggatagcaactcataggctatgaagtgggccccaaaagcccaacaaaatggctcaataatatctggattcaagggctttttgtcttttgtaattttctaaaaaactacacaaatatctagggatttatactgtaaactatggttttaggcctcctatat

SEQ ID NO: 213787 - DNA, 534 bp, Cannabis indica
attggttttactattttctactttcattcttatgtctagtcagggtctatattgtattttactaaatgcaagtacctcattaacacgtgttattattgtgagtatcctcactttcactgaatattcattcattaagttttagttttttatttacaaaataattatcatctaattcacacttatctatctttctttttccaccagcttaattatctatgtcggattactttttaagggttcgttttattctcattttactaatttcaaataaattagatattgtaaaaaaaaaatatatgatattaattatgctaaagaaagcacaaaattattatcctaatatttgcagcccaaggtaagaatgtaataataaactattaagtaaataaaacacatgttaaaattagtctaattttttttattattattattttgaattgacacttaataatttatcgaatttaatcaatatcttgtttcgaagcctttgcaccactttacaaatattacattacccttctgataggattttac

SEQ ID NO: 213788 - DNA, 758 bp, Cannabis indica
ggcctcagagctatggtaatgatttactttcatgtaatatagatttaaaatgatgagtttgtttgtttgttgatttggatgtgttcatgttggtttatgtgttatttgatgaatgtatgtgaatcacgaaatttttccatgaaaataattttattttattctaaaaataatttatttggatttcttgtgaaaaattaagcaattttggtttttacagaactcgattccgctaaaaattgaaaaagttatggaggtttgaaaatcagattgaaggtgcatcgtgtgcaccaggcactcagacaagctcggccttacgcgcgcgtgcctaggataggagttgtctgaagacacgggaatgtgcctcgctcagacatgagaggctcctagttctttatgttgatgacatttaacttatgtagaaaggttatcagatgtaaagaagtggttagccgacaaagtccaaatgaaggggagaagtaagctatgttcttgggatcaaaatctatagagatagaaagcggaaaatattagcactttctcaagcatcttatatcgataaggtgctagaaagattctcaatggagaatgccaagaaaggacaattaccatcaagacatggaattactctatgtaaggaataatgtccaaagactcctcaagaggaggaggacatgtgaaagtacccttatgcatcagtagttgggagcttgatgtatgcaatgctgtgtacaaggactgacatatgctacattataggg

SEQ ID NO: 213789 - DNA, 928 bp, Cannabis indica
atgtcgtttttaggtccactcatttttaaatgacatttctagcatgatcattacgtcgttcatatataatacttgtattcatttttttttttttttgctaaaataaaaatttcatactaaagaaaaactaaaacaccaagttcatagtggagagtctggagaagacaagaggctccactttttcaatcaatgctatttctcggtgatcgttttactatgtaattttgtctcacttgtttcaaatatttttttgaacacagcgaggaaggagaaatagaaaaaaaaaaattaacttatctttaattttataaatattattaggctttaaactattttttatttaatttttaataaaaaaacaaccaaatgacttggattaatttagaactgacatactaatttggcacttaaagtattaaaaataagattgagtgtagaactacttctaattagaggtcattcttactattttttattgattaagattatgcatataataattttaaattataaaaaaaattattacaaatatttaataattaagtaaaaaaaaattaaattaaattactaaaagaatgtttaatgaattataaaagattaattaattattagtaatttgattttaaatataattaattttaattaaaatttataaagaaataaagtataaattattgtatctccaccatgtataataaatatatatatatatataggatattgttgagagcatgtttttttaataagaaatatatttaatcaattcatcagatactcatcaaagatttttcctcacgtttacttgcacaacgaggttacaatagaatgaaaaagttggtcctgagtggacattaaatttgtgtcttctcattataaaactatataaacatctttactttagacattgcttaggctaatatagaactat

SEQ ID NO: 213790 - DNA, 748 bp, Cannabis indica
aatttaaataaatataattagtttaaaaatctgtcacattataatttgtatataaatcttttatacatattttagatgcacatataaatatatcaacaacctaataaatatatcccaggagatataatatgatggagttagacggagggtgccatagcccaaattataaaatattaaataaaaataaataattattttttataattaattttacatatattgattccactaaatttttaatttttcctaccattttttttttttaaaatttaaggctggctctgtcatttccacccgatacatagaagaatatatatttaataatttattgttagatgtaaccctcctcacataataatgcaatgcaactatatatatataagctctaagctataatgtacacgtattatagtgattatatagtttctttcaaactatgcaatatcatgagtgtacaattgaattttatgatgaataatgtgtcgttgatcaatataaaacagtagtactattatactttcatcacaacaatattaatcttatctatatatgcataataatagttttctgaatcaacgcatgcaatcatcagtatatacataaaaagaaatcaatgactttccaagcttcatataaaaaaaaaatgttagtgggaatctcagcgtttcatccaaagagaagcctagaaaagattcccttatatataattcatctcttaataatattatatatatatatatatatatat

SEQ ID NO: 213791 - DNA, 538 bp, Cannabis indica
gtatataataaaatagaaactaattaaatattatttataataaataatatatcatacaattaaaataacaaaaataataattaaatacatatagtatgctaataaaatagcctacatatattaaaatatttgtattatgctaattaacaaaattatataccactattatacataacaaaataaaatctaaataatttctaagaataatacatatcgtataacaaaataaaaatattctatacaacaaaatctatataccaacaacccacaacaacttataaaaaaatttaaaaaatcgacataactttcaaataatttttttttaataaaactaatataaatataccataatcattaagtaatttgcttctaattctaaaagaaatatgaaaaaaaaaattattgatttttttagtgtggcaaaagacactactacaaaaaaagagtattcgtgacggttttaaaaaatactttttatggagaactgccgctaaaaaaaattatgtgagtgttcaaaaaccgttgggaaaaataggat

SEQ ID NO: 213792 - DNA, 872 bp, Cannabis indica
tttgatttggtttgttcctctccgctaaaattgagcatggagataaggaagctctctcattatagaatcttgagcttaacttgtaatacctctaaaaagcaagataagtatttaattgatgtaattaggggctggtagtttcgggttggggctgctgttgttctcttttgctggtttgttggctgttttgcctttgtttgtactgttggtttgctgcctgttttgaataaaattcctttttgttcaaaaaaaaaatcttataatttaatttaataaaatatatttcgaaaataacaaatttgaaaaaaatgatatggttagcaaatttttgaaatttaaattagattattttataaaaaataatattttaatatcaaaataagatcattcaaaattaataataaaataagtaatatctgatcttataatgaaaataaataaaataatctaaaatttcaaaattaaccataaggctattttttgtgaaaaatcaaattttctaaattcaaagcctactaatatctaaaactaattttaattaattaaaaaaaattaataaaaattaattttattctgacaattagatttttaattgaaaattcagattctacacaaaattctaccaaaatttgacttttgtttcaatgaaaaacgattttttaaatcaaaatatatgaagaaacaagtttgaggcacattgcatatccctgcgcgcggaatggagcgtctggccgagagacgaggctgcatgcagcctacttggccgagggagcttggcgtgacacggtttcagacaggccgtgtccgagtttcctcagtcaggctgtccgaaggcatgtggaaatgccggcgtcccttagatgcgcgcgcgt

SEQ ID NO: 213793 - DNA, 485 bp, Cannabis indica
gtaaccatcaatcaatgggtaatatccattgaaaagtgttcatatattttatatgtaacgaattgttagtttaacgtatttttttgactattttcttttttttttaaaaaaaaaaaaaactaaccaaggggttaacgtttgatgttagcatccgaaaaaataaaataaaattgataaaataaattcttcatggtgatattctcctccacattccataccgtcgatttcaaatgaaggatttgatttcaattgccacattcaaaatctcactattggctagttttagatgctatgcccacgatcagaataacaatttaggtttctaactgctacaattgctgaaaatcaaatccacaagttgatcaagatataactcatgggtcgattaagatagttctcctccactctcccattctctccaccattgggtacctctcctttctttctctagcatattgttaatgcatgtaaatctctctctctct

SEQ ID NO: 213794 - DNA, 895 bp, Cannabis indica
atttgaaattttaattaaatattaccgttaaataccaactgaatgaatattatgtactgcatagctgtgtatacatgaaagtaaaaaattttcgaagtctaatacagtaataaacattattggtatctaagagtgatatctcggtaacacctcaaatttataaaagaaaaataaatataaaagaattttaccactaaaaaaaataaatgtaaaaaattaaaacatagcaatacttcgcttcactcaaataacaaaacaaaaaaaaaccaataaaacttattccttgttttcattcgctaatgccatgtaagtaaacacaacaaatgtataaaacagatgagcattgtattagtctctaattttgttctttgacccaaaaaaaattataataacatgtttatgagtcactttcattatgatattattccaactgaagctcggataacctaaattttcatgaaataaattttctcaagtctacaaacactaatgtagttcgccaatacactaatcaatgtaattaatttttgaaaattttacatatgtccactctaaatgacaacatgaaatatcaaaaaatgttaggggctaataatgcctcttcacagtaatcaaaaatattaaaaaatattgttaggagacaacttatagtacttagtattaagccttattgttttataattggttaacaataatttataatatttatcaaagtaaacaaagtagaatttgatattaaattagatgaataattatattacattttcataatagtgtagtagactatgagtgcttttttaaacttttctaaaatattaaatgttggaatttgacagcctcgtgagattgctccctatggatggagagtggagtgacttctaagggttgttcttag

SEQ ID NO: 213795 - DNA, 650 bp, Cannabis indica
caaactaataaaataaatgaataaatttaatatataaaacaattggatttattattttattatgttatttactaacaaaaaaaaaagtatcattttattttgtttatctaactaggaataattttaatttaactaaattgtcatttctaaaaagttaattattttggatttacagatttttcagaagtatatttgtctatttttatttttaattaatataaaataaaataaattatgaaaatttatacactttcttttctcctttatttatgttggacaccactcatttctaatagggattatttcaaaaaaaaattataataataacaaaaaattacaaaaatatagttgtaccaaaaatatttttacaatttttaatattttatttacataaaatatagtattttgatgtacttttaggttgtactcatgttattttattgttgactttttataatttgcatactactttttatgttgttttgatgtaattttcttatatttatagaataccgtaaaaatataaaaagaaaaaaaactttaaaagtaaaagtgtaattttttttttaaaaaaattagtagttatttttcaattctaattttctaatattactaagtccgttatctatataggtaacaaatttcagatg

SEQ ID NO: 213796 - DNA, 561 bp, Cannabis indica
cccacaacccaactgggttccgtctggaatcgggtatatatttttatatatatatatatacacaccaatttgtattactgtgtttaataataataaaaatcttatctttcatttgttggatctttctttggtttaggctggaacttgggaggagaagaatcttaatagctgggcaacccaaagaataaaggtttctttttcttatatccttttccctattatacatatataattatatatatatatatatatataatactatggtgaaagtgaaatttgccaaacttatcatgtgaaatactaaagtttgtaaagtaaactcattttacaacagtgtaaatctatagtcgttttgcgatcacaataatgatcgtttatggtagcaatgtttaatttcatggtgtaattttgctaattgaaaatttgataaagcctatttttacaatggtggaatgaaatagtaaagaattgatttttatcccattgcttttttttggttgcattttaaagtttttgtattaaaatgattttacaattccaatgcaaagatgagctttttat

SEQ ID NO: 213797 - DNA, 592 bp, Cannabis indica
tcaagcataggggtaaaattgttaaaaactataaccccgctcaaatcggtattctattcatctaaaatatttatctcgctaagagaaaaggttctagacttacccatgtgactctatccatcgcattttccgtcgtcaccgagcaaaaatcagaaaaattgcataattcacatataacacaaataatacccctagagtttaattaaatctctggaattgagaaattataactctaatgctcatttctaaaaatggaactcacaatataataatttcatgcataattatcaaaatgccaataattaatgctaatttcctttactaatctatattctaatatgcggtcattacaattatcccctcgctaaaaggatttcatccccgaaatctaatctaaatagctttgcatatcgagttctcattttagactctaattatcaggtggcttcctccaccctgttgttcttccagagcatcctgaccaaggctatggtcttgcttccaaaaaaaagagaaaaaaaactttttctttcctatcgaggacctgaactggctgtttctcataagacaattctgattgtagttcaagggc

SEQ ID NO: 213798 - DNA, 668 bp, Cannabis indica
aaccctccaccaatcgacgagaaaaattaccacaagaacatacagaaaataaaccctatttctcagcttaatctactgggaaaaggtcgtataaactataggattgtgctaaaccaagcaatcaaaggcgaaaaatggtaaaatatagataaaagaaagagatattcatcaccagaatcaacacgctgaaagagagaagtttcgagggaagtttcgcaatcggcgcctctgaaatttgtggtccgttgaaatttctagagttttgtgctgccctttgtagctcaacaagagttggtgatagactcacccagcaaaatataaaaaatataggacacgtgtttgaaggtgatatgatgggcggaaattaatacttatttatttattttggacaaattaccaaaagacgtaaaagagaaatatttatttattattggttttcagaatataaataatggaatttttttatttttacacttttaaaataatttttttttttgtattttttacgaaattttatattagaaaattttattacaattatcactacaacttaaatagaaaattatattgcaactagctgtaacacttttaaaaacccaaaattgtaaaatttgaaaaaaaaaaattaaaaaaaattaagtataatgaaataatcctaaaaacaataa

SEQ ID NO: 213799 - DNA, 547 bp, Cannabis indica
aacttttaccaacacaaaatgtgctggcaaaggtctttattttattattcattaatgtaaaaatggtgaagagtatttcattccactaattaattattatcatttcctacttcacctattttataataaaattcaacagaatataattaaaaaattacgttattataaaagtgacattttgaaaaatattatttacaagtcatatatcggcacattattaagagggcaaaaatgctgcaagtcatgtaccaacttataatttatttatgtattatgtagtttaattttgaaatattataatagtaatgaatatatttatgttggtgttaaaataaaatatttttaatttgttatattaattaaaatttatacaatttattattttaattttaatttgtttaattactatctttaattttttttttatttttctaaaaagtaaatatattaatgtttctcaacttcgtaaacatcaaaggagggtatatgctgctattaattattgttaatcattgatagcgaccagtcaaaattttaaaaattagtg

SEQ ID NO: 213800 - DNA, 956 bp, Cannabis indica
agctgctagccatgaccgatcctagaaatatagtgggttataacgaaaaaaataaagaaattacttcatatactatatttaattccttttttttttattttaacggttttggttgctccgatagtatttacgtggattgctatgtggatttaggtttctgttagttgctaatgtgcgtggattttcgtaaaattgtaaaaagaaaaaaaaaactatttaaaagtgtaaaaaaatatatatatttttgaatccttatttagaaaaatatagtatttttcaaaatcaataaaaaaaatgtataattttaaaataataaattttatttttggacccttaaacgaaagggataagttgaaaaatatctcttttttatatctattaatcaaaaataccctcatgttgttttttattaaaatatacccatttttttgagtagattgtccaatataccctcactctctacttaagtttagcatataatttacataatttaaagggtctaatggggacatcatcgataaaagtgggtatatttaaaaatatatgaaaatagaggtaaaaattaaaacaagttaaataaagtgtgtatacaatgtaatttcctctaaacgaaatgggccctaagcacaggcctagcccgcctatactagagttgggcctgccaccagtgttgaagcttcaaattgtgtcaattttttttggtgctttatatttttatcaaaatagtcatgtaataatatgtattttctatataatttttatttgatatttatattttaaatttaaattaaatcaataaaatttaaatgagagtagtttagtcaaattaatacaaacttattaattaatgtaattttgagtttagagtgccgaaatatatataaaattaaaaaaaatacaaaatatgaagtaagtattattaaaaattacaaaacataccaatttttttttttttt

SEQ ID NO: 213801 - DNA, 530 bp, Cannabis indica
catttcctttactcatacttctaccactattcatcaaagctttcacaaaaaacttcatttgaaagcacacccaacttcttctgcacttcatattcgtttggaacgtagtattaggtcgtattatattgtattatattatattgaattggattatataatactatgttaaactttaatttatactaaaatattatatatttaggtgtccataaaagtttataccacgtataattttaaataaaaatattgcataaaatataatacaatacaatacaatacgacctaatacgtcgttccaaactagcacttaatctactaagaagaaaaagaaccatttttttccaaccaaatgcattctcagaaatttgataaactgtattttcgataacaaagatgtgatttcaaaaccactttttttttaaaaaagaaaataaataattaattaaaaatacatgtacactggtctcttcaacaagcccgtgagttcggccaaactgccaccacaatcaagcaataatccaaaacatacc

SEQ ID NO: 213802 - DNA, 1014 bp, Cannabis indica
attagtatagacattttatttcacattttgtatggcctattgaccttttacttttgaaaactacttactttcagctttaggtctttcatgttcgtacttttggcctaaatgcactctgttttttaacattactaatgtatgtccctgaaagtttttattatggatatgtgaccgaacaagaagtctttaatcctagctatcttcttatttccttaacatgtaagtatctagatttacttttttttattccaagctgaagtatgcctgtacctgacttaaaggaaggtttagtagcttatactaagcattcaaatttccttgcatatgttttttgtgctagtttgatgcattgtatggtgtggatgcccccaagtgagcacacagactcatggtctcttggtcacttgcaattcaccaagtttcatagaccttgcatgggaatttgcttggggtgctacctgttgtacgcatgtggaacttaaaaaagcataactgtaagaagttaatcttgttagcaagtggtttagacacaacatatttgggcataaatattgttttttattcattaattggtctttgttgttgtgaaacttacataattgaatgtacatgcctacataataaaaagtctgcttctagatatcaaatgactacccttgcttaacatgcaaagcagaggccatcgttgaagaatgatggaaggccacgcctaaaggcaatgggtactagctcttttcgctctaatgatgagttggtagaactactactgcaaagtagcattttgtaagatggttattgatagtacttgcaaaggtgctctccattccagtatcttggtaagagaacaagctccatgttctcgttgtaccttcctaggttgtaggttcccttatgtcttatctttgtaacttggtaggggacttcccaattgggtttaaacactctttctattagatctttggtgtttaggaacactctttagagaaccagctctcctatgaagaatttcatgtc

SEQ ID NO: 213803 - DNA, 844 bp, Cannabis indica
ttttttttaaaaaaatttatgttaattaatttgaatttctcctttaaattttaacatatactaaatcgtactatgtgaacttttcaggtagttaaaatttttttttgagctattaagattgttgaatttaatgatttttgtttaattttattaaactaagtcagacttgataaaatttaagggatacaattttgtagttttaaaagtttatggggcatgatttaatagacatcaaacttcggggggcagaatttagtacacggacaattgttatattactaaaattgaatgaaattggatagaagtccttaaatctaatgatttcaacaatataaggggaatttttaacgacttgaaaaattcagggggcatgatttagtacatgttaaatgcaccatccttttgttgtggtggagagcgattctgcgattgtgatcaagaacctgaaaggagctgtgtcgttttggagaattgagaactacacaagacaatgcaagcaactctctacctttttcactagttgtaatttttctttcatttctaggaattgtaactttatggcccataatgtggccaattgggcttttgcaaacaatatttatggtatggtagaggtgtctactattccgaatgccatcttttgtaatgaccgcgagatctaattgccttttttataatatatttcacgctttgtttcaaaaaaaaaaaaaaattcaagggggaaaaaatcttaattaaccattatatatttgtaatttttttttatcatttttgaatatttgtaaaaatatcccttgaattattttagaataatactaatcgctcaattttttttttttttttt

SEQ ID NO: 213804 - DNA, 752 bp, Cannabis indica
ctaaatgactaattctatagttttttataaactattttaatccaattttaataatctaattcggcaaaaaaaaatgcaattgtaagaattatatgttgattaacatataaaactaattcatcttatatttaaagatttataaatatattaataatattttaaagaaaaacatagtaacttaaaattaatacatatgtacatatgtttaaaaatttaatatatcaaatatatattaatttgttcatgcaatttttttctaatttgttattttttgtttaccaatttaatttgttgtcaaataaataaaataataataactttttattttgttgttggttatgtaaaaataatttaaattttaataaatattaaaaaagtaacaaattcagaataattgatccaatctacactattgaggattagattggatttgagctcttgtacgaattagattggatccaaaatataaaattggcagttagtgcaaatcgaatgtattatgaacaaaacagtacaaattgaattaaatgaacactcctaaacgtaaaagagaaatttcaaactttacaaacaatactgagaaagtaaaagaaagagataggatttagacaaaaaaaaaaaaaagagaagagacagaagagtgaaagtaggggtggaaattcttggtattgggtcatgttcgtgtcgtgttgaaggttatgtattacaagtaaatgttaaactcaaacttgatctatttattagtcgtgttg

SEQ ID NO: 213805 - DNA, 806 bp, Cannabis indica
tacataattgtggggttattattattcttctatattgatgagtggtcctgattttattactaataattaggatttttttcccgaactttaatatgtaccaaatcatgccccatgaacatctttgatcgttaaaaattctctctaaactgtgataccactctgtttgccaaagttgtctcactaaactccaacacctcaatctcatttacttcccattcatccttcgcttgcataagtgaattattagtcatttgtattatgttatccattgtcgttccaggatccatcaaagctaaaaattctaaggattaaaatctcaatcatatctcaaagagtcccaaggaccattataaaactgcctcaaagcgcttttcatatttttatatataatatggtccatactctgtaattgacaaagaaatatttaaaatctttcataatttgtttctctttataatttttaaattcttatgtttgtctttaggatccgaacagctgaggatgttatatggcatggatcataactatatgaaaataaagttatttatatatatatatatatatatactagtatattgttacgtgctatgcacgtatgctatgttttatattaagtattatattatgagttcggaaggaaataaatgaatcaaaaataaataatatttaatttagagagtatttgaataataaatttaaattaaacttttatgtccagtataatggagtttaaattaaactacaaatgttagtaaaaacatattaggaaacaataataataaagttataatatatatatatatata

SEQ ID NO: 213806 - DNA, 920 bp, Cannabis indica
agttagagttcgtacgtttctatctcgcagaaggctattcagtcatctgagttataaacatactctgtaaattatgtttctaacgagttgttccatgttaagtgtactttcgtttgcgtgtttgagttcttcattcttcctaggtcgacatgtgtcttcctcttatgtgctcacaaaaatttgggtataacaaatgtcgtgacatttctgaccactccatccagtttccacggtcgtcgggcccaaaaatattttatttctaaaatggtatccacgatatccacatattctaatattatctccgtaattaataaattaagctttatttaatcatttgataaattcacactaattaatctaagtaaaattataatcttacttcattaccaaaataattacatatttaagaaaatatgtccaattaaatattatattattttctagtatattacatgaccggtggcactatctttcataaggattggggtaaaactcaccactgcgacacctaatcttgtcctacactggcaagacatcttcccttctcccatcatctatgggcaagccatgtcgtatgcccattcgagcaaaatttaatcatcaatgggatgatacggtggccttgttttagacatagttggtccccctggtcgtgaggtttgcctatgatccataggacgctgatttccctgtgggaaatagggactttcttccctcgaaggggatcccttatgaggggtggcttttccacttgagatttaacccactcgttgaacagtctgatcaggttgttagcctccttattctagtcagttttgctatgcttgatgggcttgaggatcccagcttgttgatccatctctcttggaatttgtgtctttgctgggcaaaaacattaccgaaagcagtgtgtgtttctg

SEQ ID NO: 213807 - DNA, 591 bp, Cannabis indica
ccaaacctcatttctgccccgacaaaagccctagttattttaaaactttctgtttggacccacaaccggcggtccatctggtttcctttttcggtcattagggctaaagcttttactcactccagtaatagatgaggtcttccacacgtccttcctctgagtactctttttacgaatcaggctttcagccccctcagtagtgagagctaagtccacaatctgaggattaagtcttcacaaccccttattgtttggttgccataatcacatctctagcaatatactcttcaagacctttgatgaacttagcttttcttgagcatcattggccacttcatccgaagcaaacttggccagcctgtcaaacttggtaggatatttagtcacagtcatgctaccctgaactaatcgtgcaaactcttcagcttgagcggcacgaatggactcattataagatttctcataaaacagtcccctgaatgcatcacatgtcatattattcaaattatgaccttgggaaataatctcccatcatatccgggcatcatcgcgtaacatataaatagctcatcgtacccggtcattatcttc

SEQ ID NO: 213808 - DNA, 800 bp, Cannabis indica
acggtctttgacttaagtcaatgaatattaaatataattaacaaaaaattattttaaccaatgttctggtaatatgtttcatttttataaaagctaattaggatttttgttcgctgaactttgacatgtatcaaattttgtttcttgaacttttctagtcgtttaaaaattcctcttgaactattgagattgccaaaattaaaaaactttaaaccaatttcatttaattttactaattcggtgattgtctatgtactaaattctgctctccagactttaatatctaccaaattacgcccatcaaattttgacatgtacctaattacgctttctaaattttcatttatgttggacatcctttactaaaatttgataaaagtatttaataatttcaatagttcagggagaatttttgacagtcttaaaaatttggtatatgtcaaaattcggacggagaaatcctaattagttttttataaatgtgaacaatatataatcttaaggcataataaatcaaatagtagctttatttttttttatctcggaatgatttttaaaattataataataaatggatcaaattaattattaattttcttaaaaaataaaaatatatattataaattgtgagtggatcaaaaacagatcaaagactttaatttttttttatctccacaaaagacttattgtatttttcttattaagttattattaaagagatcaatgactttaagactaagtttgggtttaattcaaatctaatctgattggtagaagtctaagtttggttgataatcact

SEQ ID NO: 213809 - DNA, 563 bp, Cannabis indica
gtggtctctcggcaaggttattaatacacctgaggtcatgcgtgtatatattgggttagcctttctttatatatttatctttcaatacaattaatttttcgcgttcaaaggaataacaagaattgagcaattaagacgaacatctagaaattttctgtgtttagccctttcttttgggagcatatttgtataattctttgttgtgtcttgagcaagttaattttccctaattttagtgctaataatttggatactgtaacagctcattcaatgacaaaccagtaaatgaagctgcaactggtccacttgggaaagagtcttttgaaagggagcaggaggatcttcttgctgatctaaaagatattccaaagaaggcttgtgatcgtcgtgtaagttgaatttcttgttttcgtgtcttttgaatagctcggtcatacagttcaacatggcactgtttctggcctagtaaacttattagttgctgatttggattattatcactattttccttttttatagatcaatgaatttgtgaaacgcgccagagctgctaagatacacgc

SEQ ID NO: 213810 - DNA, 1159 bp, Cannabis indica
ttagggttaaaacgttgtttattaatagatttagggtctctgatttgtgagttttgaattagatttaaagttagatttactatctgtgatgtaaaagatggatctacaaagaagacaaaggtctaatataaggctcgatgttgggcccgatagtcagtccgattgtctatccatttgagttaggcccgatgggactgatggtccgatatagggccagatgttgggccaaatggtaggcctgatgtattttctccattttattttttaggtgagggcctgataggcacgataaagggcttgatagggcctgatagatggcccgatggtcttgttgaattttaaattttttgttatgacccgatatggggcccgatatagggcctgattgtccttttaaattttatttttttattagggcccgatgtaggtccgatggtaattatccttcataatttttgatcagggtctgataggcccgacatacgacctgatagtgggccaaatgtccatattgaatatttatttttttgctatggcccaataggtccgatacatggaccgattatagtccgatgcttatgcacaaatttcttgacagctattttttttgtgtttttttgcagtctcacactgaagcctctaacttctaccactttgtagtagcttggagagtttaatttacaactaaaaaaaaattagtttgaattgttagagaggaggagagaaaatgaagttgagagaaagagagtgaagagagaagagtgggacgggttagggatgtgtgtataaggggcattttgggtactaaaacatttttatacccattttttcaatagtgataagtattagttcagggaattaatttaggactaatgtaagcataataatcaaatttcccaaccaaaattatatattagatagaccaagaaaactcacaacttgttaagaaccgtgaacagaattataaaggcgtgcaaagagttacatggtttcacctatattttacaatccaagaggtctcttattataacatgtagtctaggactttggcgcattactgaggtgtttccaagtctggtcttcggtctgtacttctctttctgaatcatttggaaatgcatctggataggtagccaagatcctcgacttcatgctcctg

SEQ ID NO: 213811 - DNA, 567 bp, Cannabis indica
ttaaaattttatttaatatttttaagcagtaaagtaaaatacattaatcaaataatccaataattaataagactcataagagattaattatcaacatgtattgactagaaaatattttatatcatttcaatatctaaaataaatgattaaattgatggtagagtatatttaaagataatcagtggttaacaatgtgaatagtgttaaacaaagaaataaaaaaaataaaactatatgaaatggttgaaagatgataatatataggtaaattaataataagaaacacctaatttatatatgtattttttttataactattttatttatttagtatgatagactcataattatatttattttctttttttattgaatatacaataatatagaataagtctatgactatagtacgctttttttatggagtgtttcagtaaattttctatctgttttggtatacaaaagaacttttcaatataatttctttttttaatatattatgtacgttatagttatctaatcatttgtaattttttccataaagttctgagtagcttacaatgccga

SEQ ID NO: 213812 - DNA, 522 bp, Cannabis indica
tattattctaataaaatatgatgagaaatttgaattcaattttattaaaaaaaaattataactaattgggtaagattaaattcatcaatcacacatataggaaataaattatactaactttgtgacaaaccaaaataaaagaacattgatatatttaatgtaaaagtatatcatccacaataatctctaaaccatgtgggatttttgtgaagtgactctcatattactaaaaacatacaaaaatgtggaaaaatgagaaaattaagatatattcaacaaaaaaataataaatataaaataaaaattctaaaaatatatattatttttatttgttaaaaactaaaggtatgtttttttttaaatttaaatatttgataaaagattaaatagtgtaaaaaatatgtgaaaataaataatattaactttagtaacaaataaaatatatataacctataaatttaacatatggttttaattatttaaatacattaagacaaagaattataagaaaatactttttat

SEQ ID NO: 213813 - DNA, 1048 bp, Cannabis indica
caaactgaaaatcttagaaacaaagatatacataacaaatatatttcaaaagcgagcaattcaatctatagaatagtttgataatatgatgtaccagtatatcacatataaatagaataagtaaatgtgccatcatcataaatcatttaaagtcatggaactaaagctcaacacccaaaacattcaaatggttatacaacatagaacaatgtgttagactatagaatcataaatatgttcacaattaatcactatcaccacttaaaatcattctaaatttaaaatcttgatgcaaataataaaaaagcaagcacctcatgcgagcagaggaaagaagatttgaattcctgctttatacctcttatttatctccaataatgaaacaaatagaagcatgatattagagaaagaagaaaaaaaagataaagaattaataaagaaaaaatatagagaacaagtcgtttgagtcttagagagacgtacttgtacctcttcaagctcccagaggtaaaaaaaaaatgaggtggttcaagtatgaaatagaggtggaaaatatttaggatacaatatctataatatataatatataatatttaactactaggttatatatgatatagaatataataagttttgctttaatatttacgctgcgcctttttttttttggttaatcttatgatcaaataggctcaatgtagaatcattagatgaccacaacctctctaaaataaggagttgaatttaaaactctactaaaaaaagaaaggtgataaaaatgaaaggtaataaattaagagagtgatcacatgacatgattcaccttatttgattcttttgcttatttatttatttatttattctaaaaaaatataaacatatatgaattaattttcattatcaaacaatgtcaattatacatattgtttagcttgacgacggtagtgtggtaccataatattatcagtacaatcaagttttacatgttacaaatctcaatttaagaattctaccgatgaaaaatcaaaataaatatttagagttataa

SEQ ID NO: 213814 - DNA, 685 bp, Cannabis indica
gaccccaatcttgaccctgaccctgacccgaacaggacccgaactcggacctagacccaggacttgggacccaaacaggtgctggacccggactcgggactcagacccaaacccggactcgaatccagacctagaccgagattgggacccaaacccggacccgacccgactcgagatccgggactgggacccagactcgagacttgggatcggaacccagactcgacctgtagttagtgttggggtcgaatttattaaaaaaacattataactttacacaatctattaacacaggtcaatattaaatattgtattgtattaaataatactaatgcaaaattaaaatggatataaaattataagcttagatgtaaaaaaaaaagtcgggacggattagattcgatccgaataagttaggtcgaatctgatccaatccgagtatctaatctaacggggcgaggggaggtgaatccttacataatctagatcaggttggatcatagccggataaaattcgaccaaattcatttacactcgtgtttacttggctcagatctaatctaaattgagattgattctacttcaagattcgacaaagcctaagatcaattcactatgtggaaaaatattacaccctcaaatcttactaatgaacactcttgattcactcgagccaaactctaac

SEQ ID NO: 213815 - DNA, 636 bp, Cannabis indica
tttttctcatgaaaaatccaaaaataaatgtgctaattatagtagtaaaaactgttattattttgccacattctttttttttttttgtagaaaaagcgtttatattatataatcaaactgagtttagacctcacggtcattacataaaagagcttccggtatagaagggaccgggatagacccataaaactgatgggagaaggcccatctagccacattatgagcggcaaagttgcaagatctactaacataagaaaaagaacaaacactaaataaaggagaagacttagtacaaaatgagatgtagttctctaacgcccaacaagatcccttcccattgatagcgtcgatgaccactctcgaatcattctccacaataacatacttatagccgaaatctaaagcaactgacaccgccaagcagcaagccgcggcttcaccacaaagagcatccgagaactcctcccgagccgtgtgaatgctaatcactctaccaagatgatctctagcaacaacaacaatacacaaactctccaaacccactttcacatcacaatttagcttaatccagtcctgaggaggaggggaccaagcttccttaggcatcggtgtcggactagagagcaaagtatcaga

SEQ ID NO: 213816 - DNA, 764 bp, Cannabis indica
agacgacttgggagtttatgctttgatctcaaaacttctatgccaaggaaaataattggaatgaagtagctgatttgaaaaaacatcatgaaacgttctggaataaagaaaatacctggctatagtgccgtggaagtgaaaggaaactttcattattttctgatggaagataacagccatcatcaacataaagctattcttcattttctggataagttggatcatgaaatgagatttatgaaacatgtgccagaagctgaacttctgtgccatgatttttaaccagaccaagaatctttacatacattgtcctcttgaaactgagagattgatcaaatttactacaaaacaagctcgcccctgactgaggatgggcatagctctcttatgactttgaataatgaagagacttgtcaagcataagtcgaaaattcaaatatgtgcttcctcttgtttgcttatgctgaaatctagagcctgaagaaatgataagtgaggccaggaccatgaaagacttcagtagtcagtgaatactcggataggcatgatcatgataaattcaaccaccccatatcaccttttagaatagagtcttccaataattttaaacattttattaatatattgtactgtattttgtctaatagtactaagaaaaatcaattctttgttcatgacattttcaagatgttaatcatcaccaccatagcgaaaccaagatatcccgtgtcctttcaaagattttctatttttggaaatgtatg

SEQ ID NO: 213817 - DNA, 1101 bp, Cannabis indica
acatttcaaagataattcaatgcattatcaagtcatgtataacattctaaacataattttgaagttgtcttcataattcaccccaaggagttatgaaaaataagctctaggttacacacaatgggacctgtcaggctccgaaaaatgcccatcaccatcaaaagctaattttcacggttagatgatcatcaacagtcaaaaacatgttatttgtatttctcactatttttgtgggcctccttcacctataaaggcagagctccataagctcattttttaagttcaaaaaattacccacaaggttagagcttctctctctagtttctctctcttgaaattggagcttctgacacttagtattttttttcataattaccatctcgtgagaaataaaaactcggagtagacgtagttccattactgttgtgatacagtgagtgaactactataagtttgctatctcactcttatagttacttaaatacgaattctagcgagcaggtgtgtcttagaagtctagtccagagtactgagtcaacattttggagctttcattaagagccacaactcaagaaagctactaacaagatggttgcaacacattctacaagtgttcacagacggactccaacaattggtaagaaaataggggccacgtcagctgctgagatgggaactgagaatactttgacatctaggtgccaggagtaggccttagaaccaactcagcatctcatcctccaaggttaccaaatggtcacggacctggctccaatgaccagatcccacttggggagcctcacatggagattgatgactatgaagaggccgatcctcaagtttctcagctcaacgaaactatgtatgacttacaacaaaaactacgagactctctcctgaagtaacatgaatagttttaacactggttcgtgaaaattggaggaacagtgcaagctaatgcattgagtaggaataacaaagagctaacctgtctaaatgaagtagagaagcttgtcgctctagtcacgaaactacctcccataagggtttttccaagttggtgagagagtctccacgttgacgaactggtcatatgggaat

SEQ ID NO: 213818 - DNA, 296 bp, Cannabis indica
taagtactcaaaattataactagtaagaggccttttagtggtcggccactatgtgtcatttttgtccattattttattttttttaacccatctaatttaaacgtaagccctagttgaaatactataaaagaaacatgatgctctcatctcatccaacactttcaacctgccaaatatagtttctaacactgtcaaacaactagtagatgagagacaccttctatagaattttgaacctccttcattgttcttcatcaattcgcccatagtgatatagtgtcatgcccacacatagc

SEQ ID NO: 213819 - DNA, 1144 bp, Cannabis indica
atttttattttacataaatttatatctttaattgtactaagtttattttaacttttttcttccaatttatattcttaaaaaatatacatatcaaacaaaaataaattttattttaaatattataacaaaaaaaattaaaataaaaaattctatgatttttttttaaaaaatatatatatatacatgagttagaaataattatgaaaatgaaatcaaaataagtattgaaattaacataaaataatgtgagatttttttttttaaaaaaaattaagagtaattttaaaaattatttaagtttttattttttttaaaatgggatgtatttatcattttatagggtgcaaatagctgtatcaattttttttaaagtgtaaataactttttttttttgcatgtaatgatcacgctttttctactctattgtgatttttttttttgagtgaaattacttgttattataaattaaaaatagcattcatttacaataatagagtaaatgggaggagggatttcctcaaaccaagaacaagcctcatccacccctaaagtaaactttgccaaaccgtgagcagccatattggccgaacgtttgacatgcgagatagttacattagggaaaaggataagagacatgagatatctataatcaaatcactaaaagatgagtttgaattcaagggagctcgaagggcattaaccaccattaaagcatcagattcagcaatagacaaaggtagttgttgttgaattgcccaatttaagctatgaaagagagcagtagcttccatttcatgagagcgaaagttgccaatcaactttttggaaagagtagcaacaacaacacatttgaattccgaagaatagcacccactccaattacacctctgctggaatctactgcagcatcaacattcaacttaaaaagattgtaatctggaggtcgccaaagctgtgctgcaggaacagcctgcaaagagggccgaggattcgagctaggaggtgatgctgctgtagccgtggtctggtgtggctgctgatgtgttgttgcagcaggtgttgcagttgtaccgtgcctctgtggagcatttcgataattcgaaaggtaagttgcagcaaaagaagctaaaccagatgctggccg

SEQ ID NO: 213820 - DNA, 799 bp, Cannabis indica
aaaaaatgggtcatgccgtgttgtgttacagaaaaatatgagtcgtgctgtgtcatgtcaaattttttaaagggtaggctcagcaagacctgtacgcctagtactttcatgttgtgcttggattcgtgttgtactttactcgtttcgatcgtattttttaaacatgacaacctattttcatatccaagcttaaattcgtgctttactttttcatatttttttataattattaaattatatgtatatttctaagctttagttatatttatataacttttgaacaatattttacttataattaaataaaaaattattaatatcattataatttgaatatttacttataaatactcaaatttttatgtcacgccctataaataaattaatatataatattatttttttcatattttaataattttaattatagaattataacattcaatattatatttaagttttatcattattttaacttatatataattggtaaattcatactttattattattattaaattataatgtcttttaatatgtcgtgtcgtgccttttggatttattgtgtgtcgtgcttttcgatatgtgtcgtgtttttgtgtttctcgtgtcgtgtcgtgtctgttaagagtatagaataaacggttctgtaattagttgtttattattagttgtctgttatcggtttttcagctaagttagttaatggtcgtttggtcatttcatatcagcttgtgtgcctatataaactgttgttacagtttgttaattaacgtgaattcattctttgtaaaagttc

SEQ ID NO: 213821 - DNA, 692 bp, Cannabis indica
aaaataaaatagtccaattaataacttttacaaaatacaagatccaaatatattcacaaaaaaaaatgatataatcatatataattattttacaagttaattatatcactgtaaaaaaatctcaataattttctaatttgattatgttatcactaaaaagactttgtgggtaaaaacattaattacaaaaattacaatttgttattaggaaatatatttttagttattggtacctaaataatattttgattcacaagtaattttttattgtaattaaaagtgatatttagttttttttttctaaaataaagcgccatttagttatcaaaaattgtgttgccactgaaaaattattactatttattagtagtaacacctttttttatagtgtatatatatttaaattttaattttttttagataaaatgttcaaatgtatatatatatatatatatttctttatttagggtgtggtagtgtctgtagccaaatattttgagagcttaacgagagaaatgaaacaaaaataaaggagagtggatacgagtgtattatgtgagtatttgatcagctggccataataggtatagctagctttaattttgatgtggtttcctttcctccccataatatgacatttcaattatgtacacatgcagctgtccggaccccccaaaaaaaaaaaaaaaaaa

SEQ ID NO: 213822 - DNA, 503 bp, Cannabis indica
cattcgatatcatgatcattaagggctggtgttagaatttcctcaagagcttccgttgtacagtgggaatttttttggaaaagttcctcaaatttttataggaagcatcgtgtgatgtcacagtagtcttcaatccaattgtcatggggggctttctttatgcattggatataattcctccttcttatagttgctgaagccatgaagaacttggtgcatttgtctccttcatggagccattggactcacgatttctgcttccaatggatctcctcccttagcaatgcctctgccagtgggcctttagccgagtgaatgagtaaatggtcatcgggtctgtgaagttcagcatcatttaagatcttggtggcctcctccacttgtcttttaacatgtcgaaattggcttttagtccatcttgtgagcatgtgtcctgttcttttaacattcctatgaaaattaatcatagggtgatcatgaaaatgttgtgcccaagcctcttt

SEQ ID NO: 213823 - DNA, 659 bp, Cannabis indica
gctctgttgatctttaaattctgcagtacttcagaatctcagaataaacaaagaataatataaaatgtttatttaaaactaatacatatatgtatatatgaagggaaaaaaatataattagaaataatggggaaagtaaccttatttctttttaaatgggggaagagctatttaatatcagttcaaatattaataggatttgttttattattattttattatatataaataatattttattattttataaataaaaattaaaagtcactcatgaaattctcataaaccaagaattttagttatataggcacactttatatagaatagatattttaaaaattataatatatatatatatattataaaattatattgataaaaatgattaaccaacataatgaaatatatacactacaagaaaaatgagcattaatgaggacaaatttcgttggtaaaaacccctgttttcgtcagtattgcgcatcaatgaggaccttttgttggtaaaaaatcgttgggaatactttgttgggaaaaacgattatcaacaacgactttttaagtcattgggaataaaatttatacatgcatctataataaaataccacgtactactaagcttacaattatatatagatgcaggtatatattaaaaaaaa

SEQ ID NO: 213824 - DNA, 759 bp, Cannabis indica
ttccctcaactctggcgtttgctattggcagcaatgatgtgttaccccgtcggccaccccagaagaagaaccaacccactccctctagtggtttcaaaaggcaattggctacggtggggaatgagcagagggagatgctgaagagacacagacctcactcaggacaggatgtagtggaggttgtttcaagtgatgaggcaggccctgtgaactcacaggcctgccaggaggaatgagtctcatcagttggaatgcccgggggcttgggagtgaccgagcattccgaaatctctccctcctagttagaatgtataagccctctttactttttgttattgaaactaaaatgtgtaagaactctgttgatcgtattaaggttaagttaggttttgattttggttttgaagtcccccgtgttggtcttagtgggggactttttcttttgtggaactcggatttggatgtaactataattaactattctcttaatcacattcactgttttatctcgtctgctggtttttctagttttaatcttactgctttttatggtgctcctaatcctgctaatagatctcatacttgggaattattatccagaattgggctctcatgcatttctgttccttggtgtgtgttaggcgattttaatgactttttaacttgggaggataaatctagcagaaatctaggcaatggcccctcccctcttttccgcacttttataaacaaatttgattttcaagctttgcaaccagt

SEQ ID NO: 213825 - DNA, 879 bp, Cannabis indica
atcctaatcccctgtgtgccttgctcagactcatgcagagtcatagcaacactctacatcatgatcaggatgaactgcgtgccgcaataaatctcgcatttgatgaacaaaggcgtatgttcactgaatggagagacaaagagatggaggcattaagggctcaccatgcagagatcgaagatcgtagtcagcaagccaccgtgctaatacgaagagcctaccaaactgtaggtcagcaatcgccgaacatcattcccctgggagaaacggaggatgagccaatgatgaatgcttcccatacaactagtggtcaaccgcccaatcgccagtcacgagttccgctcgtgggccaagaggtaggcgggcagaccttgtccggtaattcatcaggaggagccatacctaacggttccaactacaataatggcgttattccacctctcaaccaagtgaatcagtcactaagggaaccaggctcttctgcgttcgataggttgggaacaacccatgacctaaggaacaatctaaacagaagaaggggaacaaacgagcagactactacaacgatcgtgcagcctggagcccatactcaaatccccgctcagaaagacgctgacgtaatccaagtcgaccagaatgccgagcaggtcagcccagccgtacaggcccagcttgacgaattgaaaaatatgtttcatggcatggctggacagcgtaacaatgatcttgagttagaccgagctcgcggaactcccttctcaccagagatcaatctcctgccactgcctcacaagttcaaaatgccaacgtggaagatgtatactgggagagaagatcctctttcccatctcaagtactttgaaatggaaatggatttac

SEQ ID NO: 213826 - DNA, 599 bp, Cannabis indica
aatgaggaatttcagacaagccatctctaattgtttattaagtgaattgaaggcggaaggaggagagtatacttggtgtaatggaaggtcttccaatcttatttttgaaaaattggatagaatcctttgtaatgaaatgtggaaaagaaagttaaaaaaaaaataaggtgtctctttttaaattggtggaactcagatcatagacctattttaattcatgcacaactagggtctcatgatttcgggttcactaaaaaatggggaagtagatttcattttgaacaagcatgggcggaaaatgaggagtgtcaaaaaattattacagaaacttgggggcaacaaagggtgttacagccggttcataaactatctcggcttctacatacgtgtgggactgagttaaataaatggaacaagaagcagaaagtagaaatgatgacccgatcaaaggaaatcaaggagaagattgaaagaattgcagattctactaagattgaagattggatcaccaaaaatcggcttgagaaagatcttaattgtgtggaggaaaaaagagaaatttattggaagcaacgaagtcgggcactttggttaaaaca

SEQ ID NO: 213827 - DNA, 483 bp, Cannabis indica
aattaaaaaaatacaaaaataaaacaagagaagacgttaattcaaaaataaaacaacaaaagaaatatatgaaaaaaaatatatatattgatttaaatataagaaacaatatcttcaaaaaatttctttttttttttaattcgaggggcttgttattttctatataaataaataatgaaaatgtattgacaatatgtagtcattttcgaatttttttaagattttttgtttattttgaatgattttaactaaaatagtgtctgcttaaaaataaaagacaactaaaatagttgtcagatatatgtatattaattaatatcattttttttccaaatttaatttaaaaataaatcagttaggcctgcttttttcttggcgccaacgtaacgtattataaatcctaatcctaaaaggaataagaaactatcagtagattagttctctataaatatgccccttttcctctttcacaaactcaaatat

SEQ ID NO: 213828 - DNA, 685 bp, Cannabis indica
cctatttcttttctcatcattttaagcaacaatattcattgtatcttctctataaatagtggagccattccattgttcagggatctgatttcagacttttgagagagtgcttatgctgctaaaatatttgtaagctttcatcgaggttgttaagaaactcacctgattggctccttatgatcttgataatcttgaaagtaatacaacaaaaaaagggagtaggctattactataatcacagagttaaatctctataaaattttctatgctcatatttctcataattattatcttgctatcgttgttcataaatttattgctttaaagacttaatgtcgttggctaaaagtaagatcaattaaattaaacctaaaagaaatctgtcacttctcacctatttatatactaaattaaaaacaaataaattcacatatattgaaaaccaaatttttttttattgttcttctccatctcagtttatccttctgtaagttcttccttcattctagatttggcaaacacacctagcccattcctaatccaaagtttcaagttgcttccataatctcatagtcacacacttgctcaacctcctaaagattgaaataatcttagctaatctctttcacactaatatatatatactttcttctttgcatatatatatgtactatatatatataga

SEQ ID NO: 213829 - DNA, 796 bp, Cannabis indica
atgctttcctttatttatatatatagattgtataacaccaaaaactaaaataagatttacatttagggagtaaaaatatattgtataataataattttatgtttattttttttcacaaggtattaattataaatttctccattaaatatcaactgaattattattaaattagctttgaggttatactatcacatatacataaatatatatatcataatcagtcaatcaatatttaacaatgatatttaatttaattttacaaataaaagtaaagaattttactactaaaaaaaataaagtgattaatatataaaaattaaaacatatcaattactcaaataataatataatgataatgaattggtttacctcatttttgtgatcttgttgttgacattgctcttcctattattggagaaaaacaccattaaaaaaagttaatgaataagaagagaaatataattaaattataatattaaaatatatagtagtagttaattattaccatttgatgttattattaaaattgagaaagagctttccaccattatgagattgaattactaaatgggatccacgtggataaatccagaaacaaataagttttaccaaagtgaaaagtgagatatttatatttgtgatgagaagaaatatatttggaagcattaggacttatttcttcaataatttaaatactcctagtgatattatctatcaacactgaaaatctgaatataatactcagatttattctcaattaacacttgtatatcttccttcttttcccacttcttca

SEQ ID NO: 213830 - DNA, 1008 bp, Cannabis indica
aatcacaattatctctctaaatcccattgtttctttcaatattaaataaataagtaagaatgatctcttctcgtcttactttgttctttatatatgtagattcattcatgacatatatagtaaatactattcataatatttctttttctaacataactatatttagtatttgaaatgtaattttttttatatcccttcattcatcgataaacgtggcaataaaattgagttattaaataattaaatttgttactattaaatttatcattacttagtattattactataaataaaattagatatatatgtatgaatatggatcatttgttgtactagcattacagattggtacattacaaaattaatactaacaaaataggtaactttctattatcagttgtaattaggtaacatgctaatgtgagaaaatatgagattcctatttttatcaacattacatctgaaaaaaaaattcaccaaaaatggtgatgtcagcgaatcaaattgaagctttctttatagaaatatttacataaatatgataataagaaacctaatttacataaatataaatttaatacaacaaaatatgatattttaaataaaaaaacataacatatacaataacatcataaaatagagcaaccccattacagaaccctcaaaacttgtgaaaccactttcgaacttgtaaaccctataaaacaaatttcgacaatatgagaagtaataacaaaatataaatgctaaacaagaaagttaactgtaaccaatatcatcaagcaaaaaaaatgaagaaagacaaactctcacacaaacacatacaaaaaaaaatattaatcacaaatataatcaaaacaacacacaatgtataacaaaaatcaaaaaataaaatataaatgtgaacaaatttcgaacctagaaacaaaatgatcaaaagggaacttaaaataaaaacatgtgaaatctgttttgaacttgtgaacctggagaaatcagtttcgaacc

SEQ ID NO: 213831 - DNA, 728 bp, Cannabis indica
ttttttttatttttttgcatttttcagtttcttatcgataatatatcaatagtttctcaataattttcatatctgtatttttgatgccataaaacttatcgagaaaccattgatacaccatcaataagaaactaaaaaaaatacaaaaaataaaaaatcacacaaccatggaaatcatcgagaaaccataagaaactgaaaatgaaaaaaaagacaaaaaaaaaaaaaaaaaaaaatacaacatagccatggaatcaagaaagaaaccattgatatacaatcgagataccatcgatataccattgaaaaattatcgataagagtcttccccaatcttggtatgctttatcatcgataaaatatcgataaaccatcgatataacataaaaaatccagatctcactgaaataactagatcctgccatttcgaaaaaaaaaaaaatagcaacatgttcttcaaaatatttaaaaaattattgtgtaaaatacttaacttttattgtgagtgtagcgagttttgtaaaatcattgtgcgtgatttgtggctttaatggaatttctaccattgcggctcgtggttgttactcgttaatgtggcttttttttttttttaataaaaagcgagcaatgagtgaattagaaagagttatgagttatgtttttaacatgcaattattaatataaggagatataaaggaaaaacaaaaaataaattaaaaactcaaacc

SEQ ID NO: 213832 - DNA, 708 bp, Cannabis indica
aatataaaaaatatattttaaaaactatatcaacaataaaaattagtttccaacatataaatttatataaatacctaatacttaaatttctaacttcatactctattttgacattaaatctcttatttgtttgctcaaaaatttaagcattcagtatagagtaaatatctccaagagaatcacaaactaaaacaagttttataaaaaaaaataataatgtaaaaacgtataccaacttcaaaaagaagtttcactaacattaaaagtaacaaaaaaaaactagttttatcaatattatactagaaaaaaaaaacacaatacaaaaaattataatatgaaaatgatacaaactttaaaaaccagtttctcaacatttaagataactaataatttcattaaaagaaacataaaaaaaaaaaatcagtttcatcaacaagataatgaaaataaatataatctaaaaacaatactaattttaaaaaccagttccatcaacattaaaataaactaattatttcattaaaagaggcagaaaaaaagtaattttatcaaaacataatgaaaaatacacaatgcctaataactaaactttaaaaacgataataactttaaaaaccagtttcgaacaaataaattttatatcaatacctaataaccaaatttctaacttcattctctattctagttaattttatatttgcttgctca

SEQ ID NO: 213833 - DNA, 999 bp, Cannabis indica
ccttatttaaatagttaataaatcttattttttgtttgtgtaatatatatgaatgtacatgttattactcttattatattaatatattaatatatatatagtaatttaattagagttacatgtatgtatgtagattccaaaatattacatgtattttttaaacttcctacataataattaataacatgaaacaaaagagtgagaaagaaaagttaaagtgattgcataagggataacaccaagaatgaagaagagcttgaagggcgaaatcttctgatggaaacccctcctccattgggcccccactaagattttcggttttgggcttcgaaggcttccccgaaaaagtcttcaccgacgccatgaagatcttctcgagaactatagtgaccccggaaaattccccttttataaggggtttaaaggggttagtaaaatagggtttttgtttagtctatactttttgtaaccactacaaaaaaaaaagctttttagtgataattttttagtcacaatatatttttttttaggaaattaccccatatactatttttttttaaaatttacggtttggatttttaatactatatatttataaataataaaaagaactaatttaaaaattaaaataaccgaaatttaataaaatatttctgtttgttaaaagtaattaaagaaatttgaagttttgataaaatttgaaaaattcaacaatatatgttgcatttatctaagaaagtataataattataagtaagaaatatcaattacacaatattaattttgcacaaatcaaagtgaaagaaatagtaatctatagactataaataggctctaagtgaatcaccacattcatttttaaacaatatgtgagatttttttcaaaataactcactaaaaagttaaattaataaaatttaaaaaagtaaataaaaaaatgtaaaaaaatataataaaagaatataattggaaatagaaactcatagaaaatactacatc

SEQ ID NO: 213834 - DNA, 740 bp, Cannabis indica
ttattaacaaacaacatgaatatcactaagatcacgagataagcatttggcaatctaattcaagtgagacgtgagagtatcccaattaaaatcaaagccgaaaactacgaagaatagcaaaagtcttagctgtaatcgtattgttatttattattagagcattattattatgtattagtaatctaacatcatttatatttgatgttttacgattagttagcaatactctataaatatagagttattatattaaataatatttgatattatattaaattatatgagactcaatatttaattatactaaatataaatattatactttagagaatgctaaatattattggtagctttttacatttcttttattattacttatttgaaataaatcatatatattattgctaacaagttcgcatgaatttaatccatgcaaactcagcatgtttataggagtttttgtgagtaagtgtctatggaggataagccataattttataataaatgcttgtgattaaatttgggataaggtgagaattattatttttatcatatatttattaaatataattataaaataattttaattgataaatattctttttatatttaaattactaaatataatttcacataacttattaaaattagagtctctaactaacatactgaggatataacctacaacattgagtgtaaattaaagagtaataaaaaagaaagtaaaaactaaaaataag

SEQ ID NO: 213835 - DNA, 527 bp, Cannabis indica
agagtgttcttcactcggtcattgctaataatcagagtgctttcctcactggccgacaaatctttgataacattattattgccaacgagattatacactctattcattctaggaaattgggcaaaattggctgcctgctattaaactcgatattgaaaaaagcctttgatagggttgagtggccttttctcaagaatatcctcgctcatgtgggtttcccttccaggtttatctcccttatcatgagttgtctttccactgttacctaccgtttatctcttaatggtaacttgtctgacacattctcttcgactagaagaatccgtcaaggagaccctctatctccgtatctctttcttcttgtggctaaggactctcagctgccattaaaatcaagaagatgcaattgagttctctagaatcaaaagtttgcggagagagctccttccatgtccctctctcttgtttgctgatgcagtatgttgttctctcctgtctctgctcagtctagtatcgccataaatgac

SEQ ID NO: 213836 - DNA, 812 bp, Cannabis indica
aggaaagtcaattggcccaacaagatatcttttaacgaggaaattagactctatactttttatattgtcctcttttattttactctctttttaaagcctatctatttttatctctttttaaacactttaccaatattacccatgtcacctcaatatacccggtaaagaggtatatttcaatatactcctcttttaattgtaaggctgaattattgaattgtactaaatcatgatcctctactttcatctatgttaagcaattttattaaaattaaaaaaaagtcattaaatccaataatcttcaaaatttagagggcatttttaacctccttaaaaaattcaaaagaagtataatttgatacatgtgggagaaaaatcttgattagcctaaattgcaaaatataaatggctctgtttgatactctcttagtttgtgtctctgattctgagtgtgagtaacttgtccaggaaggcagcgccaccattgccaattacttctaaacaaaggtcactcattctctcgctactactttattatttattttgctcatatatatatatatatatatatatatatccaaaattttgaatttgtaaactccataaacctagagacccaagggtatgtaaaatctaaatattgggtggttatgttgtggcttacaatctacaaaactttaaataattgtgtcactatttagcttatatatttataattttgtttatttttcaattaattacatcttatttgttaaccctttttcttgtttttgtttataggatcaaattaagtatgttgatggcaaacaatc

SEQ ID NO: 213837 - DNA, 709 bp, Cannabis indica
cgaaccatccaaccctgtcacgtcggtacaggctggagtatgaccagcagccggagtatgaccggttcgaccgatcaggctgacacttggttggtggttccgtactattgacgtatcccgtcggtacaggctggagtatgaccagcagccggagtatgaccggttcgaccgatcaggaggatatagtaacacgtcggtacaggctggagtatgaccagcagccggagtatgaccggttcgaccgatcaggctgttacgtgtcaatagtaccgtccctatgaacgttcagaactcagtaccatgttggacatggcagtagtggctcagtaccgtgttggacacggcagtagcgggactcagtatcgtgttggacacggcagttagggttatgatcaggggtatgggcgtctgatcatgaccgggattatgtatgagtattattatgcttttcttactgagtctgtcgactcacagttctacgtttatgtgtaggtaaaggcaaggctaaagctgatggaccgtgagcgagcttgtgaagattgtacatgtcggggcggttaggcctggagcgtacgatcatcgggacagcgaggctgattttgtattaaatgtggtaaaacctctaatttttaaaaataagggtaaataacatattaatttgctttaagttttttttagttctgtgaaattattttctttaatttttttg

SEQ ID NO: 213838 - DNA, 673 bp, Cannabis indica
ctaaacttaacggtgattttataggttaagactattcaaaataaatatagccaaatattccgaactaacaaggaaatgaaataaaccccaaaaaaaaccgccatttttcttgtttataactatttattttcccattttgcccctgactttctaaataattacaaaaatggtattgcttctttgtttagctaagcatccagtctcaaaccgcgtggcctttttttttttttgtggtttcccgctttcgtaaatttataatttttggccacgcgtcacgaggaatttaagtttacgcgctccttttcgaaatccgggctttcaaatctaagaaaaaaatctaggggtgtggtagtggtggtcacggactcctatgagagtgtgtgaaaacgtaagtggattttaataaattatttttaaaaattatatttgaaagtaattagtgaaagtttttatgttttatcctaaaatgtcaaaagcgcgtattattacctcataatctcatagtaatatacagctggaattaatttatttagctgaaaatataattagtgtaattcctatttagactaattaatttttttttttaggtcttttatgtttattctggaatctttttctttctcttattttaataccttttttgttttcggtggagtgtgaattgtgctgtatg

SEQ ID NO: 213839 - DNA, 745 bp, Cannabis indica
tttttatatgaatatgtgtgtgtgtaaagatatgcatgctaattgtgattccaatactaccaacattagtagggtagcagtactaagtgtattggtacaatatatgatgtttaaggggtacgatctggtgttactaatactagtatggtaaagtacgtagtgcatgtggtacaacactcaatagtgctcgggatacagttcagccctacaaatactagtatgagacgagtacttagtgcatgtggtacaaaggtcgtacttttgttaagaatgttcataatcatctgttaagccttgtggataggtgtatgtgtaccttaatacaagtcgataatataatgtatgttatatgtttttcttactatctgttggctcacagatattgctttcatgtgtaggtaaagggaaggctaaagctgaacaacagtgagttttgagctcggagatgattgtacatgtcgagacgatgcgacttgaaaagttcagtctctggatgacttgggcttcatttttgtggtcgctgtgcgacttgtctataaaagctattttgaatgtaaagttaaaaagaagggattccaattttgtatataaatatatgtatatagtttaaagttaaaaattaaatcaaaattttaatttatcacaattttcaaaaagccctttgaattaagaaaaatatacactctaattaaaaagtcattataacatgcctaagcattacagcgttacaaaatcattttacaaa

SEQ ID NO: 213840 - DNA, 567 bp, Cannabis indica
aagaaagggaggttctccgggctgtttaatagcaggttggaagaagagaagaagaccaagaaagaggagcttagagctgaggttgagaagtataagtcagaggtcgggcagcaaagatctgaagaggagaggctcggagggaaagtgaatgctatagagacagttggtctcgagatttctatgacttctggaaggccaatccccaggcgaattttgaatactagggcgataccaaagacatgtttctctagtactgcactgcttaggcagcctatggggaatctgaggcgaccacttccacctctccaactagtcaaaatgttgaagtgcctcctgctcagacaaatgatcctccatctctagctgacccagccaacccgtacaaagagcctgggactccagccgtttgaatgctttctttttctatctttttctttatctgtttggccataaggcctctttttaagacaaagtgatagaccaagcggtctttaaacttggaatttattcttcatttttcagacaactagctgaccgggcagcctttaatcttgggtttgcatgctt

SEQ ID NO: 213841 - DNA, 510 bp, Cannabis indica
tgctgctagatttgctgaaggtccagtaccaatcacagatgtgacattgcctttgttgttccctcctacagcatgaagtctctcgaatgcgttatcaaaactcagtagcatatcttgtgtttcctgccatgaaatgttagatctagcctcaatttgaagaacaatagcaagatattgagcatccaaaccagagatcacattggaaatgagatgtgcttctaggtagggatctccagcaagggcaaggctgtctgaccacattttcttctgtttgaggtatttgaccatgggagtttttccttttcttgttgtcttaatcaatgttctggtgtcgtccatttttgctcgagagtgagccctaaagagattttccagggtactccacaaagtagcagatgaggtacatcccatgacctcggtagccacagattcagtcattaagctataaatccagcccatgagcagttggtcactgacaatccagtgttcatagtcggggttaagacaaac

SEQ ID NO: 213842 - DNA, 824 bp, Cannabis indica
catcacaatcaagggtcttgatcaaaaatgttaaagtttaactataaatatattgtttaatccaacggctaatattgtacctggtaaccattcacgtcacaataaaaagggcacacagcagagtgtagactagcactgtaggcaccacgatgtctgtcagcgaactcgaacacctacttgtcatcatagaaaaccgttttcacactacaacggtcaatttctcgcgatattttacatctttactcgagataacaaatttgtttctttctttatcgagttcaattgtacaatacaacatttccctatttagtataacagattaattcttttatataatatataaataatctatagtaatttttaaggaatttttctaattttacatttttatgaaaatttacaatcgcaactaaaaatttacatataaactacgaaaactactcaaaccataaatttaaaaaaattatatatataagtaatttcctattaattttttttcttaatttttatatttttaaaaaatgtacctattagattaaaatatatttatgacaaaaaacaattaaaacaaaaaattatttaatattctattaagaaactaaaaaatagtatagatcactttaaaaaaaaaatctgaaaatataaataaattagataatgcaattaacataaaaatgtgaaaaagaatgtttaaaaatgaatttttgtaaaattatttaatttctgtttaatattccggtgcgcatttataatttaataaaatttctaaaaataaaaatagagaatgatagaattacagtactgtgacagataaaaagtagtgt

SEQ ID NO: 213843 - DNA, 646 bp, Cannabis indica
actggtgttctactagtgtttttagttgttctatttaaaaaatttccgtgtgacagtattttgtaaaacttaactcaaattctaatatttttgtaagtttcccttaaaataaggtgtgagataaaaggagctctaactatatataaaaaaaaataataataactctctattaatagagaataaatagaaaaaaaatttaaagtaaggagatttttattttttgctaaattttgttactagtatcttaattaaaaatactgttagtttttattattttataaaattaatttatatttgacaaatttaaattataaaatactaattacaataaaaatatagtttaatattttaactattttaattaaaaataaaaatactattaaaaatactctaattaataatatttcataataattatttaattaaactgtgtgaaatcggacagtataaatatatatctgtatatatatggagagagatcatagcatttattttggctttagcagttaacctacccgagagagacttatctgtgattgtagaactcccatgacttgaattaagtgccactatcaacaataacatttatatttattgttaggagactgcaaagcccaaatttgctatgtttgaaagttgggcaatt

SEQ ID NO: 213844 - DNA, 981 bp, Cannabis indica
gttaaaccaataatttcgttagatagccacaattaatataagatatttatatatataaaattgtttaatattaacttttaaatcaccatccataataaagttatatatggaaagaatttttaaaaaataaaactaaaaattaaagtaatctactattatatgtaattatttttctaaaaaaaattaataaataagaatgagaatggaaattaattttcttcttccttgtcgtccatatatatatatatatatatttaacgtagtgattaaaattactcatgaatttaggatggagacattcacaaacagcgcaggaatctccttgaacctggatagcttatcgtctaactaaagtgcatgctttgtcaaaccatgaactgctaaagtcagcgagcaacatgagacaaaattgtccacaaaagtttagacaataaagctataaagtccgaaacagcatacccaaagagctagagctataacttatatcactttatgctacacgccaactcattaacatatcaagaaagatcccaaaatatctataaaataaaataaagataaaaaaaaaaatgaaattagtcccctagcgatagtattaaaactaatagaagaaattctcaataattagaagataacaaatctcaaaaaaattatttaaaataaacttatcggcaaaagttttgtagcagttggccctcctcaaaactgatctacatattaacaataaataaaactccattaccatacaatttaatgaaaattaaatgatgagaataaatatggtaaaataatcaatattataatgtcaagacttgaaacacttatttgtcaaatttaaaaagttatttgtagaattcatgagcacaacatgaaatacttctcatacccattgactatatcacaaatctatcttaaacaattaggggcaagccataaaatggcacaaaagccaaaaccatcaaaagttggtgaaaacgagat

SEQ ID NO: 213845 - DNA, 573 bp, Cannabis indica
tggcttgtaagttatttattttactttaattggaaaaagaaatacagaatcttcaaaaatatcttttttaatgtttcatttataattttacaacttaaaaagtaaaaaaatagtaattttttttttcaaattgtaacattatgttcatgtctattgacatggtttctctagtttttttgtcataagttgagtgtttttgagattgatcgtggatactgggaattatttcgagtgaaagtttgtcatttttttgttctattattgagtggggctggtgtgggattgttctctactggttaggatggcatcatctagtcgacatgttggggcaatggaggacgaaactctgcgtttccagatcgaggaggaggacttagaagctgttctggtttcggcaagtgatggggaggaaggaatagatgaccggtggtgtttggttggcaaatttctttcaaatcgaattatcgattttgaaaaaatgcagaatattctcgcttcgttatggcaaccggggatggggatgttcgtcaagcagttggacaccaatcgcttcttattccaattttatcacga

SEQ ID NO: 213846 - DNA, 604 bp, Cannabis indica
aaaaaaaaaaaaaggaaaaaacatcgtacatattttttaaaaaaacacattatacaaataaatgtggtctctaacactaagatgcacaagacaaaatatgatatttgtgtgagttgtgtgtttttcatttttctttttctcaaattacacaatatatttcattgaattttgtcttttgtttatggtatttttacactaagatacataggacaaaatatggtatttttaaaaactaatcatgcatccatgactaatttgtaaaaataaaaaagagagtccaataaagacttggtccagtcaaataagcaagaaaaaaaaaccctaaaaattgagtattctactcaaaatgttcgagcatgtttggtattattttctgttttttattttaaaaaattgtttttttgaaatgagaacaaaaaatagtttttgaaatttttaaaacacaagtaatgtttggttagtgttttttaaaaataatattgacaaaaagtgaattggttttaaaaaaaaaaaattgtttttaaaaacaaaaaacagtttttagttatgatgtgaaacatgtacctagagtttcagaaccggaaatcacacacacacacacaca

SEQ ID NO: 213847 - DNA, 901 bp, Cannabis indica
agaagaaaacagatttgtagtaatcaataatgtcttataatacaatctcattcaactatatataagaaatcattcccgatgcataattaaggcaattggagatgaaaaagcaaaataaacaataagctactcttgaaatttaacttatcaagcaaagctacttatttttccatcatttttttaatcaaacaatgtgcatattattatcataattggctaccaaattctttttaattttataagggaccatatatatacacgattttttccctctaaattatgatctctgtagaattttatttttttatttttatatttttttttgttgcattgctcatctaggtagctattagttatatatatatagttacagtaggagaatcttcaacggacatacataaattggtaagattatcccactaaaaatgaaaatgtatatgtctcttagttgtttagactctactaaattaatatcacgttagtattatataaacaaattatttaaatatataaataaattagaatacaattacatatggaatatttgcaagcgaattttataattcaaagaaattttttatggtgagaagacaaagtcattatagttggagaataaaaaagaaattactcaaaatattttgaagtggtaacatacaaacaataaaataaaaaggagtcggaccaataatataaatgtatgtatttgagtagagtattgtttttagacactagtagtatctagcaatttctcagcatgtcgtgtcgcgattggttaacgatactctctaaaagttattatattaaattatataagacccgatacttaattagactaatagtaatattaatacataagagggtgctagccactactggtgcctcatttcacttgcaattgcat

SEQ ID NO: 213848 - DNA, 791 bp, Cannabis indica
atataaatttggtgtaaattttcatgtgcattacaatacccagctatttaaagacccaaagctctagttcttgcttctccttattgtcgtccagtttcatcttcgtcgacccgacccgaccgtcgaccccatcgcatctctagatctcgttggctttctcttcgattgtctttgcattctattttacaagggtatcaaataatctaactcgatctttttcttttatatttgctttgaattttttcgatttgttcgataggtgagttcaatagttcgctttgtgctcatttctgtgctgatctgtgttttgcacgaaagtttttgatctacttctaatatgaacaccgtgatctgtgacgtttttcaatgatggatttgttgatttttgttttagtttattttgataaacataatcgggtcgtttagcttgctgatattgctctcaattttctggatctgttgtgtttttctcattctgcttgtcttaatcgatgcgattctaagttcgagaggtttctttgctctagatctaactttgttagatacctgtatatctcaattccagccagagcatgtcgtttcattattttcacaagtaaactgggatttcattcgaattctttcccctatttttctatgaagtttctgattacagaagctaggcagtttaaaatgctcggacattactataattaatggagttgagactctttggaacagaagtaaaaacatggatctttattgtaaaattatcgttcttttgttgtttgttgatgagttagataatcact

SEQ ID NO: 213849 - DNA, 569 bp, Cannabis indica
tcatctatattcagggattataccttgcatctatgaaaaacaggtaagaaaaacattcaacaaatgcagcaagatgctaaaaacattgtgtttattgcaagcggttttctcttgctagcataccttgtactttctggtccttcaaatctgtcttgacatcattactgcaagaagaagaaagaaacataacagaaaaaaagctcgtgagccatgcccatggccaatgaaaagatatgtagtgagtggtatgaaaatttggttgattggctaagtgaaactacatacatgtggtgtattataaggatcattattaagagatttattagagagtcccaacattggaaaacaaacaaaggaaagctcaagtgattaggagggtgttgtgagtaaaaggtttgggctcaatctagtttaagttagttttactattatgagcaacagctaactgtaattaggaatgggaaaaaaaacataaaaagcaaagcatcttggcaaatcagcttccacggtccgcctaatggtagaattgggcattgtaggtgcccacagaaatactctacaattaaaaa

SEQ ID NO: 213850 - DNA, 1712 bp, Cannabis indica
  modified_base (1597)..(1597): a, c, t, g, unknown or other
agccttaggaagctcagtttccatcactttcacaccatgtgctttatctaagtttttagatttgggtacagtaaacttggccctaatgatatgagccacgtttggatcatattctttaggcattctttgacttatcttcatacgaggcatggcagcttcagaaatcagttacctacaactcaagaataactcttcttagccttcaaaagaaaattttaaggttactacaccagaaaagagaaggaaatttcagctcaaaatagctcacatgaaatagtattttgggggttttggaagtcttaaatatagaatttgaggattttcggtgagttttggaatccttagaacaagctcaacaaaagaagaagaagaacgatattttcaagaaaaaaatcagcgaaaaaaaaataatttttttctacctgagtgaatgaagatcacttgaataactaataaagatcaaaatatagagctctcaagaaggcttaggcatggggagcaaaggataaagtgaaaaaaattgagtgagagctctcttatttatagtaaacgcaatccctttatcctatgggaattgagagtcttttaaaatttatatttgaaagaaaaagataagtgataaggaaaagaaaatcatcttttcccttctccttttacttaatgaattttgaattccttatgagaataggaataggaattcaaatttaaagatacaataatttctaatacatttaagattaaggtaaatttaaagttgaaaaagaaaaaaagataaatgataagccaaagattaaaagtctgttctcttcttctttattctttaaatttagaatatcttatcttaaaaggagtaggatttaaatttagttcatcctaattccatgagaaacacatgagaattttaagtttcaaagaaagataaaagataagtgaaaaatgataagtttctcatattttctttacttaataattttcgaaaattcccaaatacaagagtaagggaattcatagtcctaattcaattggaaattcttaaagaacaaaaaaattgtccaagattgccaaaattaatgttaacctggtagttttaagagaaacagacttggttcacgtcatcaagtcaacctcacagaagtgtgatgttgactagggggcatatgttaacccgaaaacttttcctagtgatatggacatcaatgttggatacgtagcaaaaaggataacatctttgagttaagtagtcctatgtcataacagtcaacctgggaggggtccctagccttgcgtctaggttgactctaggaactctgggataggtgttcaaattctgctaagttgtttctgttggaattattttaccaggatcttagatctactcacaggtatgttatttaacaacctaaatatgaacttctaaaacgattataaataaacacatataaagtatgagaaaccttacagtggttgcagcggaatcttatgtctcctaattccactcagatctctaacccttgtatcctttttgtcgcagagtattatcaagatctgagcctgaatgtccttcttgtggaatctagattcttcatgatcttcaacnctatgattgaggtaccacttgatgtgtgtgggcactactctatcactcaagggtttcgaattttaatgttgaagaagaaggcttaaagtgggggctaggtttagggagagaaggc

SEQ ID NO: 213851 - DNA, 1354 bp, Cannabis indica
taaaaaaaataaaaaataaatatatatataggattattattacagtatttacagtaagttttacctaaatacaacattgtatacgcttcgttccggctatttaacttttctttgttatataagtgtttactttattcggttttatatattcacactatttgtattttccattttctatttaggtaggatacatatacaactagtctatatatgtgccaatatgtacttttttatagtattttttttaaaaaaagtaaagaataaaaagaaaaaagcccaccaagcactgcaaacatcatgtagttaattgtaatgagaataacatttatattttcacaatgatcaatttatttatttatgttaaggtggaaatgcatccgatgtggaggcaagcaaaactgagagaggtttgtggggaccacaaaatccatgtaagtgcttactcaccacttggtggccctgggaattcatgggggtcaacggctgtgattgaccatcccactattcaatccattgccaaagaacgcaaagccactccacctcaggtaacatctataacattaattacacatttgatgttgaccaaataaagtcaaacactaaaacttgagtttatatggttcttttgaaggttgctttaagatgggggctatcgaaaggatcaagtgtgattgtaaaaagcttcaatgagagtagattaagagagaactttgtagcccttgatttgaaattggacgatcatgatttcctccaaattgacaaattggagcaatggaagatcatgaggggagattttctttgcaatgacaccacaagcccatacaagtcaattcaagatctttgggatgatgaaatttagtaataactacgtacgacactgttttatagtattatatatatctaaactaatttgcaacatctacagtcttatgttccatgttattcttgtcttctttttacttgaatattggggtttctcaagcaaaacattaaggaaagagaaaacaaaatgtgtttaaagtatttacatttaggaaaacccaaagctatttgtatatgttccgtataacttatgacatcgaaaaaagaagttgtgtttctccaaaaagtatatacattgaaagtgtgtccttctcaatcgatgagttcttatgccaagtaatcaactacaataaagaatatgcattatacatcagttgaagtagggttcataagcaatagtttagagctattttggctcagctgatatacatgccattttatacatttttcaaattcttaattagctaccttattctttattttagttcatagtgagtgcccttagttcgcgcgggaaagaaaactatattga

SEQ ID NO: 213852 - DNA, 861 bp, Cannabis indica
ctacgacagaatgacttcgtaacattcaagtcgatgtctctccgagtgtttgttgatcagagactttggtctctgttcttataggagttgagtccagcaatgccattggtgtaattggaactcagaactgactttgagcaacactaggagtcgtcatggtagccttcagtgactccatttgtgattttattgcgacataatcactcctaaatgttgtgttctcctccttaaaggttgcattttcttgctccagaactgtagttcgctcagccatctcgggcatttaggccattattgtggcaagttgttcattgacattgggttgttcctgggcaacaaactctccttcttctgccatttgaagtgtggtaatgatagattgtcttgctcgtagtcagtttgtaagggccccacggtgggcgccaaattatagacgctaaaatctacaatgatcggaatgagcatttgtgggaaccgacaacctacggaacaaagacaaaggatgacgatgaaaccttgggacaccagggtggtgccggtcaaaggcactccgacggtgaagtcagtaaatttatagtgcgaagtagaaaaaaataagaaatgtagataaatactgcatgtgtctatagttatgtgatgatcgacggtcaaaccttgctaaacggaatgagaaagagtacgtcagatcgtagagaaatgataagtttcgtcgtaaatctatagaaaggagtgaatattcgtatatcttttccatcccccacctccgtccctgtgagggtctatttattatcttaggaaaacggctacctcttgaaacgtagtccatccctagagaaatggtcttcctccactttttttggg

SEQ ID NO: 213853 - DNA, 1016 bp, Cannabis indica
ccacaggaagttgggaatcgtctagagcctttgtatgaggagttcaggagcagaattctccagtgtttgagggtgatgctgatccactcaaggcagaacagtggatgcgtatgataacatccatctttgattttatgcgagttgagaataatgatcgggccatatgtgccatttatatgctaggagaagatgcccgtatctagtgggagatcatgtcttagggtcatgacccgaataacattacctgggatgttttccaaaaattattttacgagaagtattataatgagtctatctgggtagtaaaagtagtagagtctatacgattgacccagggtagtatgacggtgacagagtatgccaccaagtttgatcgattggaaaaaattgcttcagatgaagtggctactaaggttgctagaaaagcaaaattcattcggggattggatgaacacattgcatgggatgtaatagttgctgccaaacaacctagatttgttcggacttatgcacatatagttgaaaatgccctagctactgagggtgcagaagatcagatacgaaagaaaaatattgcgagaagagattcatggaagcagacatctggtgctggttctggtaggggtaatgaccctggtgatcgcaagaaaagggctagtgaatcatcatctgtaggcccaaacaaaatattccaaggtaactaaggtttccatcatggtgggaacaataactggtagacttatcctaaatgtccaaggtacaagaggcgccaccagggcgagtgtcaagctagggcctattttcagtgtggggtagtgggtcacttgaaaaagaattgcccacagctgctgcaatcaaaacagaagaaggatgatacacctattcttgcacgggtgtttatcctgaatcatgctgtggttgatgccggtccttccatcgtgacaggttaactctctattgctggtactttgttgactgtattgaatgactctggtgcgatgcattcttatgtttta

SEQ ID NO: 213854 - DNA, 729 bp, Cannabis indica
attggtcctttagaggcaaactagctccggttttggtttcactatcgaaattcagttcgtcaatttgggatttctcatttttcttgagcgaatccgcagttttctgatcaatctgaatcacacatttcaaaattacaaaataaacatacaatcaaatgacagatcaactcctattggaaccagaattaaacagctttctctctagtttcccgtgctttctcgggaaccaaacaggaaaataataacaaaataatttcattttcttaaattttttgatttaagaaagaagaaggaaaagagaaattgacctgctgaagaatgctttctgcagctttgagtttggaagagatccaattcgccatagttgttctactgaagctctccttcgtcaaagtctggttttttttttttttgccgtaatagaaagtatagaagaatcagagagtgcgcattttagcaaaacgcagcgttctgagaagagaagaagagacttttttttttggatttagaggatgcgtattttagcaaaacgcagcgttttcggtggagaagaaagagactttgattacgctaaaattcgagacggtgagcgattggtttcgccgtaatacatacgattggcgttcacggagagagaatgacagaccaacttactacacgtgtcatgtagggaagattatgtgaaagaggagtagtactatttatttaatcgggttttttcatttttac

SEQ ID NO: 213855 - DNA, 576 bp, Cannabis indica
ttaaaaatatatatatttttattgttttaattctaaattgtacaactaacgctgacataattagtgtttatagtcatgccatctacctgtaacaaaacttgagagatgagttaaggtacaattcgaggtgtgcataatttgatttaatcaaataacacctgaccgatctaattacgaccgaccgctaccagggccggcccaagtattgggcagcttgggccattgcaaaagacccccattttattaaggcctaattttattttaatttttttaaaaaaaaaaaagaaaaggcttatttttcctttttttttccttttatatatatataaataaaaaatttataattcaaaatttatgaacgaatgtttaaaaaaaatattaataataaaattgtagttttaatgtatacgattttttttaaagagcgtaattttaaaattttgcacaaggcccccaaaatgtttgggccgaccctgaccgctacattggatatccaattataattgtatcgaattagatgttatttttaaatattcaattggatcggatcaaatattggatgatgtgtttaaaaat

SEQ ID NO: 213856 - DNA, 1299 bp, Cannabis indica
gtaaatctattcgtatgtgaaatgactgatttgttacttaagtacgtttataccaacgaagtacgaaatgacctatgttggtttggtaggtagtaaatccgggaaaagagacatttttagtcatttcctaaaatgtcctaaagtaaagttgacaatgttatgtacccaataaatgtacttaagcttatttatttgtagcgccaattcatattcaaattgtcaaaagtacctccaatatttgatttatttatttattttacaaatttgaggcaaaagtctttaaaaaataatttattttgaagtggattagtactcaatctctaaaaataacggtaatagtctttaagctcatactttttataagttcattagtctttaaatccatgcaaatttgggccaacgaaatacggttcatcgttttacaaatgggtaactgtttcttgagccaacggttaaccatttgggcacagtggcaaaatacaattttttttacttaaattgtacataactcttagcttgtttattccgattttaaaaatttcaattgcgttgtcttagttaaaagatgaatattcttaaaattcaatttttttaaaaaaaaattatacgtcatttttgaaaattaaattgtcgctcaagttagttagtcaaactttgaacttataaattctaatgtactatgcaaatcactttgacaagactaaactaaacttatacctgttatccgggtttccagtaagggacacgtggattctaaatataagcttaaggcccatcgatgagtccaaataatataaactaggctaagcccaggatctattttgccttatgagaaaacatcaatacaactcgtccaagtgaggttcagtcaagccaagttagcatccgaaaaggtatatctccgtgtatctggaagagatctttagtgtgtatccagaagcctaatatagcctcccatttactgtctcgcacaaaataaggaattattttccttaaatctcaggcagagaataatatcttgctaaaaaaggaaactatataattggaaatcaggtaattaatatgtcattaactacccatgaatatatgacacagtatgaacagctagcttcgtgataaggcttccacgtcagcaaacacaaggtgtctcatgggctgggcttcaccggataagcccgaagtcaatgtattatttgtaaactccccattagagggaaaatggtaactagtatggcctctataatactataaatactcattgaatccttcatgcaaagggttgaaaaagtcttgacttac

SEQ ID NO: 213857 - DNA, 685 bp, Cannabis indica
atgattttcatattttaacaagaattatatatgtcttgttatttttgatttatagttgtcttttttgttattttatagttatttttatattgtttaggtgttcaataattgtttaatagttatttttctattatttttatgtatttttttgtacagttgttgtttagtttatgtatattttttatcgtgtatattttcattttattctagataaatttttttgttgtatatatgtgcatttattttttatttttatgttttttttttaagttatagttattttttaactatcactaactcagaaaaggaaagggaaaaaaaagttgaaaagaatacatttttaatgacaaatttcataaaaaaagaacaatataggtactgtttggtagcacttttgttttctaatttttaaatcaaaaaatgaaagtaaaatttttgtttataaaaatttagcttttgaaaaacataaatgcgttctgtaaccacttttgcttttcaattttaaaaacagaaaacaaaagtgtgttctgtacagtttatttccatttttattttctgattttatttacgtcgggtctaggtccggggtcgattttgggttcaagttagaagctgggttcagtgccagggctgtggggggatttgagtccgggtcatgatcaaagtctaagatattgattaagaa

SEQ ID NO: 213858 - DNA, 771 bp, Cannabis indica
gccatgtgcctttgcctgagaaccttcccctccttgacaccagcaagagactcgaagccatgaacctcacctaccaaccgggaactgctactcccacaggttccaaggcctcaaggaagagaagcaagcctgactcaaaagaaaaatttaaaaggcaaactgaaatggtcaatggagagcttcgtcaccaaatcaagcgctcccgctccgacacccctcaagccacggaaattacatctggaagcgcaggccctgccgctgagcgggcctgcccgccgccatgaaacttgtcagctggaatgcacgtggtattgggagtgatcgtgcattccgtaatctctcccgtttagtctatctttgtaatcccactttgctttttattatggaatctaggatggctaagaatgctgttgacaatcttaagcacaagctccattttgactcgggtttggaaatgcctaggttaggtagaagtggaggcttgcttttattttggactaatgatgtaattgtcactttgctatctcaatctatcagtcattttgattgctatgtctcgtgttcaattaccaatgtctcttttcatcttacttgtttttatggctccccggttgattctctcaagtctcatacgtggaatattcttaaccgtattggtaggggtaatcctcgagacccgtggcttattattggggattttaatgcttttctcttttcatacgataaacaaggaggcaatcccgatagaggcccttcctcggatttcagaca

SEQ ID NO: 213859 - DNA, 504 bp, Cannabis indica
atatggcgtcggttatttgaaattaactgacgacattatgtgttcatttaattttgacacttgtaggttatgacctatttgttattcttaaaataaccgacgccatatggttatatattaaaaaaataattaatttttaaatttaaacttcaaaacatctcaaattaataataatctattagaaaaattaaatattatttatttgaaaattttgatatttaagtttaattactaaaagtaatattttatttcgatatttatggttttgaaaaaaaaaaatataaaaattggtgagaaaaaaaatcacaaaaatcatatttttgggtgcaaagcactctctctgagtgcccacgctgcatgcagcctcatccgcgcgcgtaggaggctactggcggcctcattcgcatgcccaagggctgcattgcagcctcaacttcggacaaaatgggtgcttctaacacaggccagcagttcagacacaggtggacatcaccttgtttgagc

SEQ ID NO: 213860 - DNA, 699 bp, Cannabis indica
ttatataggacccgatacttaagtggaccaatattaacatgtaagagggtattaggcaccactagtaccctttagcaatttttttttctttatttaatcatgctaacgattcacaactaattattcagaaataaaaatcttactagctaatataaaaaataaaaaaaatacgtacgtttaattataattaataatagtaaataattaattattatgtatataagaaaagatagatctcttaatttcacataaacaaaaaagatagatataataattaaaattcacatttagctagccttttgtcaacaaaaatttttttttttaaaaaaaaaaaaaacgacatttagccttaattaagtcattttaagcgtccttaaccgtacccatgtttttcttaggagtaccaataacccacaataaagggacatgaaaatttttcagtgtacgtgtccctttaaattaaggatcactaaaatgtaatattgtagtagctagtgaatagtgatgatgagtctgttacaacatgataaagctccactccagtctccagctattgctttggaggctataaaagagtatcatttacttttaacttttacttaggtgagtagctgccactaacagatttggaaataggcctagctagatagttactttaacttcaccttttataatctcgaatcatatatagcaccaatt

SEQ ID NO: 213861 - DNA, 679 bp, Cannabis indica
cacatgtgggtaataactaaattcaccggctcgtacggaccttacccgacagtctcacccatactcgattccacaggtcatcagtgaatcgcctacgtagcttgagatagttcgcactttcaactctattaactctgcctcgaaggtgacgttagggtcctgaggagtctttgatttacgtgacttgggagacattatttcaaagtccaagtaaccaagttcaaaagcaattgtgactttgggtaaaaataaaggtttagccaaaggaatagaggaaacactgggaggtttaggccatgcagcatctcacaagaaatggcgtttgccttcagtgatttcttacaagaagcatctgtggtgactagcattgtcttcatgatggattttcactaagtgttccttaattctttcattgtttacctctaatttggatgtgggttttgaaattttgggtttgtaagggatggaaattttagtaggaaactcaatttctaaatcttctggacgatgaatctgtgaactagattgggacattgctgcaaggagaaagcaatcccaattcctgtgagaaatttatcaaaccagaaggtagtgaattggaggttctggaaaacctacgtactgtctaaaccctaatatttaccaagatatagtttagccctacaaattactaaaacca

SEQ ID NO: 213862 - DNA, 622 bp, Cannabis indica
tttttcttctcttaaatgccttgaacatttttcattcgaacttaattgtgtttgcttgcattttttttcacaatgtaagcaactatattttgatcaaatgtatagtacattggggtttttccattgctcgtaatcttctcgtttaagtagttagttatctaccaaactctttgattttcaagcacttgtcaattcttcctcgctatggtagtaataatctgccttaagcaaagtggaatatacttctaatgattttatcattatgtatatttcagatttgctcacatgaataattaggttatctatccattttctaggttcaagtacttttatcaggacgtcttaatatctcctttagtaatttcctagctcgtgcgaaatgtttgtattcagttttatacgcaagttagaacttttgattttcctttctcgtcagataggttttttttatccaaaattatagttgtttgatcccttcttcgtcaaaaaggtttaatcaagatgctataacaattcgacccctctctcgtcaaaaaggtttggtcaggaagttatatcagttcgactcctctttcgtcaaagaggatttgtcgagaacctttgaattatttttatcaaatta

SEQ ID NO: 213863 - DNA, 528 bp, Cannabis indica
tatttatgcctcatatcttcaattgttatctaaattttttagacaatgatggttcatcaaactaaagtgacatgtggagtacattttataaattgggtagatgattttactcttagcaagccgtactgaaaggattgattctcaaggttacagacagaagttgtaacatccaaacagagtatgcatatatatatatctgactagctttcatcacacaggttgttcgcatgcaccgaccaattaagggatgtgacttagcaatttcagatatatatccagtatatctccaagcttgcaagtcacacaacaattcctatattcatgggatagattcatgtcttaagagaataaagataatgagcctaagtttctgtatgtcctactcagaggaacgccacatgtcgtaattacaattaattaattttgttaatcggggtccataaaccaagtaatttaaaagtaataataaacttaatttaaataaataatttgtaattttacagactttattttaaattaaaatattta

SEQ ID NO: 213864 - DNA, 502 bp, Cannabis indica
aaaaaaaaaaaaaataagtcaattatttttcacatgataaaacttagtaaataatgatacaaaataaagtgttgaagtagtagcatagttagtggcaactacatttgttgaaagtgttccctagcatagtacccccattttctcccgcacgacactgcttggttggaagttggaagattttttatgaaaaatctttgttttcgtgtttatgttagcttacatgtgttgtgtacttaaattgtattcgagatcctgaatcaatgtttatcaaacttgttttaatttaatcaatttatattttaaataacacttttgatttattaattatcttttttttttaatagataatggaatttcattaatgacaatcaactgaaataatagcatgcaatttaatcgagacatctccttgttagaggcacgatcaagattagaattagaaaaacgagttaaataatcagccgcctaattctccaatcgtttgataaaaaataaaataaaa

SEQ ID NO: 213865 - DNA, 996 bp, Cannabis indica
tctccaggcaccaaaataccacttttttaggtgttacgattttcatctcgatcctcgactaagaatttaacaccgttaacaatacatccatgattacaataacatgttgggttagagggatttgtgatggcgtataactcatctgatacttttgcaggattatctgctcagatggattgttttatcattgagtaaaattttttaattaatactagattagtacactgtattttaataacaaaattagtagaaagcaatacttactcgagacttgaaacaactaggaaactcattctcttgaattgtgtcaagattttgatgacccctaagttgtagctcgttcctatgctcattacacaaaaagtgggaaaaatgttagataatgtggtcactaaagagaactaaatcgattatggaaaaagtatcttacgtgatatacttctccacttcattacaattgttcagaatgtaccactctgcctttagtttatcttgcattggtaaagcaacaatagtcctctgactaattgtcagttatgcattgtcatttgattgcccccccaatgtcattcttctcgatttgcactcacctctcaccttacatttacagcccaaaaccatactctcacaaattctttaactatatatatatactagtttttgggcacgtgcaatgcatgtgctccctaaaattagtataaaattagaaaaataataagaataattatcaaagtaataattaatatacaattaattaaagtggtcatatacatagtttagtagttccacacttcacacaaagaggaggtcccaaatttgaatctagtggcggagccaaccacaaatattagaggggcaaaaaaaatggataaaaaattactattataaaaaaatattattattattataaagaaaaatataaattttatagagattatagtagatatataagaatagatatgaaaatatgtgaagataaaaataaaaaatacaaat

SEQ ID NO: 213866 - DNA, 1516 bp, Cannabis indica
ttttatatatgtctgttcgaccagtaggcctttattgagacaagatgaccagccaagcggtctttagacttggaatatatttttcattttcaaacaactagctgattgggtagccttttaatcccaggtttacatgctttgttatcattaatgaattttgttccttgtgatgatcattgtgcaattgtgttcatgttgttgtttttttttgtgtgcttgttatttgtttttaccaatgctttgtacgggtatagttgctcccaaagtgatcgagtagacttttgactcttggtcacttgcatttcacaagtgtgctttttgtctgttcgagtcttcgggtacgaccagacctttgtacgcacttaatggtaaatttatatcttgctgacacaatttgaatttaaacaagcatctttattcatattttgcttaaaacacacttgttaccgtagtaacttacataaaagctattatactgatttggtccaatcttaagcttaatttaaacaaaataaattgcataaaataaagattgtactttcagcggtggtcatctaacctgagtactttgccatttcatcccaacgtttgggcatagtccgcccagaaggccatttacttaagagtaaatgttctttcatttcgtacttgagatggtcattcgacctagtacttttactagtagtatttccttaaatgttccccattttaataccttggtaccagaacgagttgcatgttttcgtcgtacttacccagtttgtatgctcctgattctagaacttcaacaacttgatatggtccctcccagttcggtccaagcacacctgccgtgctatctttggtgttcaagaatatccttctaaggaccatatctcccacaaagaatttccgtgctttcacttgcttgttaaagtaccgagctaccttttcttgatgggccactaattttaggtttgctgtagttctcttttcttcaattttgtgaagtgattctgcaaggagtgcatggttaacttcttggtcatatgtcaatcttctgtgggacagaggttctaattctacaggcagcatagcttcataactatacgccatggcaaatggactctgtctcgacgctgtttttttagttgtgcggtaagaccataatactactgggagttcttcaagccagtttcctttagcatcttaaagttgtttctttaaggtgtcattaagtgtcttgttgactacttcgccttgatcatttgcttagggatgcgccactccagagaaactcttacgatcccatggtttgcacagaaatcattgaaggattgactatcaaattgtttgccattgtctgagtctatcttgtacggtagtccgaatcgacagattctatttttcacatgaagtcttgcactttctaagatttgattgttgctaatggctcagcttccttccatttagtgaaataatctactacaaccactgcatacggtaccccaccattgcctttaggcaattgtccgat

SEQ ID NO: 213867 - DNA, 722 bp, Cannabis indica
tatttctaagtgaacaaataatttggttaaccatgaaaataaattaatcaatccgaaatgattcctcagtatactttactatctcaccatcaccaatattttcattacattattttttctacgaatcacacgtttttcaaaaaaattaggctcaattctcatctcatttgaaatttctttagttgtaattatagctaaaacaaatccttctttcttataattttttaaagagtaatttacgacataaatacctaagtttatcattccgttgcaatttaatacctaaattaaaattttagcgacataaataccttccgttacactttcagacattttgtaagtacctgctgttatcttacacactagacaccagctggcatgccacatcatttaaaataatgccacatcatcttataaaattgccacctaatattaactattaaaataaaaaaatgtaatttgattaaaaaaaaatgtacataaaattaatttattaaatttatgtaatataatctgatattaaataataataaacattaatcaaatgttacattaaaaaacatatattcttcaaagttttaaactgttccaaataaaaaaaaataaaacaaacaaaccctaaaactgtggaagcataatcggggagagagaaaaaaggtggggctggacgataaacttcgacctcgaccaaaggttctcgcgacaccttcttctccgaccac

SEQ ID NO: 213868 - DNA, 560 bp, Cannabis indica
tttttttttttttttctttgatgggacaacagttcagcagtatcaaaattgagaccttagttctagggaaatttcaggggcagatatacaattacagggaccttggaacattttttttttttttgaataaaagcgtactattgataaaaaaaaataattaaatcttgcggtcattaaaatatcgaaataacaccaaatctctggtgagaacacgtccacttagccacgttatgggcaacaaaattataagttctactaatattagaaaaaatacaacttgtaaataaaggataataacaaaaagagacgtagttatcaattgcacagtgggactccttcccattaagagcgttgataaccacccccgagtcactctccacaatgacaaaatcgaatccaatgtccctagcaatagataaagctagacagcaagtcgccgcttctccgcataacgcgttagaaaactccagccgagatgtttgaacccaaatcaccttacctagatggttcctggccacaactacagtacacatactctctaaccctactttaacatcaca

SEQ ID NO: 213869 - DNA, 732 bp, Cannabis indica
aaacccttggacaaagaagagttagtaatatacttagctgttaaataatatgttgtaagtgtcgtgttgatgaaagattaaaacaacctccagcatccagtctaatatatcagaaaacaactcatggaagctgatggacgatacccattgatagaaaagcttacttactgcctaatcttagcaacaaggaagttaaggccctacttcaaggctcatcctgtttgggtatacactgaccaaccattacaccaagtattacaaaaacccgacacttctggatggttactcaaatgggcagtagagttgggtcagtaagaaataatctttcaaccctgaatagtagtcaaaggataggctttggcaaactttgtagttgagtgcacaggcaaataaaaaagtagtccaaaggacaaccgagagccagtacaagaattccagaaaaataataatgaagacagacctacttggaaattacacgtggactggtcaacaacaaatcaactatctggtgtaggaatttcccttgtcacacctaggggcaacacctgcacggggcagtcaaattaggattcaaatcttccaagaatgaagcagagtacgaagccctcattgctggcctaaaacttgcttgggatttgcacgctgaacacatcgagatctgtagtgattcacagtttgtagtaaatcatatgcccagagagtacgagggctgagggaaaaatgatagcctat

SEQ ID NO: 213870 - DNA, 1584 bp, Cannabis indica
atctaaaacagtgtatgtagaaattgccatttggttgctttcaaatttttagttcattagtttagttattgtaatttggtgtgttataatctagactggattgtttggtggtggtggttttaaggcacattccctatttactattgaccaactgttttgtgagttgtgacagtttggttagttatgttagttatgtttgttatgtacataaatagacataagcatacttgaaagttgagttaaccgttttctgcttaccgcatttgatttggaatgctttgctcatgaatcttgttactgtagttcttcatttttgtactgtgagtgtatgaatcacaacataatggatactgtttgtgtaaatggcagctcattgattgctttgctcaaataatgaattttcgagagaggaaacgcaatggcattggatcaaagagaacatgatttatgcccacaagaatttttgtacgaactttgatatttaaaaatcgacatgaaccttttgtatttgtgctttaatacaatgtcgactatgctttcatttaaaatgtactctattgtgtgtgcttattgtgtagagggagttacttggaagaacgatgactgtggagaggatggcgagggagcaagagtggtccattctttattacgatgaagatttgaatttatgtgacaatgtaatttgcattttctggatacttttgtcttttatcaaatttttttagttacttttttttatgacgttgtttgttttactttgttcgcatatggtgatacccctattgaatagcgagagtgcttcgcactggtatgcagtgaatctgaccatggataatgcaacaatggaaatcagagattcgttgtcttctgcaatgcataagaggtcacgccggaatgcttgcctagagacggtatacacgtgtgtacattgtttgttgttctattagtgtaattgcaagcatctcagctgtaattgttttatttttttgtagctgaacaatttggaccaattgcttgcctctgtgaagccagcaaacctcaaatttggccagttcctaattatttcttctggcagtgactacacacagcaacaaaatgggcacgattgtgggatgttgggaaaattgtcaccacgagagtaacaaggctaaatatgcagtgatggagggagttaagaagaaatttggaatgaccaaagctcttccatcaacatccacaactttaccagtatgtagtccatcaaggtctcctcgagaccctcgatttagcacagcgaaggctaggtccgagaacatgtggactggaaagagcaagtctcccaaaacccgtcattctaaaaggttggcatcaagtaacaagtagtaaaacactgttgtagcatatttagtacaactgttacaaaatttaggttttagttcataagttatatttagttatgttatatatttgcatcatactactattaggtgattctgaattgcactgatgttggtgattttagcatttactacatggtaagacttgtggttatttttagaattcggtggaagcaattattataactatatggtgattattattact

SEQ ID NO: 213871 - DNA, 1174 bp, Cannabis indica
ttagaagcaaacataaaatatctcgaagtataaaattagagaaaaaaaatgcaagatgaagtaccccgacctgctctgcttgggggttgacttcaaattgaagagccagttggtgtcgtgcagggacggctcaccccatccttgagtggcatagaggatatacagggcaaataaatacttgatgcccttgggtgtgaactgagtcgggcaaaggtggtaatagtccgtaatcctttttatgtacgtatgcaaaggcaccatcgcaccttgcttagtatgggcaccggaccagacacagtacccctctcttggattagttgcccgatgatttggagaagcgaagaagcattcaaaaccacccaggtatccatccttctccaaactcctcaactgggcctgggttacaatggacagaggagacacccaccgagctttaaaagccccttgcctcctctgagggatcgcctcggcgtactcctcggtgatgtaatccttgccttcctccaggacgtcaccagcctttgacactggttctctggcctcattgtagcctccaaagcgcaaaggccgaccagttccttcctcatctcggcctcagatgtactatcaggacgaacctcaccctgatcctcagtttcttggacttcaacatccccctcataatcctcttcctcagcagcaggctgggcctgttcagcactcggcatcgtggcatgccgagccacgtgagggtcaaccgcagaaatcttctgcatggtttgttttgtgctggccatcatcctatccctggatggtggttggttggtatgccccgcaacagtcacggcaggagtggaaatgggaatgccaaaggcaccagaacttggacggcccacaagaatggtatcagctacgtttggccggacaatatatgtccagttggatggcaagtaacgtctccaccccttcctgagttcccaaatgaagcgctcgtagccttcacctacaatctgctcggaataaaaatggtgctgcattttgggttctagggaaggtgtaccctcactgctcacatcccagtcttcgaaactcgaatttgaaagtccgtcactggaggaggacagactagctcaaagatgaggttggtcttcgtatgaaagttggagaagactctggtcgatatgatgttctcctc

SEQ ID NO: 213872 - DNA, 1413 bp, Cannabis indica
tcaacaaaattaaaattaaagaatgaactccttataatgctattatattatattgataagttattgggatgccaaactttagatctatatatgatgtgatataatgataattaattagttagttttctttttaattaggctcaataaggtgatattaagtgcaatatatgtatgtttatttttttttaattaggcacttgttttttttttaaatttttgaaatagagcttgagattttgattttttaagaaatttattttaactattgctacattggtgtgttatttgaatgtgattatatatattttttaaatttttaaatttttttaattaggtaacatatctgataatgcatatatcgtaatttatttattgttaaccaaaactcaaataaccaaatttgagtgtatctatatatttattggatttgtaaatatgatataaaagttttttatttgcaaattttacgaaaaaatatggtgtgtgaattcaatttaaaagataaaataaataacaataaaattaaaaatatggttaaaaatatttacaatatttataatagtttttcattttattttaatttaaagttaaatcaataaacttaaaaattagattaaaaatattattaatattctaagtattttaaattaaaataaaaaatttatttatataatttttatttttaaatatatataataatattataaaattaataaagaatattctgttaagtaatatgatatattttgttaaagttaacgtagaaactaaaaaaatatcgttaaaccaagaattatgttacatagccacactttatatagtatatatatatatatttatagatatcacatatactcgtcttgaaatataaaaagtaaaaataaatttatgaatatctatatatctatatatattcacatgtcaaaaggtctaaattttcttatttgtaatttttctaaattttatttaaaaataataaaataaataatgtaacaaccattacatgcaacaagggtgtgtagggcatgtatgttgggcaatccttgttgcatgcacgttgattgtctcctcttctccgccactctccttccccatctctccaactcccccttttcttccccatctcccctactcgcccttctcttattttccatctccccaactcgccactctccttccccatctccccaacatgccactctccttcctcatctccctaacttgccctttctcttcttctccatctccccaactcgcccttctcttcttccccatctccctaactcgccactctccttccacatctccccaacttgcccttctcttcttccccatctccccaactcccccttctctttttccccatctctccatctcccaactctcactctccactactacaaatatcaaaat

SEQ ID NO: 213873 - DNA, 1091 bp, Cannabis indica
aaatcaaccacttcttacgtttttatgacaaaccagaactgtataagttggaatgctcagttacagtccgcggttgctctttccaccaagaaaacagatttcatggcgactacaaaagcattcaaggaagctttatgccttcaagatattctttgtgagttgaaacaaatcaaaggatgagtgattgtgtattcgaatagcagccattcatctatctttgtaagaattgggtttatcatgaaaagagcaagcatatagatgtaagactctactggattagaaagaagatagaagaaggtttgattgatttagagaaggtcggtactgaagataatcctgctgatgttgggactaaggtcttaaccttaacaacttcaagcagtgcttgatcttaatcaatcttagaagttagtatactgagattcttagaacaccaaccaatgatggttgcattctttcttcatcatcgtcattcttttaatttgaagtaactaggtagaatttgtggtatagttcctccaaataaaaaagtctccactatcactcctggaaagtggtcctaggaaagttaggtgtctcccggactttgttcccggtcaactaacttgtccttttgggaaggagtcttgtggaatgatagtcgagtctagaagagagttcctggatgactatcatgtccactccaggtccaatcttctagatagctagcctcactccaggatggagttctagttggctagttattcctcctggaatggtaattctagatagtcgactcaagaggctctgatacttgaagctgacatggagacttcgttcaaagaggagttggttaagttagttatttctaactaacttaacaacctcgtttcttgcagccaccgactttaggatcttgatcctaagcctaaaaataccacattcacttatcattttaggaagagatcagaggtacgagaataagaactcagagagaagagattgagagtttgagagagaaaagattaagaggcagagagagaggtgcagagaaaagagagagattgggtttgggttttgtcgaaaaatcttttgtatatgaagtagattct

SEQ ID NO: 213874 - DNA, 677 bp, Cannabis indica
cttgagcgtgttggacttcttttctcaatacaacaactaattagcaacaaaataacaacttgaaaacaaccaaaactaactttaaaattttttgaatttttttttaaaaataattacatataaaaataaatgtacttaaacccaaatcaatttaaaaataattatacataaaaataacgacacataaacttaaaattaaaaataataatacataaaaataaagacacaaaaacccaaaattaacttgaaaaaaaaaagtaactacaaaatacttgtatataaactcaaaaaatatgtaacataaaaactaaaacatagactatataacaaaaaaatatgtaaaataaataatttgataacaacctcactttaatataaataaataacaatttcatattaagatgtaaattaattaggcaacaacaaatttcatcaactcaaaagaaactcaaaaacaacacataaatcatctcgaaaaaaaaaactacaaaatactagtacattaactcaaaaaaatatgcatctatcaaaaataaaacatatactcagttagtttttacttggttgaacaattaaataacaacgcacaaacaattagataacaactctattttaataaaaagttattaggcaccaacacaatgtgttaaattgaaaaaaaaaaacaaataatctta

SEQ ID NO: 213875 - DNA, 696 bp, Cannabis indica
gagcgacataaatccaattgattttttttagtggcataagtatccaatgtttgtaaaactgtaatttttctctattttcgtcaatacaggctccgttttgaaatttattaaaaaaaaaaattgtaagtaattgatattacatattttttgtccaaaccaaataatttaaaatttggatcttatatgtatcctgtttaagacaataacaaagtctgtactgataaaactggaagaaaattacagttttataaacattgggtacttatgccactaaaaaaaatcattgggtttatgctgcttacaaacaaactttgagtatttatgccactatttaaaaatataactattttctaaaaaaaaatacttaatttatttaagatactacatttaatatttcattaaacccaattatgtttttaaagtactatattttttttatcattatttacaaaaaatacataaaaaaggctcaattacattttttggcccaaggcccccaattagcttaagacggtgaccccaaatctcgtctcctgctgaaacataaaccgcaacccatacatcagagcaaacaaggacactagtctggcttgaacccccagccagccccagtctggacatcctggccccttgaccctcgatcccttgcccactttctctcacccactcctcacttataaaaaactaaaaaaaaaa

SEQ ID NO: 213876 - DNA, 873 bp, Cannabis indica
tatttttacggaattttacaaaaactctgcaactagtggagcaacctaaatcgcaacaaaaaatagtataacaacccatacagaaactaccgagaaaccactttagaaactcaaaccgtaaatttgaaaaaaaaaaatagtatatgagataattctcctaaaatatatgtagggattatatttttaatattaataaaaaaattaaaatagtaaatacattatttaaaaataaatataataaaaaaaacaaaaaaaattattaaaattaatacaaaaggtgtaaaaggaaaattaagaaagaaaaaagaaatatgaatagtaaaaaataaagtgtcaaatttaccacaatttaaggacgattttttactttttcctattttgtagtgaccatccttttttatacttattattcattaataattacaccatttccactttctccttaattattattattacacacttgtatttggaagtatttgtgatatttttttcaactaccaataattataggattccatatgcaaagtaattctatttttgactgtttctgataatatctttgtatttgtagtttgtactattctattgttacggacagtgacacaaccactctccctcgattctataaatccaagatttatgtgattcaccttttctgagtttctgaatccacaacacattttctttcactgaaaaaagaaaagaaaaatgcttcttaggagttcatcagcaccactcttgaattcatggctacctcattcaaaagattcatcatcaccagaaccagagccattaatccatctccaaagaaccaaatcagtctccttaacctgttcttttctttcctcttcttctacttgttcttcacct

SEQ ID NO: 213877 - DNA, 702 bp, Cannabis indica
aacattctaatgtaacaagagaaaaaatttaataatttttttatccattttttacatgcattttaaatttaatgcatcaaatgtatattctattcttatatacaattcttttttacatacaatttaaaataaaattaaacatttctttatacatataatttttttttcttcttttgaatttattatttattattatatttattttaatttgttgttggagacataaaataactataatttgttttattttgatgctagtacatatgtgaattttttttcataaatattaaataatttaatattaaaaagtaaccaatctaaaataaccggtccaatccacattcttaccgattagattagattgaatttgagctattgtaaggatttgattggatccagaaaataaaatccacacttagtacagatcagatacactatgagtacgtaaaatagtgcggattggattgaatgtacacgcaggtacttatgctaaaaaaaaactcttttgagttaatagttttaatagtttttaaaggaagagtttcataagaatctaaatggaaagcagaagggaaagaaccacctaggacccagcccagtagaaccgatggtccaacgggcatgagcagcaaaagccaccacactactctaccagggcgaccaatgtacagcaccgcaccccaaaggctatgaccatcatgt

SEQ ID NO: 213878 - DNA, 528 bp, Cannabis indica
atgtttagcgtaaatgttagttggcgtcaaaataggcaaacctatagccatcagattagcatatgagggcatcggtgaggtgtacatagagatgcaccgagatgccaacatatatgttctaggctattagatagtatgagttatctgctaccacatcagtaggaccagagtactgagtataggctggatttacggttaatcatactttgtcaagaacgttcctgactcagttaggtttatgatcaggtgtatgggcgccaggttatagcccaagatatttttatgtttatgttatgcttttcttactgagtctgtcgactcacagtgctatttacatgtgtaggtaagggcaagactaaagttgaagagtcgtgagagcgagaaggcgaagattgtacatgccggggctgttaggcctagagcgtacgatctttgggacatcagggctttttactgtatagtcgctagccgacaaaacttttgtatatgaataacaaacttttgcaaatgtattttgtaaacgggatc

SEQ ID NO: 213879 - DNA, 424 bp, Cannabis indica
  modified_base (348)..(348): a, c, t, g, unknown or other
ataacctatacagtactaaacttaacccgtttctaaaaaaaaaaatgttctcatatcttaaaataaaaataatattaattatttaatagtgatgcatttctatgatattacatattgtagctggatagcgattatggtcactacagtatcatgacagttgtggaaaatatctaggtccatacttttattagatttttttaaccgctaactaccaatgccaataagaacagtgaagaagtacatggttcaagatcaacttaaggcccattggccattagagcaatgcgggcatctccaatcatggctttaaaaagccaatttttttttttttttttttttttttttttntttttttttttttctttttttactttattaggtacaaactaaaacactctcctacctagtaggtttaacggttttt

SEQ ID NO: 213880 - DNA, 1124 bp, Cannabis indica
  modified_base (48)..(48): a, c, t, g, unknown or other
ttataatacaaattataatacgagttagagagagaaaacaaaaaaggngtactatacggaatttttacataaaaaatcttcacaatgtactttaatttataagatcaataattgtcattcctttgtataagttttcttttatcattgtgactcctaaacttcatttattcttcttaattcatatgcaaaatatacttacaataatgtgttttcaatgttaactatttcttataattattgacaaattaattagataaactaacccgaaaatctatcttcgaagaaacttagaggatagaaaactagggaagaatcgaaatacaatgtgatagtagagaaactcttattaaattattttctaaaaaaattattaaattatcaagtgtacatattatttatttacgaaaaacacacatatttaaatttatgcaacctatataattagaaatactctaaaaaaaaaaaaaaaagtgaaacaaaaaataaatcaattaaggatgtttatatattataaggattaacaaacatcaatatgtttgattaatatataataaacatccttaattaacttatgttttattcactttcttttcctaataaaaaatttcttataagttgcataaatataaatataaacttaaatataaatatataatgaagggttatgctcatttcatgactatctttgttatatgatttaatttgatctcaactacatggttatagctctgttaatttattccttgaatttacaaattaagatttattttcaatttgaattattttttaaaaataaataaaataagaagtcaatttttataagaaaaaaaaagattgaagcaatttgaattagttaattaaagtagttaatatatagaataaatcttgctggtccagatattataattcaacacttcaaacaataaaagacaaaatatttgaaagcattattattgaatgaaaatatattaatcaggcatgttttttttttcacaaacacaaatcatttaaaaattaaaataaataaacatcctccagaaaaattattattatgtaaagttttaagtctagtacataactattaaaacaaaatgtccatactacaaaatataatttatttttaa

SEQ ID NO: 213881 - DNA, 744 bp, Cannabis indica
ttaattagactatttcaatatatttttttcaaaaggtccttttttatgggtcctgttaaattattttcctttttctttttggaagtcttaagttttgatataacacataccagaagtttaagctcatctcttagtaagaccaaatctatgaatcaatttcgtctaagttcacccaatataattgagtcaaattcaaacttattatttagttcatctataactcaaaaagttgagtaaaatttacttgtaacaaaagatagagaataaaaataaagtacacctttttcttaatatcattttctattaattgggacaaataataatggccaaattttgtagctaaggaaaatcaaattaataatagtgttgaaaatgatattcccactttgtatttttaattaaatgacattaccacgagtcactaaaaatgaaatcttaaaatctctaaaaaaaatatttaaaatttcgtataattgtactttttttaaaataatccctatatatattatcacactccaaaacaatttttttataaaaaaataataaaattaaagattataaagaatactcgcaattcacattcttaaaggaaaattattttatattccgaatgaagtcacctcttgaattacgtaatgttgtgagatttgttgagcgatatacaaaattgtaaattagtcctgaatctgacaaacttatagtatcatgtgactcgtctgagtgatatatatatatataactatt

SEQ ID NO: 213882 - DNA, 687 bp, Cannabis indica
gcattacagtctgccaaaccaaaagagttgacacctgaccttgacaattcaacttacttttttttttgttttttgaagaacatataaataataaattttatattttcatatattcaaaattctcattccataaactttctactaatatttttcaatcaataaaacggaaaggcaaactttaattcccgtatgaaaaattaaactttcaatctcaataatcaatagaaacaatgtcaaatttcaagttctcaaaatctattaaaataaataaattacttaataaaaacatatctcataaacacaaagtcaaacattaaaattccaataaaatattaaaactcaaacattaaaaacacacacaataaaatttgaacccagaacttaacacatattagaataaaaataaaccataaatgaggattatgttactattttttgaatttcaatatttattagcaacaaatttaatattttaagtgtttatgtcacaaattttttaatagtaaaattaaaagtttaatataattttattaagtaattcttattaattaaaatcaaataatttatttttttatatataatttaaaatatttaatatatccgccgcgaagcgcgagatatttactagtatatatatatatatatatattattcagacacgaaaacttacagtgagaatatctccga

SEQ ID NO: 213883 - DNA, 1488 bp, Cannabis indica
tttgcatacaacttattatcccttagtcactgtaatactattcgaagatgatgctcatactcctcttttgactgagagtatacaaggatgtcatcgagaaagactatgatgcagttatcgaggaaatccttgaacactctattcatgatatacataaaggccacaagagcattagtcaatctgaatgacattaccagaaactcatagtgcccatatctagttcagaatgcagtctttggtatatcttcttcctgaattctgatctggtgatacccagatcgcaagtcaatcttcgcaaaacaatctttccctaaagctgatcgaacaaatcatcgattttgagaaatggatacttgttctgaattgtcagcttattcaattcccaataatcaatgcacattctaagggaaccatccttctttttcacaaatagaaccggagctccccagggcgatacactgggtcaaataaaccctaaatcaaacatcccctgaagctgtatttttagctccttgagttccgctagagctatcctaaaaggttcctttgaaacaggttcaactccaggtgccaagtcaatcacaaagtctatttctcgttgtggtggtaatcccggcaactcctcgagaaatacatcgagaaattctctaacaactgtgactacctcaggcctaaatttttctgttctattagagtcaatcacaaccactaaaaatcctacacatactttgtgtagtaaatctctagcccttaacactgaaataatcgggattcgagaccctgaaccgatccagcataaacgaatggatcctcaccctctggctggaaagttaccatttttcgcttgcaatcaatgctggctgaatacttcgacagacaatccatcccaagtataatgtcaaactctcttaattcaagctttataaggtcaatactcaactccctatcttcgatcctaactggcatagacctaatgcgcatgttggagataaccaactcctcgctaggtctcacgggctcaccttttcaggcaacagaacacccgtgcagcacctggacttctctaagccaaggtcagccttcaaacaatccgagtaataatgggctcatttttcgcgcaactgtgtgcctcgtgcacacttccgtctctcgaacaactcctgccgagtcatgtcgcacgcatccatgagtgcatccatgcatcgaggctctctagacaagatactcgcactctccataggttccgaccatggtaagacaaatcccaacaccgacgctcaccttgtgcctcgtgaccaaggtagcatgtgtggcaagatgccaacaccaagttaatatgccaacgcttttatcatgtcccattcgatactgtccaaacagtctccctcgtcgcccaaggactcccatacgtcaatagaccaatgctcaaggtgcctttcctccacacatgttggcaggaccttgcgacaagccaccaaactagttgca

SEQ ID NO: 213884 - DNA, 1242 bp, Cannabis indica
atatattaaattaaagtattaacttattaatattattataataaataaaaaatattaatataattattttttttaaatttaaaattttaagaaaataaaattatttaaacttaacataaaaatataagttaaagtaagtaaaataaataataaaaatgtaaatatctaatagtgagaatttaatgttgctaaagaaataaaagtttgcagattaatttattagaatataaagtttggggaccaacttgccaaaatttttatagtttaggaattaatttatcaaaaaataaaatttaaggacaaacttattaaaacatgtataattttgggaccttgagtacaaataaatgtatattttaacgggatatgtagagtcaaaagggctaataatcattaatttgggcacttttgccatatccctttttattattaatgaaataattttgggagttaaatggggcgaagttataattggaggcggagagagtgagtacctgaaaaaaaaaaaaaaaaatagtagaagagaatacgaaaggatgccgcttagtacgaccgcgatcggagcccttttgggtttgggcacccagatgtactccaatgccctccgcaagctcccttacatgcgccgtgtgttgattttcctgttcccattttctttttatagtttcccttttccgtttgtttcctgagaaaaaaatccaattaatcagggctttcttacttttgatgcagatccttgggaacacgttttgggcatgggaatcggtgtcgtgtttgtaaatcagcttgtgaaatgggacgcccagctccaggtagacctggacaagatgctcgagaaggccaaggctgccaacgaacgccgttactttggtatgaaattgattatccagttttagttttattaccagttcttctataactttttgttgttacatttcagtttgaatatgtcaacataggtatagaaaatcatgacataagaatcgtaattcagtggttgttatcttcttttatatttaggtcaaagagtaactatggggtactatcgaactttgtcaactagtagcgaagaatgtctttagggtgcaattacaatgtttaaaagtgttgaggagttacggtctttaagggtttaagaatagaacataattcatttgagtacaaagttgtttgaaaaaagcgcgaccttaaaacacccatctgcattttgttaaatgctgctcgtatgtgtgtgtttgtttg

SEQ ID NO: 213885 - DNA, 649 bp, Cannabis indica
ttttttttaaaaaaaatagaagttagatgtaaaattggttaattcgacctaacaatttaaaatttaggttttatttgtatcatgtttaagacaataacgaagtcattgttgacaaactgttataaaattataattttacaaacattagatacttatactgctaaaaaattacagttttataaacattatgtacttatgctgttaaacattagagttatgaattggaactaattgatctaaatgttaaatatttctccttctagtctgttcattgaagttgtaacaaaaaataaaattttcaaattttaccgacaatataaagaactttcactcaattatttcttaaacttaattagaaactaaaattttttattgttacatgcattagacacattgagcatttaataatttatattgataaaaaagtaacagtaaaataaaaatacaaataaaaataataatcactttctcattaataaaaatcatataaacacttatcaattcttcatttttcttatcagtagatatatataatatatatatatatttcgagaatttagtaagtgataaaaaaatgataaatttttaaatatcctaaaattaacaaaaccaaaatatgatgataaattttgaagttatcaatttttta

SEQ ID NO: 213886 - DNA, 522 bp, Cannabis indica
tggatccaaacctaaacccatactcaacctgaacccataccgacacttggacccaaactaggacctgtgacctaggacctaaaccaagaccgggacccggacctagacctagacccaagagctagggctggacctaggaacaaagaaccaaacttggacccgagattcaggacctgaccccagacccaaaccttgacctaaaccccaccccgagacttaggatccaggactcgatgcttggactcaacccgtaccccatgacttgaaagtagaacaaaaacaagaagcgaatcgggacccaggaacaggaccagtaccatgacctggacacaaacccaaaactgtaactggaccaaggcgcaaactcggacatagacccacactcggattctgtgtctgggttcgggtctaggtctgggtctggaatcggggtttgagtccttgttcgagtctaggtccaggtgtgaatcacgatttgggtctgggttcggtccaagtccgagttcaggtccctggtgcggg

SEQ ID NO: 213887 - DNA, 589 bp, Cannabis indica
agactaaaacacttaaaactatgatacatagacaggactaaaacacgatcaaaaccatgtcacagagctaaaccactcaaaatcatgtcacaaatactaggctaatcgtactagcaaaaatcaaatggcactagtgaaaaacaatatcgaccaagtcatacctaagcccagaaaaaaccgacatgcttggttggagaaaaaaggcaaccttgcatagctatttagaaacaaataaaatatatcagtgtgaatgtgtgatggacaaaggaaaaaaaaaattgttggtacactcctcaagaacatgagttgagtcaagaataccaaacgaaattctataatttaaattttctcttatgatacactagggaatagatccgcgcttcgcgcggttttaataatttttttaaaattttacattaaagaaattaatttttagttacgaataaaatctcaattcattctaatactattttatattttttatgaataatacaaaattatataatatattttatgtaaaatttcttttaatttgtgattagtcacaaattttaatcataatacaataaaataaaagcacatttcgaat

SEQ ID NO: 213888 - DNA, 607 bp, Cannabis indica
ataaagctaagcgatcattacatactctgtaacagtaaggaacaagggttagaaaattgaacgaaaggagacatttaatttcgctgcaactactgtaagattttcttaaacttttatgtgtttaatttaaattgttttaaggttccatgtttagaatgttagattagtaataattaacatacttgtttagtaaaagtaagatcctgattatatatgctttccaacagaggcctctttttctaaccagaaccctctaacacatcagattcactggaccatcccttttttgcaatacctttcaaacccattgcgggataaactttcatcttatccttgttgctcttcaaaggaacttttttagttttcttagcaagtcttttggcaagagatggggaattagaacatgagtttgtagtggccatttatacaatggaaaaaggaaaatcagttaaataatagtagaggaaaaaatagacatcagagaaagggaggttaaccacgaaatggaatcgtgattgaatgggtagtggggaaatgtaatggttagggcttcagagagcttcagctagaggaaaaaaaattgtgggaagaaagagaaagaaagtct

SEQ ID NO: 213889 - DNA, 530 bp, Cannabis indica
ataaaattatgtgggactcaatataattaattttactagcgatataatatcttaaaaaagtgctagacaatatagataccttttaacatttctcgtaatatattttcctattctagttttggcaattgtccaccctaaaatttaagatctttatatgtatttacaaaaaatttctaaggtgaggcatttaaaaaaaatcccatctgtagggcatttaatgtaaaacttttagttttaattgtttttgtttttggtaaaaagaaaaaaagactttagttgagattagattgagtctattataatatatactatagtaatattaatttttaaatctaaatatattttttcttctttgaaatcatcaagattggttaatgtttaatgtcaataaacaactcactataatatcaatataagacctaagtgttctcacacattatcaatataaaaactttactaactagctgcatgtacaataattcttgtcctatacgtgtataagtacgtacatatacatgtatgtgaaatgt

SEQ ID NO: 213890 - DNA, 603 bp, Cannabis indica
tgtttccagccatccatattattggattcccaaagtaaaaattgtaagaatcatcttctgtgagcaactttaacgagtgaatcaaataaactaataacatgaacaagagttcatgataactcaggatttaggtcaatctattattcatcattgctatgatatgaattaggcctttatagtaaacaagatgttagataaagacaacttcattcatatcggtccttgttatatgtaatctctattatgtacaacacattcactttaatgtcattttatattcgtaattcgagatgagattacttgcactaaagaacgggcatcactgaactgtactagcaaccattaattaaagattcccaaactataatatgttactgactattttattcatggctaagtgatcttagttctttgtacaactacaagtcacagcctcatatatgaataaagaattttctgatatttatataaaaataatcaataataaatattaataatgaataatttaacattcataaatatatcaaaaatgtctttataagcttttcaagacataaaccctgacagttgtgaatgtggttgtcggaggaaagatagttggag

SEQ ID NO: 213891 - DNA, 568 bp, Cannabis indica
  modified_base (227)..(227): a, c, t, g, unknown or other
tttttaaaagcacgaataaatacagaccgtgccagcacgacacatacgaacttacaacactagtcatgaatgtaggcaacagcaccgatacatacgtagaattatatatataagcatttttaatagtgttctctactttttctaactaaaatagctaaaaagttaaaacaaaaagttacttttgttattgttgttcaatcatactccctacttatatgtttgggggngggggggggaaactggacttggaaataaaatggcccaacaaaataaaggactactaaaagtcccacattgaaagggcccattaatataaatatacccaagtccaagaatataaaaacaggcccaacctgatatgaccaaaccaccaattgccaatccataagggggcactatggacaaaaaggaggaaaacgccaaaaaccagggaacgagtaaagggaatgccgatggaagtagaaggaggaacaagaaggaaagagacgccgatggaccaaggattgactacaagtaaaatagtatagcaggaccagaagaggcacccggatacccttccgacggaaga

SEQ ID NO: 213892 - DNA, 612 bp, Cannabis indica
ataataataataataatagtacatatttatttatcaattaaaatgatactacatatttatattttaataattataattattattttatatgattgtgaataattattgttgataaattatataaaggtaattgaagttattaaaacactcatttagtttagtagttagcctattatacttgtaataaaaaaaacacgaatttgagctcgtataagatagtagatggttttgtttaagaaaaataggtcaacccaagtatagtatgacatgattccgattacaatacgaaattcaagtgtaataacggcatgttagaatatgaattagtaaaagcaattaacattaattgttaatatttttataattaattatgattttattatgttatgggtcccattattagaaatgggcactagagctataatttcttaatttcgaagattttataaaactctaggagtattatttgtgttgtatatggttatgcaatttttatgatttttgctcggtgacgaagaaaaatgcgttggatggctgagtcacatggataagtttagaacctttccttagtgcgtcaaatatttgagatattatcgagtttgagcggggtta

SEQ ID NO: 213893 - DNA, 912 bp, Cannabis indica
ccctacaacgaccctcaacctggacacaaacctagcccgaacctcgaacccgaccctggccctggacctgagactcggacccagacttggacccaaaccccgaaccaggactcggtataggaccccaatcctggggcacgactctgtatctagacccgatttaaataaaattaacaattgaaaatgaaatttcgagaatcgatttttattttctgtttttaaaattgaaaaaaaaaaagtagttattgaacacatttttattttttaaaataaaaattttactttcatttttatgattaaaaatttaaaaataaaagtaattttttttaaaaaaaaaaaaataaagtgggatttagtctaagccttatacatttttttttttttttttaagctaacaaagtagtaagaacgtaaaacataacgtttagtatttaatccgtaaaataaaataatataatacagattaaatactaaatgtatttaaatatataaaattgaaagtatattatatttatgcaacatattatcttaaaaataagggtaacttacaaaaaatactggattttaactcaatctttacagaaatactaccacacggcaaaaataatttttatactatcttgggacttttttttttctcttatattgtaaacacccaaaataaaaatgaggtctctatcttctacacccacagacaaaactaccacagaaacaccagaataaccgaaaaacaataattaaatttgctgagatgaagcagaaacattaaaactattaatattagggctgtcatgatttttctaatgttgtttttgggttattccactattgtttcgcaatgtttaacaaatattggttttaaattacacaggttaaaccaaccactgaatatttgtttgaggtaaccagaat

SEQ ID NO: 213894 - DNA, 539 bp, Cannabis indica
taaaagacctatttctttttgtatctattaattaaaataaccatcacgttatattttataaaatacacccattttactaagtgagttgtctaatatctaatgagaacatcctttataaaatagatatatcttaaagaatataaaatagatgaaaaaattaaaatacacctaatgagtaagttttaaaaaaagaaacacataatgtcatcaagagtcaatactaatccaaaaataaagatatatatatatatataaatgtacatacagttgagtaatgtgacatagagaaccattattaaaagtgcagtcgcatttgataaaagggctcggtgagttattgatgtagatggagttgtttatggcggcactactgcatggttcccccccacttatgttccattgagtgtcagcctttatcttccattgctcaaacatagagttcaaagctttcactacaaccaaattattttcataattaaggtatgtgaattttgtgataacaaaatacataatttaagagagacattaagatagagaag

SEQ ID NO: 213895 - DNA, 535 bp, Cannabis indica
taatcataattacattatataaaagaattcctattacaaaatgtaacgaggatttaatataatgaggattatattacaaaagtctaaatactgtaaagctaaaatgattccaatactctcttttatataaatgtaaaaataaagtaagggataattttgtcaatttatcatttatttcaatattcatttcaataacaaaccaaacatcttaatcaattcccattactattcttactccattacattactattacattccagcaaatcaaacatcaccataaatcgaaataatatgcaacgtgcacgttgtttttgttaggattttaaataatttaagtgtaattataaaaaattcataataattaaaattttctttaataactttttattaaatgtttacaatctagaatcccaaaatctaatcattaatgataaatataaaagttgtgcgatttgattataaattccattagcaaccaaatatgtacaatctttactggagtcctcaaattactgttgatcagtttcacttttt

SEQ ID NO: 213896 - DNA, 750 bp, Cannabis indica
gtgattaatgagctattgttatgcaaataattggagatataatttcaataagaaaaaaccaaacatcatgtattaagtatttataggcaatttggaaattagtaaaattatcctacatttaaacctaagaacattgctattaggcattagtagtgcctagcattttttagatgtgtcactttacgattggctagcgatactctctaaaagctattacattaaactttacgagatctgatacttaattgcaccaattgcgatagtaacacgtaagagggtgataagcatcactaatgccttttagcatttctctaaacctaaacttggattagtagtaccacattgcttatattgtacaattttcgcaacttgactcttataaaaaagaattataattaaaattatgaaataaatttatttatttgttgattttttaaattattcattctcaattttcgcaacttgactcttatttatttaaattccaattggtacaaattattttcgtctcattacatcaactacttgtacttaataatatttaactcgagcaaataaatatgacctctaaatattctaacttagaaaaataaattttaattttacttaaattaatatattttgtttttgtaagcaattggagtgataaacatataccattctaccacttatgttaataaacttcattcagtagcatttcttaacaaataagagtttagctcttcaactcagctatgcatatactcattg

SEQ ID NO: 213897 - DNA, 520 bp, Cannabis indica
aggcaagaatcccttgcttcttttcagctgatctctcttcagcaaagcaatctgaactcccttcggaaacacacgatctctgatacaccttcaatcccagaagatttcatcagtagacctgcaagaaacaacaaaacaagacaagaaagatatgttgccctaacagagcaatatgcttatcaacgaagaagagttcgttagaaaaaccggtaatccctgaatttatactaacaactcataagcaacaaactttgatagctcagctaacgaaaaaaggacagttgtccttagtttgatattactaagttgacctgtcaaagaaccaaaaagaccacaaggttagacgaaactaacaactatatagatgaccaacgcaacataatttgccaccaatatatcagggtcttacaaatataaacatagttagaatagaactaaagattcgatctaaaaaagctgaaagttctagcaaaatcatgagttattctgttagcagaacgataaataaaaaaaaaaaaaa

SEQ ID NO: 213898 - DNA, 763 bp, Cannabis indica
tttataaccgtgccttatactatgggagatggtttaaaatcgttgcttatagtatagggcacggttataaaccgtcgcctatacccaattataggcgacaatctaggatgatatataagtagaaatgttgaattttgtgataatacgtacatattaataatttttattattaaaataatatttagcaattaaaaaagaataattacataaaggattatttttttaaaattttatatttttacatttttttaatatttatacgaagttttataaaaataatacgaaaataataaaaaaattatataaaagtaacatccaaataacataaaaacaacaacaaataaataacaaaaaatcaacaaaaaataacaagtacaacattaaaaaaattaaaagaccgtattttctgttaataacatcataaaaatatttaaaactccgtacaactatatttttgtaattttttatgctatttttgtgtatttgtgaaataattctatgaaaaaatattcctaacttttaatttcttttttattgtattgaaaatcatttttgtataaattattttattaaaattgttaaaattgagttaatcgtacaaagtattataatttagtaagggatccctttagtaattccttttcaaagtaataaagaaacattattttcgatataaaaaagccatttgtggtttaaaatcaaaataatgcaaaatcaaataattgaatatatttgctaaacttatatattattttaaaatatt

SEQ ID NO: 213899 - DNA, 897 bp, Cannabis indica
catatattctatttatttattatggatctaattacacacaatgatttatttatttatttttgtgtttaatattttaattatcattaaattgaattattacagcctgcagagaagttcccaaaattattttccaaagaatctgtatttgggaggtaagaatggcttttccaagatatatttttttgatactaattaattaagctcatttctaattaatgacagattaattaaccttataattatgaaataacagatttccatattttttgccttgcttggtcgtatcaacatttgctttgggtgtaactattttgtgctattggctgccggtatgttaaaattaaaattaataatttcatgcttaatccttaattacatgttatgttatctaattatcttatatatataaatatatatatttgttaattacaggaaacacttcactttcataataaaaatgatgaagagaaagagaggtcaaacagtggatcatcatgtgatcccaataaagaaaattataatttggaaaaatgtcctcaaaaacaaagtcttcacaagaattggcctctaatgtcatctattatggtgtattgtgttttccaacttcataacatggcttatttagaggtaatatttaaatcaatttataaattattgcattattaatttcattaattaatattaataagcaataatatcttcaattattattaaatattaaatatttttttggacaatttaagatttttccattatgggctgtgagtcctaagaagtatggggggctaagctattcaagtgaacaagttggtgaagttcttgccatttcaggtatactaattttctttctcttaaaaggataaaattttacaataaccatagttcaaagggaaaaca

SEQ ID NO: 213900 - DNA, 638 bp, Cannabis indica
ttattattattatttacttgtagttttggttatagaattgtaacacttagttttaaaaattttgtatttgttacataattttataattttataatttcttgattttattattcatcttttattttcttccgttatatttcaatatattttttaacaagttaattactagatattaagtggtgggcttttaatcttagtttatatttttcgtgtaaaaaaaagagagtcaacttaagcttgagcaccaagaaaagaaagttgactttctagacgggtgccaatgccacctaagtaatgttgtactctctccaatctcaatcactctctattcttttcaatttcaagtcaaagttctatgatcaactttatttccctctatatccatttatttactcaaattttcgtaccatacattagctaaaaacgtgttatttctaatctttttttttaaaaaaaaaaaaaaaaaaagaagaaatatagtagcagctctactaaatgatcttaagattatgtcatttaaaaaagaaatcattgccaaagaaaatatagaaatcagtgaaattgatgaatttgaaatgtaacaaggtttgtaaaggttacgaaatcacatactcatttacagctagttacaaatttac

SEQ ID NO: 213901 - DNA, 700 bp, Cannabis indica
accaaataagaaaaataccataagcaagcattttcaccttataaatcttatttgcccaaattttttttgcaaatccctccaagatgtgcaggggggattagacactaagacatagcacacaatggaaggactccaaaagctaatctcttcttcaatatcttcaaaattgattttgaccttacaaggcccctcagatcgactgaaagacggttctaaattcttaattatggatcctgattgaatcaagttactgttacattggttgtttgcgtgcacgaactgcaggaagtctgatctggcctcctccgctcgcttgatctctgcagtaggagatagaggagctcagaataaatcctgaaccccatccgagcgattagtctcagtcatcacttcctctggttcctcatcttcttcagaaagctccaggggagcaattcctaaaacagcatccatctttttcgtacgaattacatctgattccgaattagggccgttcttccttggttttgtcacagaagccttcaattttcctgttgtttcgacctagttttggccatggcgccagcttcagctgctagagagaaaaaaagggaaaatcttatcattaatattagatactgactttttaattagtgcgcgtagtgggcgcgtgttttgtaggatgctcaaaatggcagtgattggatttgtgccttcttct

SEQ ID NO: 213902 - DNA, 642 bp, Cannabis indica
tttttgtctcgcataagactatttagtgagctgagttgtaaatatattttgttaattatgcttttaacgagttattcctccttagatataattttgattacgtgtctgagttcatattcttcccagtctgacacgtgtcttcctctgatgtgctagccgaatttcgggtataacaattgccccttaaaaagttcatttttaataaaaagtgctttttaatgattacaaagggtatttttgtcataatcccatatgttctctgattttggcagttttgcagtttcgaggtacatcaacattaaatgaccatcttttctacttccacttcaaattatgtccgtaggatcaaacatcttttggatccgacgaagctaatatcaagagtataaagtaagaaaaggtaactacctttccaccatttcctccattttagaaatcttgataaactattaagcttctttgttaagaaacaacattgagtttgctcgagattttgcatgccatcctgtccttgacatttttttttctacgagtttcctccgacttcatactttcgaagagatctttactgccttcaaaggttcacatgccgaagagctgtacatcatcccaagtcccgacttcaaaatgtaagtaacttct

SEQ ID NO: 213903 - DNA, 1104 bp, Cannabis indica
tgattttataaacacccctattcaaatattttagtaattgagaacccttaaaaaaatagcgccccttgaacaatatatttattgctattattaaattaagattttctttgttggcaagttgtcatttaacattgactatgtgatttagttatctatataatacgaaatctttaaatataaaaagtgactatttaatcatttttgttagttcaacaaaatatattttaaaaataaaagaatatttcgttaaatttaacgaattgttagtattatttattttataaatatgtaaatattaatattattttattaagtttgtttgaatttgtctttacgatatgaattatataaaatcaatattttaattcgatttcattatacataactaaatagatatagtttggagttcttactttgctctttaataaatttattatttaattttaaataatttaaataatattattctttttaaaatttagttaaaataattgtttttgaactgatattattaaaacaaatttagtcaaaagtttgagattttctaccattaaaaggtggattagtttgtgacccaaataataataattacgaagtgatgttagtattttatcatatatagtagccttaatatacttcgacatgtaaattgtgatgcaaccttttattttaacttatgtatttacaaaattatttaattattgtaatatttgaaaaaatatatatataacttaatataaaattaaacattcgtgccttgcacaaaacattatctagtatatatatataatactttaaagaaaattattgtgttgtccattttaatttataaaataattaaaaatggtattatatataatgagtaatgatatcggcacacataaataatattaagataaaagatttaagttttgaaatctcattttttcttggagaattactccatttactatttttttaaaaaaaaatttaatgtttaagtttctaaagtgcacgtaatttctatgtgggttgctatacgatttttggttacgatttaagttgctctgctagttgcaatagagatttctatgtcgaatacgaattccataaaaatacaaaaaa

SEQ ID NO: 213904 - DNA, 815 bp, Cannabis indica
gtgagctataaatgataaatgttatgacatgtaatgcaaaaacagaaacagtcaacatctaaaagttatttattataatttagccattctacatttaaatatatatctactatagaagaattcaaatagatatatcattccttttttctattttttattattcaaatctggtttagcttgtttttgtcttttatacataataaatatatttatttattttcttacttctttatatggttataataattttttctttaatgacttcaaggcccaattcttctaaagtttaaaaaatgataaaattgattaaaaaaatctactaaagattgaatcaataaaattgataagaatcttgttaggaaaaaaataaataaaaacatataggaattttatgtccactttttgttgttttttataaaataatatttaactagcttttttttttttttaaaaaaaaattataatatttaacagctttacaagtatattatcgtataacatgatagttttatttatgagcacaaaaataataaaataaatcaaaatattatttaaggtttttttttcaaaggtaattgattagaaaaattaaccttgaaagcaaaagtgaagaaattttttccatttaaaaaaattagttatttatcttaaagacatgctataatcaatttatttgttgttaatttatgagctatgagaaaaagatgactcgaaaagctatagtagtatataaatatatatatatattaaatataaaatataaaagagtttctgctatcccgaatgctatattttataatgactatgagatctaa

SEQ ID NO: 213905 - DNA, 504 bp, Cannabis indica
attaaatgtttttttttttttgaataaacttaattaattgttgagataaaagttagtatgggatggtggggtcaactgattccccaaccacaattaccgccggctgatatatatatttttgtatattttgttttcttttatttatatattatttctttagtttttttgttttttttttatttctttattttttttttattttaggtatagtagtgctgtaaattcgtgttgggtttcgtatagtgtcgtgtaatatttttaaagagtaaatctaacacgaactatatgctcaatatttttatatcatgctttactcatactgatccgtttattaaaccaacctattttcatatccagacttaaatttatattttactttttcatactttttttaaataattaataatttaattactaaaccatatatattttatagtttcaattatatttatataatttttaaaaatattttacagccatttatataaaaaataattaaaatta

SEQ ID NO: 213906 - DNA, 565 bp, Cannabis indica
attttttttttttttgagcaaaatcagtttatatagagcccatggagaaactagtcgtttatagccatcaacacgaaatttaagataaaattgggcttaaatgggtcactgtttcacaaacaggtaaccgtttacggcacagtagcaaaatataattttttggacttacaacacccataactcttagcttgcgtatccgatttcaaaaattttagttgcgttctcttagttacaagatgaatactcctaaaatctaatttagaaaaagtacatatcatttttgaaaaataacttgtcacacaaattagtgagccaaactttaaacttataaaccctaatgtactatgcaaattactttaccaagactaaagtataaacataattgtatcatttcattgtgtgtaatattgatgtaaatgagcttactagcttgattttcctgttttgatccgaagttgactttgcctaagagttgactttgactttgacttttagcttctgaagtcctttttagatagattcttgatttattgatatcttggtgaaacttttgctcttatgaagt

SEQ ID NO: 213907 - DNA, 591 bp, Cannabis indica
attatattgaaggttccccaaactgtgaacacaaattttttactatttattctatttaaaactcaactcaataatgaattagtcacaaataattataataaatacctacatcaaccaataaattataaaactcttttgtttcgtaccatagatagtaaatagcattacaaaaatatattttactattttagaatcacttaactatttttcataattattttcagtattcactaaataaatacatgaaaaatacaaaaatgataaaaaaaacaaaatctaaccattctaacacagtttatagtctgtactgagccctaactaattaactttcaattttctgaacaacctaggtattttttaataattaagtttagaaataacacaaataattgatgaaaaataaaaaattgactaaaattcaaatctatcaattttgtaacagtttttaattcataaataatcatataaaatacacccagatttttctgagtaatctaagtattttttctaattaatttaacacataaataaaataattaacaattaattaaataattgcaagaaaatgatgaaactttaccaaacacccta

SEQ ID NO: 213908 - DNA, 639 bp, Cannabis indica
tgacatgcatataaataaagtttgtacgttgtgaattaaccttaattacctattatatatagtactcttgtttgtttgctcattcaaatgggctgtgttttgattcatattaaaaacatgcatgacattaagtagatgagtcacacttttgttatataagagaatatcagacatgaaatttgagtgatgatgtgaacattgaagatcaatcacatatagcagctattaaataaatattactactactaattaactatatgtgttcattgctattaaataaccaaaatcaaatatttatataccggcccactcttaggacaagccgggctaatcctctgttagcccgccaaaattaaggcccaaaaatcatacccacaacatatgtataataggctgcccggtcccaaaccaaggttgttcctacatactgaaattttcaacttttatacttttatactgtgagtggaattttttttcaaaaatactgtgttaagttttcgctatggttctactgttattttttagttgttccactgttgtttttagttgttctggttttgtgttccactgttgttttataaaaacacagtagttttgaaaagattttcgtgtgactgtattttgtaaaagttaacccaa

SEQ ID NO: 213909 - DNA, 588 bp, Cannabis indica
atatgcaatacctgtgattcaatcaacagtttggacaatcaatttactcttattgtaaaaatatttactactaatgcagacaccattatatactctgatatgataaagctttgaagaaattataaaagactgacctttggcaacaccagtgatgatagatactctagttgcccattcaagaaccaaaccagtgccttccttaatgtcaagatactgcaacagacttcctttcgggacaaaatcatagacaagaaaacactctccccttcctcttgaacagcaaaaacctctcaacttaacaagattttcatgtttcaatgatgttaacatcttcaatcccttcaggaatgcagcttcgtccgagttacagcttgtcttcgcaatgcattttatggcaacaaccgatccatctctcaggactccccggtaggtggcggagaaactgctttttcccagcaaattcacttcagagaagcactgtgttgcgcgctccacttcttctagattgaacatgaagctttcgagtacttcctgagagaatccaccactacctttagcaaaaggatcccatccgttcgagtattccag

SEQ ID NO: 213910 - DNA, 555 bp, Cannabis indica
ataacataatatttaacggttagttacttacatagagttccaaaactataacttaggtattattactgtcaaaaattaaacttaagtatttatttgcaactgaaagttaaatttagttatttatactgcaaattactctatgttattataacaattccctgcatccatatatatgtaagtcgcatttttcatcttgcggcttataaattaatttaagcatgttcgtagagtaaataataaattttattgaatgaaagaaacgtatgtatattgcatagcgtaaaataggtaaaaaaattaaatgattatcaaggagataaatactattttagactttgtgttttgtaaaagttgttcaattagatcttttattttgttaaatgataaaatagactctgtaaattttttaaaatagtaaaataagaccttaaactcaatttttgataatttcttttaatataactaacttaaagacaattcttaatacgaacggattcagaaaatttagttagttttatcataactcctctagatcagattattattgagttttat

SEQ ID NO: 213911 - DNA, 780 bp, Cannabis indica
tctctctctctctctctctaggacactagtaacttagatttgagatgggagttgttctcttgctgtgtcttcatcgagtttgagagcgaaggtatttatagttatgacagttaggacaagtcacaaccataagctgagctatcaaaagacagttaatgtagttagtaattcaaagtggttaaaacaccaacagctaccaatgcctataaaaggatgttaagacacatgatctacaggacacaacttcagaaactctctccctctctttctaaccgtcccaagtattcttagagtaatataatattctagctcaagaaccgattgtaatcattggtgttaatcaccatatacattctaattcaatatattgtaattacaatttgaagagcaattaagatccaagtcattaatggctgatttctcttgaggtgtaggttatcaactaaccatgttcatggaacgaacctcgtaaagctgtgtacaatttgtctaattttatgttcctgtttttttgttatattattgaattatatttttggtgtgtgttttgaattgttctatgtttgttgtgtacatactcgaatcacaataataatttaatgtaatataatgtaatacggtatactaaacgaaccttcaaagatagatagtaacccacaagccataaataactactttcttaatttttccgtgtcgataaaatctgttatgatttcgactactgataataagaccgaaagtaatatagatagaaagactatgcaacaagaacaaccttaa

SEQ ID NO: 213912 - DNA, 768 bp, Cannabis indica
  modified_base (728)..(728): a, c, t, g, unknown or other
  modified_base (759)..(759): a, c, t, g, unknown or other
ttaaagtacaatgcaatttttttttttgtacatatctctcatctcaaatcatgtccaccaatttttttatttatttatttttttttttgtagatataagtatttttgacaaataattataaaaaaaaataaataagaaaataaaattaaatatgaatataaaatgaaacaatgacacctattaaaaaaaaaactactagaaaaaatcattttcaatacatctattaaagcattattcaataatatagaatataagaaaaaattattgtctcatcagtgttaaaataaattcacatcatcctatatatgtccgtatcatatatatgtttttgtaaccatagatttttattagtccattaaaaacaatatgtaacacctgaaaaatgaattagcactcaaacttaataatacgtaacctatatcatgatcaatttacaattttatttaagagtcttatcataccttaatcattaaaaatttttaaaaaattataataaattagcaatcaaaattaaatgtttaaacttatgtaattactatcaaataatttatagatcatagatttgacattgttacctacgaatacatgttttcaaaaaatatgggaaagaatagagtaagacaaaaacgggtttattcttgtctcttctatatataattatgtaaagaccgcttatgattaacatttttggattaataataattaggatttattcatagatttgaatnttattataatatgcatatggtgaaaaatttntttaaatct

SEQ ID NO: 213913 - DNA, 777 bp, Cannabis indica
tacgtatactaacaaaaaaaaaaaaaaaaataacaatatgtaaacgatcctttttttgcaacaattaatacatataaaataaaaaatatgaaaatatgagatctatctacctatgataatatttattaattttgtaacagaaaatataataaatcaatttaattattacgtaaaaattgtcctaaaaacttaaaattgagacacaagaatagagctcgatcaaattaatgttaccttctaaatcggaattgttcgacattgtcatatggattgtcttccttactttttttttttttttttgttttttttttttttttttttaaatttaggtaaaggggattgtctcctcgtcttagacttagccaataatcaaatcgacatgactgccattttttctttgtaaaaacaaattaatttttgttgagatatttttttgcaaaaacaaatttcgcaattttattaagggttttacgaaaaaaaaaaaaatcttttattatttttacatttttattgtcttatttttattttttcttttaacaattttattgtcataagttttcaaaaatactatcttaaaagttaaagtttcagaattaaaaaagtgttgaataaaataaaaaaaaccactatacaatacctataaaacaacatgaaaataatttaaaaaaaataaaaagactaactacaaagcaacagaataataacaagacatcaacctcgttacaatatgtaaaacaataccaactcatcaacttatttttgtattacgattttttt

SEQ ID NO: 213914 - DNA, 598 bp, Cannabis indica
agaggaattgagagttttttttagtttagaagaagggtatttcggaatgaaaaagaattaaaagaatagttaaaaaatttataatatggtagtacaattataaaccttgtgtgttttttaagggtaaaatgttaaattttacttttctcttcttttcttttcttttctgtgtacttccaataagtacaatttatattaagtacccaacatatgtaagattcaaattctaacagaaacgtatagtataagttacttttaaatttagaaaacttacaaaaatactataaaataagggaaaatttacaaaaatattgggacacagaaatttttacatttttactataccaagtttacaaaaatactgtgttaaagtttcaaaattacaaaagtaatgtgtttcagtaaacttaaaaaaaaattattaagacagctaaaaaaacataaaacaacttaacaaacaaaataaaaacaactataaaataacaaaaaataattacaaagcaacagaaaaataacaaaacattgacataattacaataagcaaaacaatatcaatttctcaatatatttttggaattacgaatttttttttacttag

SEQ ID NO: 213915 - DNA, 794 bp, Cannabis indica
tattatgaaaattgtggaaaaaacagcttctaaaaagttgttttgtagtagtgattttaacacaatataagataccaatttttaaccaagaacttcatttatatatttttgccatttattctttaaaataataaactacattacatacgtggcaacaaccagtccacagtccacagtccacaaccgactaccggaaatgttatcagtttgcggtaattatgaatttgaaaaaaaaaatgtagattagtgtacatgactgtgacacgcttcatatacaccactaataaatatttggatggatttctgaatagtctctcataacgtagtgatccagttccctcctctagtcactgtctcgctgccaccttttttgatcaaatgtatacaagtcctagccagatcgaagtatatatagcttgagctagcatatatatttatcaacaaggtcgttaacaaacacttctttatttcttttccaaattaaaatatcacacttctcatcccaaatgttattattattccattacaatatgtccttcttagacttaaccagtaataatctctcttcctttaccattttattagcaaccttattattctttgtcctgctatataaatcatggttctctattaaaacaaattctccaccatcgcctccaaagcttccaataattggaaacctccaccagctcgggttgtaccctcaccgaacgctgcaggcctggagcaggcgctatggccccgtcatgcagctccggctaggcagcgtgccggttctcgtcatctcctctgcc

SEQ ID NO: 213916 - DNA, 504 bp, Cannabis indica
tacctatattactataaataggaactgattatacaaaaaatagggacgaaaaatcttaaagagaaaaaggagtatactaattgtaaaactctaattctgtatccaaaaatatatgaataagataaactcgtggactatgcagagttaactgcaaaaccacgtaaaaatctaatgttatttttgttttcgattagttttctcaaatttcttataatttctgtgacaaatttgttatgaaaataggctcatgattgttaatgaaaatttacattaacaagaacgcatttttgtttttcaaaaataaaataaaaattttacttttattttgcgattaaaaaataaaaaaataaaagtattacccgacatctaaatataaaattttttatttctttttaatttttataatcattcaaaatatatatattttttaaatttactaaaaaaatattcaatctttctcaattttaaatagaaagctacaatttaataattgtcaaaatttaa

SEQ ID NO: 213917 - DNA, 512 bp, Cannabis indica
taatcaaaaaaggaaactaataagtccgatctctataaatacccataaactcattttcaaaacaatttatcatttaaataaattatattatatatttgttatctaatcctaatcaaaaaaggaaactaataatctttgagtctgatctctataaatacccataaacccaaaacacaaaatcataagacgaacaaacattaatagacctcggagcatccataatagtcccacgatacgatcaatcttacccatttttcaatttcttcagtgaaagcttttcaatgggtttttggagaagaagagctaacggtacttataagcaagattaccacagaatgagatcattttccaaaaatcaacctcatggtataatataatacataaatttaatgattgttttattggtttgaagatttgattttgtgtttaaagtttttgtttttaacaattttgaatgttgatatgattacttctgcttagttgatgttgatgttgttgttttggaaaattta

SEQ ID NO: 213918 - DNA, 620 bp, Cannabis indica
gtatattttgttaggattatggaacttccatggctatcttgtcgttaagtgtttacgtgtcactctgtgattggtccaaatcatttaaattttaatttttatttaaaatatagtttaattattaaaaaatagtttaaatcaaaatatttaaaagtcatattttaataagggatattggcggcaatattatccaaactacacatttagttacatttaacctcacaaactcaatttttggtggtaaaaccttttgaacctcacttttgttttgctcattacacatttatccaaaagcttcaattaagtgtcacagtggactgcccacgtatacacgtggtaaatctttagtagtctacgtaatattaattattaaaaaataattttaaatatttaaaaattttaaaaatcagaaaaataattaatttttttacttttacttttcttttttttttcttttttttttctttttcttctttcttcttctttctttctccttctttctttttcttatgaaaccctaatctctctctttctctctccctcagagctctctctctccttctctgtcagccgcacacagctctaaccctagctctaatgagccaccatcatcgagatcg

SEQ ID NO: 213919 - DNA, 901 bp, Cannabis indica
aacattctcagaggcaaaaaaaatcgaatggataaagtaatattaaatcgcattccaagagctgaagaaacgaattggctcagccacctgtgttgaccaaatcgctagacaaagaagagctacgcgtgcacctagcagtcacagaacatgttatgagtgttatcttcacaagagacgaagatggtgtacaacaccttgtatacttcatcaacaagacactaatcgacgctaaaatttggtacccactcatggagaagctgacccacaacttgctcgtggatttagaaaagcgaaggcatacttccagatacaccgatcaatagttgtgataggttctacagaaaactgaagcatcaggcggaccaatcaagcaaacaaatgataagctctcacaagcttcatggctaattatataggcatatctccctaaaatatctcaattttttgggagaaaagcaggagccagagaagaagcgagagcaagaacccaagaggtgcattgacccctgcctaaggtaggcatggccccagggcacctgggggcaactgaggcacaaggcaacaaggtgagtttcaaagcttctaatagcgaggctgaagctccaaatgctggccttaggctagcacacaaagcgcgagctaaccacctagacatacaccatgactcccaactagtcataggttatgtactaggtgaatatacagctcaataaaagaagatgatggcctacctgagctgtttagtcagctcaaaggttgtactaaaaggcaagcccctaaatatgacacaacagccaatacactcgctcaactacccagttgtgccttaacaaccaaggaaaacttggtacctactcagttctttaaagaactaagcctccctatttcaaaagaaatagac

SEQ ID NO: 213920 - DNA, 538 bp, Cannabis indica
gtaaggtaaaattgatttatacatgttatttttccctattattagcggtgatttcttttttttcataattttttttgttatatttttatgtcataaaaaaataaatactagctatcatatttcattctccatacactaatatacaaataaactcataacgatcatttcaacaaattaattgcaccaaacataaacgtagtatacgagaaacataataggttcagattatttagttaaaatcataataataaactaacaaatataaaaagccaaagagcaaaaaagatccctacaatttataatttggattatccatttcaaaaagaatataatatgtattagagttgaagttctggaataataaacatcagtcacattcacacacctaaggaaaaagttgaaataaaatccagcttcctttggcccttgcacgattgccaattcaatatatcttttcacaaaaaaaaaaaaaaaaaagggacaattgaatatatcaatcaaataaaaattgatacagcattttttttaaaaaaaaata

SEQ ID NO: 213921 - DNA, 1072 bp, Cannabis indica
taccgggattcttgatacataatacaagactagcaacaatacaaaacgttaaccatatacggagcttaatactttttctacctcagtccagtagttaagtatgcgagcccgacctcagtggaactacgcacgacgatccgggtcctatgtcacgataataaagctcaataaacaacttaatctaaacattggaataaccctaacttcgcaatcagacatattccaactctccactagttcaaaatagcttatatgttactaaagtactcaaatctaggctctcaaaaacaccccgaacaaaactggttttgaggctaaaaaccaaagttttcttcccctgctaccaaaactggttgatcggtttcacaggtgctgtgaaaccggttaactggttttccctgctgtagaaatgcgaaaagcttggtttttgctccaaaatcgaaccaaaactcctccaaacctaatgaaaccttccagaacagtataatcccaccaaaataacatatctaaaacatcaattcaccatatttcattagtttatacaaaacaccatgttagaaccaaaaatcaagttcttaaaccaaagttccaactctaattccaacagccataacaattgcataacctatgcacaaggattccataattcaattatataaacacagtttaaaatcaatgaaacactacagccctaaaattccttgtaaaacctaacctagactatcttataactcaagaatttgaagagggaaagtatcaagaacttacctccatacttagccaagcctgtactccttccaaaatgattcagattgaagaatcaagcaaagaaaatcaaccctagtgcagctccttaggcttcaggtagaagaaagtaaaggaagagagaggtttcgtaatatttttctaattttccttttattcatctaataactatgcatatatatatattcttattaaataaaccttatatttagcatttatccaataatacaagactaataacaaaaactttaatgaccattttgcccttttcacacctttaaacataaaataaaatcctaggggtaat

SEQ ID NO: 213922 - DNA, 750 bp, Cannabis indica
ataaatacaaattaaatatatatcgttacatataaaatatggttatctaacagtttttgttagtttaacagaatattttaagaatataagaatattctgttaaatttaactgtgttagtaaggttagttttataaatatatataaattaagtttatttattttacattgatttaaatatataaatattaatattatttgtattaggttaattggacttatattaattttagattaaattaaacgtatatatataaatattaatatattatttgtaatattattatttttttattggttgtttttaatattgagagtatgttcaattttaatatccttaaactttatattcatttttctcaaatttttaaaattttaaatattgtttttttaaaaaaattaataaatagtttccttttaatttataaaatttgtaattacacataataaaaataaaaactaaaaatataagtaagtatacgtacaatgcacctaacataatttagtatatttggaacacttcttaatgggtattacccatgaatggttactaaacaaatttaattataaatattaattttaaaaatatcaaactatcgaattttgatcctataacgaataatgaaatcacaaatttgaatttctgtgcttaatttaactacttaattaaaaaaatattaaaaaatatctcttttttttactatattataaatatgttcatacaaaaatttttaactcaaactcaacttttt

SEQ ID NO: 213923 - DNA, 640 bp, Cannabis indica
tctctctctcttcacttaaactaaaaaaccctaatctactcttttaacatacagccgctctcataccctctctattttttcaagatgcgaccaaagcaaaatttggccatctctctcatgcaaagacgcaggcgacctcaacactcctcaggcgaacccgtcaggcaggcgacctcaacactcctcaggcgaacccgtcaggcacaggcgacctcaacacatctactcctcaggcgaacccgtcactcctcagacgaacctgtctctcctcgggcgaactcgtgaaatcacagggccaaatccgatgatatctcttttcaatccgtatttttctttttgcttctctctctttaaatgtgaaaactgtttgaatctatcgtggatctacatgtttgaatcttgtcagtggatcttcggagttacgttagacgtttcgagatggtggtcgacgacgatttgttatttgtggtgtaccactgctctggattcatggacgacgacttggttcatataaatagtgtattcttaggttttttattttaagtgaatagggagagacaaagagatatatgaactgtgtattgttcatatcatctgattttattttttaatttttttttaatttttagtttttattctt

SEQ ID NO: 213924 - DNA, 937 bp, Cannabis indica
ataaaggtcaaaatgactaatttgcccctagggctaaaaaggcatgcacacacacacacacacataaggacatttaggtcatttcacacacacataaatccaaatatattttcagattattcatcaataaataaaatgccaataattccatttcaaattgcatttcaggcccgaacccggttcagcccgaaatacccggttgtgactataccgcgccaacctgtcacaacacacctgaaaaagacaacacaggcatactatataataatatagtcccataagcacgttaataaattaattccattattttacccttattgggtcaaaattactaaaatgccctggctcactaacggggtcttagcatagcataaatcatataaattttcatatattaaattatataataatataatttctcaataatacataattatctaattagggttttgctaatccattttataatcctagggtattatagttctggtgtcacaataggtcctctagccaaaattatatcttcaacagatattctattctccatttttgaacctaatagccctttatggaagtccaagaaagccttagtaatcagatttggatcatgcaccctactcccatcttgttgctcaatcgataagatttgattctgtctcatcctatgcttgatactagcatggaaaagagcattattgcagtccccatcttgaatccaagctactttagctttctattgcaaggagacatagtcattttgtactctgaccaatctctctcttgtctccttctcttgcaaatgttaagttttttttttttttattttttttttttatttttttgacaatgtaagttagatcaagtggatgctactgtaatttggctctaacaaagtactcctaacttcctaacttttaacccgtgttgactgctatcg

SEQ ID NO: 213925 - DNA, 582 bp, Cannabis indica
tattattttatttacagaaaatacggactttttatgtactcttgttaatttattgttgatttttgttatctgtatgttattttttgttattattttgattttgtttggaagttattttcatgttacttttatgtagttttcttgttgttttcgtattgtttctatagaaaaccgcaaaaatataaaaaaaaatctttaaacataaaaatgtaattttttttttcaataaatggtgctttgtgtaattatcctatcaatttaagtaactattgtttaaaaaatattaatttaaattttgatagcttatgtatgttaattcaaaattatacattttcaataattttaacgaatcaaaaaggggagaagagaagggaattcgaatattataggagcctctcttatctgtttgacaaagtgaaattatgttatcagtatctaaacaaataagagtctataattatctatttatactacacttattatggttaggttggaatttaaatatatagattaaggaaaaaagttaaatgactttaaattgaacctttgtggccaaacccctataggtttcaattttggcac

SEQ ID NO: 213926 - DNA, 606 bp, Cannabis indica
tagagtatttgagcattaacttcactgagaattttgttagttatttttttttttctacacgagtgtttgagtgctgatgtgatgcttttactttttccctcttttctgtttgcttaattattcagggaggagcaatcagagatagatgtgacttctggattttacgccctctttggatcaggtagaactttgcttgaggtgtatataggatttccatattattgtgtcacccatgatcattgaacttgatttctcaaatttccctgatcatagatggtatattatggattatcaatcaattgaataaattaataatcacatgaagtgagttgtagacatgagataaaagcataggaactcattaagaataagatttccccttaatcagatggaatgtttttcaaatgcctttatatcttaattgcttattgtgtggaaaatatagagggtagataattttcttctttgagaaatgacataacaagtagacatatcttgaaacccatagttctggggactaaacctatagttctcttgagatgtccaaatcacgaatgctaaaattgtataaaactagcttactcatgttggtcattctcccaatct

SEQ ID NO: 213927 - DNA, 536 bp, Cannabis indica
ggatataggggttaaggggtatacctatagactaatcccttagggggaagtggtgtactcctagaataatcccttaatgggtaagggttgttcccctagactaaccccttaagaggtaaggggtgtaccgctaaactaacttcttaggggatatggtgtgtacccctagactaacttcttacgctgtaaggggtgtacctctacactaaccccttggttggtaaggggtataccccaagaataacccctcacccttagggatgtggtattctttaacccgttgtgagagtacttatccactctccctcgagggtagccatctgttgggttttgtgccctaactaaagttctaattaaatgtaatcttgaataattatttatcaataaagaaacaaaattattttattacttgtttaatgtgttacttggtttacatgtttgttacatgatcatttgtttgatttataaattcatctaaatccttattacattgttattcatgatcatttatttgataattagtagtgtatctatat

SEQ ID NO: 213928 - DNA, 593 bp, Cannabis indica
gcctcttcatcttcacatggtcgacaccaagcagaaacacaaggtccggctctgtagaaacacagcagggaggacactatcaggtaaatcgaggtgatctacgttatcacgtcaacgcagtttccagagcgtgctctcgcgccccccagaacaacgaaacaccccgtgatccccttgcgggtgatcaaggtgtaaatactcacaacaacccgcctaacgcaccgatagtgactactggggtcactatcccagcgaacctcgccgcggtagtcgcgactcctgcagtcgcagcagtcctgactcctgtggctggaggaattgatcaaagcatgcttttgcaagctttgaaaatgctcgagcagcaaagaaagcccatatacaagctgcatgggacatctcctttcactacggaagtgcgacaagctcaacttcccaagggattccggctatccaaatccctaaaaatataaaggtacctctaatcctatagattatcttgaaaaaatttaatactataatggaagtggatcaggtaccacagcttacgaaatgccgcattctcgcggcaatactcgaggaaaacgcccacgatt

SEQ ID NO: 213929 - DNA, 581 bp, Cannabis indica
attaatccgccggtaaaactaatttcaaaaaattgggcggcaaaaatcccgcccacttttttcgaggcgggattccgccggtattaatacaaacccgccggtaataataaatttaaaataatttttttttatttatttaatataatattaattatatagttattaccggcggatggctatttccgccggtaatacccctattaataccggcgggtgagttccgccggcaataaacccgccggtaataactatatttgttgtagtgaatacatatatttatttaaatttagaaaagttccgtaaattacaagaagtaactcttggattttttttaagggactcttggaaataattccaataattagcttgaaagatgtcgcggtttctacttcctaaaacaatataataaaaaataaggctaaatattattaatgactctaataaaattattgattggattttttattttgataaattaaacctttctagtttttaaaatagtataaaataatatcttgagtttaattataatatatattatctactttagacataagccctcattgttttaaaaaatctca

SEQ ID NO: 213930 - DNA, 565 bp, Cannabis indica
aagccttccactttttagaactccctctcttgtaaaaataatagtattggaaagcttcctccccgtcactaaattctggttcgataacattactagtaccttcagtagcactagaattttcattgttcaatgaagcaagatatattggatataaatattcaaatcggcgatgatcttcttcattcattttttaaaaattagtataaagttcaactatgtaataatttaagggtatatatatgagagggtactctatcagaaacctttaaagtcaatctttcttagacagaatattctcaattttaccacttttaccattacacaattgttcttaacactaaaccctttttttccttatgaaaatattttatgcacaatttttttggtaaaaatctattactatcttaaagaaataaattataaaaatattagtctaattttacgtttacaagtgcactaaagaaataataacaatagcaaataatttaaactatttttttacataatataaaaaaataaaaataaaaagaaaaagaagtataacactcaaatatatataaaaaaa

SEQ ID NO: 213931 - DNA, 248 bp, Cannabis indica
atataagaaaaaaagaaaaaactagtttcaagctttttttttagtttgggagctgctacagctatattagctggaggggaaagaaccggttgtccaagcttaataagcaagagcataccgactgaagaaaaaaggtagctatatatttaattacttctatgataaatcagaataaaatttagtttttgaaattttataggtcattcattctaataattaattaggttgaaaaaaaaaagaaaaaagaa

SEQ ID NO: 213932 - DNA, 663 bp, Cannabis indica
ctgtttgggtttctaaagtggttgcagtgctagttgcaataggagtttctatacattttttgttgcaatttaggttgcagtgccagttgcaataggaatttctatgtagaattccgtaaaaaatgcaaaaaagaaaacagttttgaagtgtaaaaatgaaaaagcccctaaaaaattgggggtttttttcattttttacacttcaaaaaagcatttttacaaaattctacatagaaactcatattgcatcgcaactaaaaatcgtatagcaacccacataaaacgtagggcagaaaccactttaaaaacccaaaacttaaatttaaaaaaaaataaaaaataataggtaattacccccccaaaaaaagggtttttagtttaacattattattcatttttctgttcactttaaccttaaacattaactaaaaaaaatcaaaattttaaaatattcaatataaataaaatatacttaaaatctttaacttttaaaatattaacatttaaaaatttaaaaaaaaataacaaacaatagcataatttatggacctgacatatttactctaaaaaaatcaaaattttaagatattaaatataaataataaaatatttaaaatctttaacttttagaaaattaacatttaaaaataataacaaaaaaaa

SEQ ID NO: 213933 - DNA, 555 bp, Cannabis indica
taggtccaccaaagttaaagatagagtaccaagtgtgtagaatttgtaaataaagggtactaaataatcatttttagaaacataaggtatcaaacttgtattttgataaaacacaaggtactaagtatatatatttactatttgtaaataaataaattaaaaataaaaaaacaataaaaaaacaaatttaattaattgaaaaataaacaaatataaatattaaaataattaaaaaaatattttcatttgaaaaaattaaaaaaaaaaaataagatcaaaattttttcagcttaaaacaaataataaatttaatattttttatattgtatgtgataaagtagaactaatatatatggatctatttcttcacgatctcagtgatctggtagcttgtgagtatggatcttagataatctttgttggcgggataacaattttgattgagaaagcacttaaggaaatgagaggaaaaataagtctacatatttatttattttttttactaattttatttattgtaaatgtggataatcattaaaaaaaattatggagatg

SEQ ID NO: 213934 - DNA, 786 bp, Cannabis indica
ctgtctgttctgtttcgtcgctgtaaaattagtctctgcagtatcaaaattatattctacttttacaaacgtatacaattttatattttcgtatatattattgacatttacaaaaactcaattttttaaaaaaaatatatatatatatattatatatcctttaaaatttaaaaacaactaaaatatgagagaggcaagaattgaacctagcccccacacattaatataaaccctttcttactaattgtgctaaatatattttgatgaaaattattgaactaatatgtatatatatattatatttttatttttatacatatataattttaaggctaattaaaatttttttctctcgaattttaacatataccaaatcatgtctcctaaactttttttgcggttaaaaattctccctgaactattgagattgttagatttaaggacttttatctaatttcatgcaattttactgttttagtgattgtttatgtattaaaatatgctctccagactttgatatttaccaaattatgcccctcgaactttgatatgtactaaattatgtcccctaaactttcatttatgttagaatttttttactaaaattggacaaaattttttaaatttaacaatctcaatagttcaaaaaatatttttaacgaccttaaaaattgaaagagcataatttgatacttatcaaaattcgtggggaaaaaatcctaattaacttaattttaattttaatttgtggaggtttttaaaattgtcccataaagtcaaatcatc

SEQ ID NO: 213935 - DNA, 793 bp, Cannabis indica
ttttaagggggtgcattaagtttttatctcatgtatataatattgactagttagtttttttttttttttttttgtaaaaatattgactgtcagttgaatttaatataaaatttagatcaggtgtcagggacattggagattgtgttacatccacgaagccactctatcttccatccaaatttaacaaatagaaaagtcaaacttacacctcttaatatatagacactaatgttttatacttgtagaaaaatcaaacaatatagtaatcattaataagtactcgaaattcaaaagaaaaatcacagataccaaaatggcttcagaaccgtacaagcttcaccttattgtaatcccattcatggctccaggccactttatccccatggccgatatggccagaaaattagcagagcacggcgccatgatcaccctcatcaccctgccggttatcgctgcaagaataaggccaatcatcgaacaggccaccgaaaattccaatctgaaaatccagctagtccaagtctctttgccactccatgaattcggcttaccagagggatgtgacactgtggacttagtcccttcaagaaacttgctagggagtttcttcatcgcgcttgacgagcttcaacagccaattgagcaagtggtcagtgagcttaagcctaggccaagctgcattatagctgacaaacaccttccatggacagccgaaatcgccaccaagtttgggataccaagagttttgtttgatggaatgagttgtttttctctgttatgcaatcacatgatt

SEQ ID NO: 213936 - DNA, 513 bp, Cannabis indica
taagttgtcacttgtcattacaacatttaataaagtcattctatttttttttttaatttaattatatatacaagcaagacaatcaaacttgcatttatatattaattaggctaattaagatttttttcctccaaactttgacatgtaccaaattatgcctcttgaatttttaaggtcgttaaaaatactccctgaactattgagattgttgaatttaaggacttttgtccaattttagtaaataaattctaacatggatgaaagttcagggggcatgatgatttagtacatgtcaaagttcgaggagcatgatttagtagatatcaaagtttggggatcatgatttcgtacataaacaatcactgaaatagtaaaattgaataaaattagacaaaagttcttaaatcaaataatctcaatagtttatgagaaatttttaacggccaaaaaagttcaaggtcatgatttaaccgcaccgcaaagaatttcaaactatatttttttagtcggtgt

SEQ ID NO: 213937 - DNA, 1347 bp, Cannabis indica
ttaattctccaagttcaaattttagtggtaaaattctctaaactactgaattgttaacaaattttaggtgtcatctatttttcacagtaaggtgcaaacatatattgcttacgtgtacacttctatgtacatgtgacgcgtttatattagtatatttaatattattatttaaaaattataaaaaaaatatttcaaaatttataatattttttattttttaaatattttttattttataattttatttaattttaaaataaattttgaaataataatattaggtgaatcaatataaatgtgacacgtgtacaagagtgtatacataagcagtccatagtaacagttaactgaatggcaccttaaatttactacggttcaaaagtttaaaaaattttactgtcaaaagttgaacttaaaaaattaaaatacaagtaaaacgatataattaaaatttaattagccactataaactcttataaatatatatgaaatcgcaaacagtgtaatgcgtttattctaccaccaatgatcatgtagttttactattataaatctatatatatatatatatatatatatgtatagtagaagtttatagtgatcaaaaactcaaaactagttggactacgactatataattattagtagtgttgtacgtataaaattaagtggtgcaatatcatattacatgcactaaagaaagaaaaggtcacatttaagtatgcatttttattattaaccatgcatgcatatatatatatatatatctattctatataaagtgtgcctatataactgaattcttagtttatgagaaattaatgggttgttttttatttatatttaataaaataataaaatattacttatatattataaaataataaaataaaaataaaacaaacaggtaagttttgattttatcatttagttttttttggctgaggttaacaggttaacagctctattaatttatttatttaatattttttatattacttatcaaaagtaatttgttgaattgtacttagtatttaaaaataaatagtattaaaaatagttaataatagaagatacgaactttgcgaagtaaaaaacaaacgatacgaatatatctctcaatttttaactttatttttgggttgtaggcaacagaagactctgacggaggttaacttgcttgagaatcctcgttttaagtagtcttgaatattatgcagtcaatttttttattatttatgaagatttcaaaactaattgccgatctttgagttctccatctgggaggatagaaacacaggctttatcttgaaatgtagactccctatgttcagtaaaaagttgaaa

SEQ ID NO: 213938 - DNA, 519 bp, Cannabis indica
taaattctaaatgtcaagcccataatgcgatggcccaattctctttctttctttttgtattcttctcttttaaatggatgggcctataatataaaatgcaaagtttgcattttaaaatcttattataacaccacatgaattaattatgggagactaaataaacaaataaaaaaaaaaaaaaaaaaaaatacaaaacaacaaaaataaaaattaatgaaaaactaaataaaaccaaataaaagttactaaaataaactaaaaattcttgagaacaaaactaatttaatgcccaaaaagatataaataactctattttcataaagttatcatctttaaccttcttgaaagaattagaaacactttcttatacactttcaatgtgtgtgactcacttctttctaaggaataaaaatggacatgaagcataatccgatcaactttgaagttcatcatcacttgaaatcaaatttttttttttttttgcattcaactacagtaacaaaacaacaatataaaaaa

SEQ ID NO: 213939 - DNA, 753 bp, Cannabis indica
gaaaatcattattaacaaagctaataaaatgtcattttcatcatgaactggattttggattttacgtagtgtaaataaagtatagaaattgcctaatgaagtaaaatcagcatataccactatgtttgtaaaactaatgacattatttttttaaatatatgcatactagtttggagatattagaactaattgtgcatataaaattaatttaattaaatacttttatagttttgtttggaaaatttcaattgaaaatatttatttattttaatttatgttattttcagatttgagttggtaaactaatggcattttattggcccaagcttatctacttcgttccatgccattttctacaatgaatcataatggcaagttggtgaatcacgtccaaagctatcaagggccctttccaaactttactcttcaatgggccaagtcaagactcttttcatagcacaacacatttgtctaagtaattggactcaactgtcacaaactatgaacttacgaatgtcttcaccaaatgagttttttttacggataaacccactcaaatatcgttttatttctgtttaacctttcaagtttaaattttggtattaaaactcttcaaacgaatgaactagtagcaaatttaaagtgatattcagttaactgtcattgtgggttacttatatgtgcacttttatacgcatgatatatttatattagtacacttaatattattatttaaaaattatttttaaaaaa

SEQ ID NO: 213940 - DNA, 928 bp, Cannabis indica
caagcttgacgattgacaaaattccaatcttcgtcaaaataatcttcatgcctggactccaaagcaatattagttcattctcgaaacaatatagatctgatactttacattgctacatgctaaagttattggtaccgtcgaatttctccacttcaaattgtgcatttgataatatggttctcctcatagaacctcttaatgcgcaaaaactttttacgtcaacttgtgcatcttactttgaaaaacagatgttgcgttgaattcagaatggtccaattagctaggaacaaattcgactcggttaaaaacgggtgaaaaatggaatggaccgatccaaaaatcactattggactgagttaaatcggttgctggcagcaacactctagcagctactggcggtgtgtcagacatccgattgaggaaatttttgcggcgttagatttgtctcgccaagagcttcgatttgatatataatgttgctatatttggctctcatactaaattgttgtgcgcggaagcaataaatagtaaaagatagcgataaatatatatcaaagcggtaaataataaaacacgcagaattatgtggtttgacaatttgcctactccacaggaggcaactgatattattgatctgagtagaaaatatataaattatcagatacatatttcctgctaataatatctcttgagtgttttccaaactcaccaaaatattttttaaaatttggatatatagatgctctttcttagattacccaccgagtccgattgcactaagttgtacactgaattgttcaccctgaatccgtacacaccaaattgctcccaattatatatatctaattaataacaaagagctcatcttctaattatatataataataagaagtagttgcaactatataataaatttgagaacatatat

SEQ ID NO: 213941 - DNA, 496 bp, Cannabis indica
gttacgcatcacacaaataattagttataagttgtaagaaactagttagtgaattataacttatataactagtaactatttacaattagttactagctatcacgccaatattttaattgagtaacataataacataatctaaactaatacaagaattagagtaatatataaatattaaatagttgtgagaaactagttagttacattatgtaaattgtaactagttataattaattattaaatactgatatttttttgttaagattttctttatggataaattatggatgcatgaggagagagatacactgtgtaataccctagaactaagaaatggattagcaaaaccctaataggaatagccgaatagcctagggttattagcctagtgatgtatgtatgtaaatgccatgcatgttaaatataatgatattcaaggattatgcacttaaggaataattaggttgaactcggtaacaataattgagatgaacca

SEQ ID NO: 213942 - DNA, 503 bp, Cannabis indica
taaaacaattatagacaaaacttcgtgatcagaaaataaagatactgggaggagaatcggaacattcataatatacaattaaaattctactcccatatatgctttcactctataaataatattttgataattaaaaaaaattataataacaagataatattgtatataatggcgactcaaatctgtacaactcttaacctaagttcttataaaaaaaaatgaggagtgttatcgtcaactttctattacaacctctcagttaacctttgtgcttaaaaacacatactgaaatatttttttcaattttttttatggcggtgttcgttatgcttacaacattatccttgtaaattttaaattttttttgaatagtttatatgacagtaggctataagaaaaatgtaaacaaagactaaaaatttgttttaatatgccaaaataaactaataattttatttgacatatatgagtatatagacatttctgattataagatttctggt

SEQ ID NO: 213943 - DNA, 762 bp, Cannabis indica
attaaaataattaaaattgtttgcaccaataaaaacatgacatctgtatttatgtacacagtgacaatacaagttggcgtcctagttggcatttaacattgaaatttaacggttacattgaatttgcaaacagaagctaagttaagggggctttgccaccaaaaaataaagaacagggattaagtgtatactaattgaaacttaaaggggtttggccgcaaatttctccgtaaaataataaaaaaaacataagaacatattaaaataaatatttttattttataataaatatattttaagtcattattacacgtaataaatattatttcagatcatgtgatttgtaaaatttactaattggactctttattttgttaaatgataaaatagattttgtattttttaaaattgtaaatcctaaactaattttttgttaaaataaaatttaatattaatccgatttagaaatgttatgataaaattggttatattttctgtatctgttcgtgttaaaaattagaataaagttaattatattaaaaaataaaattgttaaaaattaagttcaagttcctattttaactattttaaaaaataaacggttcactttgtcatttaacaaaacatgattcaattagtaatttttacaaaatgatatttaccctcaattgtatttgagtaaacaatctggtgagacttttcattaacaacgaaaaatattattggataagactacttaacaacaatataataaattaaact

SEQ ID NO: 213944 - DNA, 789 bp, Cannabis indica
  modified_base (35)..(35): a, c, t, g, unknown or other
acactaaagacacagagatttcgagaatttaccgngtgcctgaagctcttcaaagtcctttagagatagaccttggcagagttcatttcattagctcgacaaaaaacataactatcgtccgacaaacacacgtgtgatatgaaaggaacaccattagcaaactctaatgccctttaatctggtgtgtaatctcataacttttaatagtgatgagaaaacttcagcacaattaaaacagtaagaggacaaagggtcaccttgtctaatgccccttgatggaatgataggtccaatattccaccgactatgaataaccttatactccacagaagtaatacattgaagcacaagataaacccacttgggatcgaaccccattttaagcaaaaccgattcaagaaacggccattcgactctatcatatgccttgttgaaatcaagcttcaaggccatataaccttctttgcctcgtctttcgcgcttcaggtaatgcacgacttcatgagaaatcagaatgttgtctgtcatatatctggctgggacaaaagcactctgagtatctgatatcagatggggaagcaccactttaaaccgattagataacactttcgatatgattttgtatagaacattgcataatgaaataggtctcaaatcccccatcttactcgggctttcttttaggataagaacagtatgagtgctgtttaaaccagtaggaattgtaccataaaagaagaattccttacaagtagagcaaacatcatgcttcactatgtgtccaaaatc

SEQ ID NO: 213945 - DNA, 638 bp, Cannabis indica
aattatgctcctaaattttttagctcattaaaaagttcccttcaactatttagattgttggatttaatgaattttgtccaattttactaaaaaagtctaacgtgaataaaaattttgggagcacgatttggtacatgttaaaatttaagaggcatgatttggaagatatcaaaatttaggggcacaatttagtatatggacaattgtcacatttgcaaaattaattaaaattagataaaagtccttaaatctaactatttcaatgatttatgaagaatttttaacgacctgaaaaattaaagggacataatttggtacaagtcaaagttcaaggaacgaaaatcctaattagccaaattttaatcatcacactagtacaaaaaacttttgttgtgtcagttataaactgacatataagcttattgtgtgatgcaaatttggaatttgtttgtgtcgattgggaacccacgtaatcgattggttactcttgacgcagaaatctagttgcacccgctagctagattagtgagaatgtaatgagaattaagtataaataagagatgcaataaatttataatagctcactccctgtgacgcgatggtaatagagttacgaatactttgagtttttatttctc

SEQ ID NO: 213946 - DNA, 500 bp, Cannabis indica
tgactgtgatctactctgtcagaactgcatgtgttgtgttgccttccatatattaagttatacaaaacatctgtaatgattgggatagactaatgggactagcttagctttaataacacatcatttcaacccttatataaggttaaaatgttgtttttaattaagataaaaaagaaaaactagtagataacatattaaggtggaaaaggcagaatctagttacagtagcttacatcttcaagcctgttagaatcctctgtgacagttttgttcaaagaaaacaattaatttaaccaagttctagcatttctttatttacttttggatagagctggaaaattcttcaagttttttctgtactaacaaattaataaaactcaagtccagcaggaacagagagagaaagatcattgttcataaatttcaaacaatatacaaacatgatgaggcaataatataacaaatatggccttaaggactaatcatactgaaaaagctta

SEQ ID NO: 213947 - DNA, 682 bp, Cannabis indica
gtttttgaaaaataatttatatttatatttatattttttttattaacaaaccacgaaagtaatttcttatcaattataattttattttataattgacaaaaatataatttaaaaatagaaaaattatcttatatatcattttttttttaatttacgattttaattgctccagtggttttttttagttgctatggaagtttctatataaacttctgtataaaaactgttatgaagtgtaaaaatacaaaaattccaaaaaaatattataaaatatttttatcaaataaaaataagggaaattaccacatatactatttttttaacttttttttttaatttctaaagtggtttctccgatggtttctatgtaggttgttatacggattttggttgcgatctaagttgttatgttagttgcaatatgagttctatgtataattccgtaaaaatatataaaaaaaactattttgaattgtaaaaatgaaaaaacctttaaaaataattacacataaaaatttggggaattaacccatatattatttttttttatttttttcaaattttacagtttagttgttcgtttctccaatagtttctatgtgggttgctacgacaattttagttacgatttaggttgctccgttagttggtataagagattttgtgtaaaattccataaaaa

SEQ ID NO: 213948 - DNA, 690 bp, Cannabis indica
aaaattcagaaccaacgaagcaaccagtcaacattacgacaaatcaaccaaacaatcgacacagtaaatgcaatcaaaaatctaaagttaagcaaaatttaccattcacagtgtaatcgacaacatgttcatcttcatcgtcttcctctgcctttactagtcgcaccaccaaaagctaccaaaacaggtaattataaaaattaaaatacataactgattattatacaaaaaatacttcattaattatgtgagaaaattattttttatacgtatacttgtcaaaaaaaaaaaacttacaatattcaaaactgtttataataaatgttacaaatctatactcgatagctgatatcaattattcattaacacaattgtaaatatataatcataattgtatattaaatgtagaattttacggaaacccatatttgatatcgtaatattgatgtctctggaaaagagcggaaaaaattaatagcttctttttctctctggaactctctggtaagtatgcgaaccctcgtttctcctggtcgaactctggtccctactatggggattttggtccacccatactgttcatgtggtggtttttcttctcatttactgtctattcggtgtcttacagcaataaatgtgggtattaatttctctgtgtcttttgttatttctctttccaatcctacttgt

SEQ ID NO: 213949 - DNA, 609 bp, Cannabis indica
ttttttttaatttactgttttgaatttttattttaaatattgtatattattcaattatttttttaaaatttataaaatgatcccaattactaacaacatacacaataccaaaaataaaagttcttctaaaatgtcgaaatagagaaaagatccactagctaaactaataaatatatgggtatatacaaatccagtgccctgtttgggtctgtttctgtttttctttttaactgtcttcttttgaatttcaactgtttttcctacctatcttcttctttgtttgaatttctttgctttcaactgctcccgcctcttctctcctcccctctccgccctattcctcctcagtctcctccgttgtttgctcctctggtgtatcccatttccccttccctgcccagatatggatccattctcggattccctacgcactaccctctctcttacagatgaagaaagaaatattgtatctctacccactgctacaacaacaaacacactcaatacatcctccttttccctaattgcccgagttataacttccagaccagtttacaaacccggttttttttgagcaaatccctggtcattgggcaggtcgctaccctg

SEQ ID NO: 213950 - DNA, 589 bp, Cannabis indica
aatataatggtatgtcaagatcttgttagaactatggaaagaaaaactacaagggctaactgtatgattaagcttgacatgtagaaggcatatgacacgattgaatgggatttcattgaagaaattctccatgcttttcaattctcgacaaagtttatcaacctgattatgacttgtataaggactcctaaattctccttgtcttataatggcactttacatggttttttcaaggctaggagaggattgagatcacaaggggatccaatttctccccttctctttgtccatagaatagaataactctcaagaatcatgcaaagaattgggaggaaaaagagttctacttccatgaaagatgtgatgggttaaaactgaaccatctatcttttgctgaagatgttctctttttagaagtatttactagatgttacagggattgaaattattttcttgtacatcaagtctcaacccgaatccatcaaagtctgctatttattgtagtggaatggatgatgggatggttcgaagagtcttaagagcttttggtttcaccaagagtcaacttcctttcaaatacttggggatt

SEQ ID NO: 213951 - DNA, 748 bp, Cannabis indica
tggacgagaattgagaaagtgggttgtttaaagaacctgccaaaaccggtttacctattttataccagtctccccaaaaaccctgcaaccaaactttccagagtacctaaacaatgtatacacaacatattccaaacagaaaatcccaaaaaaaatcactgaatcaaattatgccattaaagatcaaagcttaggtttcaaagcacaaacttgtgaaatcacaaggccatacactcaaaccagcaaccatcacctagaatcaacttaaaataaacataactgtacaaccatatttcaaaatataaaatatacaaaagatgtcgcccatttactaacaaaatataagcataaatgcctcgaagacccgaacactctaggtctagccgtctcgatatatacaatattcatccagctccaaattcactactacttagcatttgcttttcccttacctacacatgtaaatataactatgagtcaacagattcaataagaaaaatataaacaaaaacatataaccgaaccgtaaccaggtacccatacaccaaatcacaatcctatatctcgcatctgacgtgtataagtctcaaacattcttaatgacaatgtgattaactataatatcatcctatctcagtactctagtcgtattgagatgatagcatcaatccatactatatttctcaacatatatctgttggtattctgcgtaactctatgtacattaataccgctcttactaatatgt

SEQ ID NO: 213952 - DNA, 1238 bp, Cannabis indica
gttttagttgatttttatgttataattctaggattggagtcttaaaacttacgttcatgctggaataatagttgtttttcgactgttatgtggttgatcgattgttttcgatcgtgactattgagaatgattaggtttcccttgttttggcctagacacaatataaaagaaaaaaattaggctaggataatatagatgtaagactaattaagatttttacaccgtgaactttgacacgtatcaatcatgccccctgaatttttctgatcgtgaaaaattcctcatgaactattgagatagttggatttaaggacttttatataatttcattcaattttactaatttcgtgattgtctatgtactcaattatgttcctcagattttgatatttaccgaattatgctcatcgaactttaaaacgcaccaaattatgctccttgaactttgattcatgttagacttcttttactaaaattggacaaaagtccttaaatctaacaatctcaataattcaggagaatttttaacgactttaaaagtttaggagacattatttggtacatgttaaagttcaagtgacgaaaattctaattaacctaaaagtaaaattcaccgtattacagtatttttttataaacttttgcctattttactggtatgtttacttaaagggaataaaaattaatggtataatattgattttcatataattatttactaaattttagaaagagaaaaaataatagagccacacataattaaaaagaaaataatagaaaaagttctctctatgtttatagagaatatctttcttttttctaatttatttttatttttattttaattttattattaaaaataaaaaaagataaatacactttttaaaaatttataaacaaaaattgattacatgttctaacaataataattttattaaattaaaatattttaattattttttctaataatcaaaataatatatttctaatttttaatttagtaaataatataataaaatattatttttgattattttttattttaaactcctttaataaacgcaggcgctgtaatcatcaaactccccaaccaaaaaattgttcatcaaattaagtgatgagcttttgttatacagatatactgatcttgctttctgagtgggattactaattaattcatatgcatgataaatgataatatgagagaaaattgaatagtttatttaactcttgtatct

SEQ ID NO: 213953 - DNA, 1404 bp, Cannabis indica
atataatatcatcaaataaaaatgactcagtggcaatgtgtttaccctcttaatgcacaacttcaaattttcaagagtattgacaacatttttttagagaaaagtgttgttattttgctttaaatacgaaaactaaaaatttatggtttaagtatttcaatttctcccaattttttccttttaactaaatctcaaaatttcaaaaacaaaacttgaaaaaaatgacagaaagttaagaaacacgttgataggttaagtccatcagataaatttgctcaccataaacattttatacactacaaaaaattactacttttagtgacaatcttttaaacacaaaaaaaaaaattttgaactaaatgtgacttttagtcacaacaaaaagttatttgtgactaaaacatactatttagttacaagttgttattaatttagttttagtcacaataaatattatgactaataatacatttagtcacaaaaataatatttttaaccattagaccttttagtcacagcacaataatgataatttataattaatcataacttttttatctttagtcacaaattttattgtgactaaaagtaagattttttatagttatagattgagataattaggaaaatacactatttctttttgcatattaattaaggatatttttcgattatctgaattttaatgtaagatcatactgtgaaacacttggtcttgaaacagagtaaaagagaacagagaaaaatgaagaaaagcctcagactaagaatgcttgcttaccattcttagtagggaacgttttattatatagtgtttttagaatgaacaaaatacaacagaattctgttacaacagaattagttacattctgacacaaagaaagtattaactaacaaagctaactaatctttattggttatcatcccccctcaaacgaaaaggtgtagaagtcactttgagtttgcttttgagatactgaaaacgttcttttggtagaagttttgtaagaatgtcagcaacttgatcaatgattgggacatgtcgaactgagatttcatttctcagaatttgttctcttacaaagtgtaagtttatctcaatatgtttgcagcgagcatgaaaaattggattagcagcgagagcagctgctccttggttatctacccaaataactggagtgtcttggagttgaaagtgaagttcagatagcagtgagagaatccacttgatttcagctgctgcattggccagagctctaaatttagattcagtagaagagcgagcaaccacttgttgctttttagctgaccaggagatgagatttgggtcgagaaaagctgcatatccacctgttgaccgtctatcatcaaaggcaaagatgcccaatctgcatcggaatagac

SEQ ID NO: 213954 - DNA, 831 bp, Cannabis indica
tgaatttccattaaggttgattggaacacttgaataaggaaatgaggtaagactagcataagatatgtatatttatatgtgtatgtatgtaaattgtatggtgtgtaatgtcattcgtatactaccaacactagtacggtgacggtacaaagtgcattggtacaatatatgatgttcaaagggtatgatccagtgttaccaatactagtatgggacgggtatatagtttatgtagtacaacactctgtggtactcgaggtacagtttatccctaccaacactagtactggaagagtactaagtgtatgtgctacagaggtcttacttctatgaagaacggtcttgatgcatctaaagccttgtaaataggtgtacgggaacctagatacaagtcaacattatgttatatgctttgtgcttttcttactcactttgtcaactcacagatattctttgcatgtgtaggtaaagaaaaggctaagactaagaaccaatgagttcggagctcagggatgattgtacatattagggttgttagacctggagagtttggtctcaggataacttgggcctttattttgtagtcgttgtgcagcatgtttataaagggcgttttggatatgattgtaaattttaaagatgggatcccaacttttgtgtatgattatatatttataaaagtttaaagttttaccaatagtttaaaagcaaaggcgtgcacgataagtaaaaaattactgtagcatgcctaagcaagacggcattacaatttttgtattagagctgctaggttgtttacaaaataccatcaagatatgtaaaatcatcgtc

SEQ ID NO: 213955 - DNA, 1647 bp, Cannabis indica
atatattcaaaccctaggtatacgtacatgatgactcatataaatattataataataatataataattaaaatcacaaattttcttcctttgaattttctttatgggtattttttttttaagccctttatgcatggtattatattgtttgattagcataaagatagaataatgtaacgtttcgtaatatattggagggaaaataattaatccaccctaaacttttttttttttaaaaaaaagaagatagttataaacttataactattcactatatttgaaacataaaacttgcgcccaagaaaaacataaaattcagacatgtaactgaatatttatcatgcatgcaataataatagatatgaaattagaaagtaaataaatacataaaaaattaaagagacagaagcaatttaacattgggtttatttcatataatttaatttaatatctattatatataaaatatctctaaccatatcggcatgttaccttgtagtgttatattttattattggtatctaatgttgctcatggaattgtgctatattaattaacagtccaacttcctttgatcactataagctcccatctaccattaacaccattttaacttttttctaacaaaaatttaaagcttaaactctagaaaatatttagttaatgatattaatttatatgtatatctcaataacttaccacgtataagtaaatactattttaaattatgtgctttataaaaatttaaatgatagtttaaacttcatatttttcaaaacagtacaaaataaatcgtgaattcaatattttaacaatttactttttttaatataaccaatttgtagtcagtatctagctaatatatttataataccttaaaatcatattagtattaaattttaattgaacaaaaattaaatttatagtctattttgtaatatttaataaaaacacaagttttaaattattatttaataaaataaagaaattaatcgataatttacataaataaattattattataaattaaatatttttgtccaaattaaaataatatttattcaaattactttggtaatgacttctttttaaaattctattatttcaatagtataagaaatattgtattaatttctacttattttagtttacttataatgttaattttgatatcatatttatatattgagttatattttgaactcttttatttagcttataatattacttcttaacaatttttttttaaaactatattttcaccctattttattttattttattttgtacatataggagagtgatattatatatgttctcacatttcctcaattgttagtgtattttgttgtgtttgttgttgtagtttttttttttttgttgtgatatttattttttaagtgtatagatttttggagacattaaaaattattagaggatcaacgactatcataaataagtttttcttcatattttaattcctatataagtatacattttgaaattttgattttaaatttggtttatttcctataagttaattctgtacctcatttatcttttttggtattttgtaggttgtttatctatacttttaaacacgaaaagttcatattgcaaaagagctgaactcattggttacttctta

SEQ ID NO: 213956 - DNA, 1119 bp, Cannabis indica
taaatcaatattcaatctgcatgcctggcgtattttttccttcctttggagatttattttactacctaatttggtgaccgaccggtatctgtataggtaagagttgggtacaaatttcagtttcggaaaccttaaacacaaggagattgtagcggaggtaagttttcctgtatgcatctcgtggttgttgataccatcgtggcgcacctggaacgacaaggtacataataaccttatagtagacgtgaagaagtgtattgactctattcgatttttcttttgcagatttacatgctacttatttttccttcccttatcccttgcctgaaagagagctggtctccttcccctcaggattggatacaaattgaattgcgatgttaaaggtggggcttgatagcatgtgtacaggggttgtagccaaaaaccatcttggtaaggtggtttgggttcaaacgacttgagttaattattgatgccctgtgcggggaagcggtggcctgttgtttggccatttctgctgatttggatatagatgccaagtttgttattgtggagagcgactcgaggatagttatcaatgctcttaatgggaaggtgactcattgggttattggaaactatgtctctttttgtaatagttactcttatttgtttactagttatattttctcgaatattagcaggacatgtaattttgccactcataatgtggctaaatgggcgtttacccacaaaaagttttgtattattccgatatctaccattccaattaacatattatgtaatgaccgtgaaatctaactattctatttattaaagtaccaaaaaaaaaaaatattcaatctgtataagtacaaattttaaattttccaatccaattgaatccaatacgcacaagtgtgtatccacactttgcaaattgtgcaaattgaattagattgtatattttataaatatccccaccttaaagtttttttttgataacagcactcattcggggacgctgcaagatatccccaccttaaagttattacctaagatatatagaatccaatacttaattgaaccaatatcgatataacattaaaaaaatgtgttatgcactatacatgcctt

SEQ ID NO: 213957 - DNA, 963 bp, Cannabis indica
ctggggttgtggtctgagtgtgggattggggccaagactagagtctgtgtcccagagtccaggttggggtcgaagtccaacatattgattaagaaaaaaaatctatttaaaaaattttaaaattgattttttttgttttcaaaatttttaaaattttgattctcaattaaaaatttagaaagcgaaaataattttatagaacatattattagaaaatattttcacctttttaattaaaaaaatagaaaactaattaaaaaagtgttctaaacacacccttagtacatatcaaaatttaggaagtaaaaatactaatttgccttatttttttttgtataatatttttatataatttgcaaaaatataatttaaataaatatttgctaaaaatgatttactaattccaatttcaattccaattctaatattaattacccaaaactaatacgtcatcacgttgatcctatctaagaattattttatctaaaaaaaacttctaataagttagtgtaactctcacattattatacatgactataaataatggtgcttttttttataagaaactagagtttagactagattagttcatttgttttgtttgttttttctttttgttaagttgtaaaagacaagtaaagtaaatggtaatttatgacttcatgtattagatttcaattaataaaattaaatttaaatttacattaataaaaagaatataacactaaaatataaaataactaaactatatatatatagttacatacatatatatcaaaagaacatcaaactattttaatgcctaactgttgacataaactgattataataccacagtggtagcaaaaaataataaaataccactatccaaaatcataccctatcacaccaaaatagtttctaaacagataaggaagactagggtggacggtggaaaatactgaccgcatctcgcaactgttc

SEQ ID NO: 213958 - DNA, 830 bp, Cannabis indica
gtctcgaatcaccgaccccacacaataaaaaaacttaaattctgttgtgactaaaagtaataaaaaatattgtgaccaaaaatttgtcatgaaaaatttgctgtcatgacgaggttgtagctaaaaaatccgtgactaaaattttagttacaataaaatatcattgtcactaaaagtcaattttggtcacaactagtctttgtgactatagctgttaagatattattatatttagttacaaccattcttcagccacaattcatttattttcacttacaacttttattgttactaataattattttgtgacaaattagtcataatttttattatcactaattctttttaagtcacaacaaaagtttatgattgattctaatttattcacaattttttattatgattaatattttttttacaatcaattaaaaaaaactatatggtagggtatacaaagattaattactttttagctataatatatataagcataattcaataaatctcttagcaaggtctttcattactactttttggctaaaaaattgattgttcatgatctatttttagctaaaacttgaaaaaatagaggaaatagacataactacctcaataaacaaaggtagttacttacatatccaatgactaggcgatggtcaaaataatactaaactactttctgatccaattgaaacaaaatctagtaatgctcaacatttgattgtagtacaacaaagtttctttttttaagactttaattgtttcccaacacctttaacttcaattccctcctcttctttgaaatttcagcaaacaactcgtgaatttgc

SEQ ID NO: 213959 - DNA, 535 bp, Cannabis indica
taaaacttacaacttacatgtattaattaactatatagaaaattagtaatttaattcaatttaaatgtaccccattaccaattatatcctcacataagggtactgttcatgtaggtgaggaaggttttttttattacataaaattataatcgagatataacaaatagaagaaggtataaattaaatatataataaaaaaaaagtaaaaataaaatgggttaacaaaaaatgggtataagatgcaatttccacgttgtacacgggctgcccacaatggcccaatcaacccaacccggcccacctacctacctactttcccttctcctaaccctaaccctaacccaaaccctatcacaaacattcaacacaatctccattctccaccatttccagtggcagccccatatttgaggtgagcttcactaacttcagtcttcattcctattacttgacactatttctttatttctttttctttgatttactcataactttccttttttattttttggattctttgctgaaaaaaattggt

SEQ ID NO: 213960 - DNA, 955 bp, Cannabis indica
ccttactctgcagcatcgaatgggccagttcattctggtaatgaacaagtaagccatcttttcattaagctaatcttctattatgccttgcttataatttgtatactgtagacttgctgatccttgctttgttctgtgttacctagattgattttgctataaatgcacttttgtcactgaacatggtagttacactcttggttgctttagtactggacaatactgttccaggaagccggcaagaacgaggggtgtatatatggtcacactcagaagatatcagaagtgatccgtctttgcttgcagattattctctgccagggaaagtcggccggtgtttttgttgccaaaatgctttggggtgtgacagtttttaatatttcctcttgaatcttattaacaatattctgaaaagtcatcttatctgtgaagaggttctcagtacacagctgaattggaaggacactggagcttcaagatttatatatatatagggaattgttgctgttgatatacataaatagcttcttcttacacgataacgaaaatttctggctactaccaggtttgtgaaatttgttccattcaaaaaccaaacattattaatatcccggactgtactatagttaaaatttaacatattctttgagaaaggctactcgtctgtctatttgttactaatctttttcactctttttcattaatgtacaagcctaccatttactttacttacaaagaagttggaattattagagttgaactttacatggaatatatgaggttcacaacatcatattcaaaccacgtggagctagttcttagctaactttttcttaacatcttcataatgataaacaaattgatctaaagcaagatgcttggtgtattctccatctttaaaacacctaaacatcaaggttaactaagttggacatcgcatagtctctctctctct

SEQ ID NO: 213961 - DNA, 790 bp, Cannabis indica
aaaagaaaaaaggaaaaaaaaatcagttggagagagcttcaacagtgggtcaaataccccaaatgtcccaaagcttttcctttatagaaaaatatacttaataattagaaagaggtcactattgtaaacaaacgataaatgttaaaaaatatcaatagtgtttagtattttttttatgtgaatattattattggtctaactaagtatcgagtcccatatagtttaatataataacttttagaaagtatcactagtcaatcgcaatgcgacatgtctagtggtgtttggcaacactggtgcctaatagtaatgctctaaacaaattgcaaagagaaatggtaaaaggtaaaaagtatgggtattaattagaccatatttaatatttttaggtctattcaaatcccattcaattatatattagatgttagattttactatctgatccgatctaactaatttcagtcattcaatcgatccaacatccattggattggatcggctttatctgttggatgtatttcatatatatatatatttattagtttaattaggtttattcaatattttagactaatattttttagatcggattggatccatctaaaccaagaaaaaaaagaataaaattttaatgttaattattatatatacatatatatattttacgtatagtaatataaaatctacttactcatccaaagtaaataaaaatcttaattagttcgataagatattggatgtattggatttttagacacatcatctaacattcaatccgatccaattggat

SEQ ID NO: 213962 - DNA, 845 bp, Cannabis indica
attacatatcgtttatacatactttattttcatattatattttcatatcacaaatttttacttttgatcaatttgtaagaatttttttttttttttttttgttagtttttagacacctttgaaagagaccctctaactctgtctaactagattaagtctgtgtaatacattttgaattaattatatgatttttattttgcaaattatattatttaccgttaatataagaaaacataagaaattatctaactgattaatatcgaatataaaaaagaatcaaaacttcaataataaataataaaataataattatcttaggagacatatccatctactaactgagaaataaatgcgattgatttaattatgagaggaaatttgaataaaatcaaacaaaaacaaagtttgcttcctagaaaaaaataaaattgatagacacaaataatatcaatcaaagtagttaagtagatatttaattatgatatattgtaaataagaatataggtgagtttccctttcagaatctttaatattaatttgtgacttcaaaattaaatttcttcttccacaatgaatattaagtagatattatttatttattttgggaatattttatctaaaaatagctctagtgatcatttagtcaactaaaaggaccacttaattaatttggtggcattaatctaactaaaaattaatttacaattctaataactaacaactaattccttcatttctagaatatatatattatataacttgtatatattagaaagttttacatagtacactaaaaattttgcaaaaattataaaaatacgctcactgatttttttttttttttt

SEQ ID NO: 213963 - DNA, 516 bp, Cannabis indica
cttcatccaaagtggccaatttcattggccccttcttcgaggattttgctccagtagaggcgagggtttacatggtatggatttgatgaaggtctaggatttcttggtcgaacctaaagaaaccgtgagtgtgaaggtcgcggagaacttcactcatctgaaaagaaaatctagcaattagcccccatatcaaaccctaggatcaaaaaggggaataagggtcccctaaccgctggaaagaggccccctccgaatgcctaccgaaaaagggaatccagagattctctaaggcaagcatcaggtgcaaaacatcctagcaaaaaaaaaaaagaaaaaaggtatggaagtcgcttcgaacacccagaagcaagcaaacaaaaaactaccactttctactctcaagaaagacagcagtgcacgtacagagaaagcagtaaaaagcataaaaaacaacaataaacgacagtggtcatcgaacgccccattttgggggggcatcacagtgacattcaccgt

SEQ ID NO: 213964 - DNA, 1477 bp, Cannabis indica
aattgtatattactagtcttataattatatatttgagtttttattttatactttaattttatttatcttaattaatttttttttcctttttgcaatgtaaagtgagttaagaaaagttaaatttagaattagagaaaaataaaaataatagtaaatgtaaatatatagtgctaagagaatttttcttaattaaataataaaattaagttcaacaactttaattttttttaacttattggtcattgaactaaaattaagattaattataatatttttttttaaatcgaaatatatataatcatagcactagcccccatatacccaccaactaattagatcgatccatgtgatagtgtgatactgtgatacagctgatgctttaaaattaaactaaatatttgcaaaatttttttataagctgactaaagattctcctaaagtagaaaaaaattaaataggtaagattgaattggattaaatatgttaattagtttggataattaatccaattaattttatttagttgcgattatttattctattcaacagtgtggggataaataattctatatataagtgagtattttttttaatggttttcttaattttaattttgttaacatattcaaaaattaataagaatttaaaaaaaagaattattataaatgttttttatctaaaatatattcattaaaatgagaaaaaatatataattttaaattatcatacataagttttcaaaatttaaaataatattaattaaataataattacttaaattaattctagaaaaataatatgataaacaaattatatatatattttaaattactataaatttatattaatattttagaaaaataatatttatattaaattagtgattaaattagtatttagcataaataattttatattattttagtattttattttaatatttgaattatttattaaataaaaatataatagattattttattatatatttatgatatatatttgattatagatgatacattattttattttattttataatttaattatttttaatatttatttatttttttgtgaattattcattttttttattttatttaaatttaatttttattaaaaaaagaaagaaataaaatagttacagtccattaatcttaaaccaaacatagaattattttctgttttatcttaaatctaattcaattccaatcttctgtacatacccttgatatatatatatgtttcaaaaagggataattacataaggcactattttttgtaaaaaaaattatatttttacgtttattattattttttttttttgtacatttttacaatttttcatagaaataacatgaaaacaacaataaaactacacaaaagtaacatcaaaataaaatctaattaacattaaaataataacaaaaaataacatacagataacaataaattaacaagagtacaacataaaaag

SEQ ID NO: 213965 - DNA, 537 bp, Cannabis indica
gagtttagtaaatataaaaatgcgggcgttacataatatctcacttgggattgctcgtggtattgcatatcttcacgaaggatgtgatatgcaaattttacatttcgagattaaatctcacaatatttttttggatgaaaatttgattcccaaggtctctgacttcggtctagccagattatgcccattgaagagaaacacagtatccttaaccgcagtgagaggaaccactggatacattgccccaaaattattttacaaaaacatttgaagagtctcgtacaaagcagatgtctacagttttggaatgttgttgatggaaatggctagcaggaggagaaatttgaacgcggaagctgagcattcaaggcaaatttattttcctttatgggtgtatgatcaagtcaacaaagagaaggaaattgtactagaagacattacaagtgaggaacaagaggataaactaataaaaaaaatgattataattgcattatggtgtatacaattgaaccctagcgatcgcccttcaatgcaaaa

SEQ ID NO: 213966 - DNA, 875 bp, Cannabis indica
ctcagcttcagtgacagactgctaggtaaaggtctgactcctaatgagtgtagcttttctcctcctcgtgagtacatgtacgcatggggcacttccttgcttatggcagggggtatgctttcattagctgttgggttgtttgccctaaaaaaaatatatttcaatataataaaatttactaattaataaaagatcataaattattttatgtttcatagttcacatgatttattttcatgattatatttaatgtataaattctattaagtccagaacatatatatttgttcatgattatagtatcgttagcacatggaggtttacgtcgatgatatgttggtaaaatcaatcaaaagtaaggatcatacttcagaccttgcggaatgctttaagatattaaagaaatataacatgaaactaaactccaaaaaatgttcctttggggtttcctcaagaaaatttttaggattcatagttaatgcgttaatgcgagagatattgaggcaaatcctgaaaaaaaaaaaaaataaaggcattaataaacatgcaattaccaacgaatcctaaggaagtaacaagaatatctatggacttttaacaatatctatatttgtgtttttatttttgccacatttttgtaatttatttttatattcctatattgaaagattgaacccagaagactcatatagctccctagtccatgaacccaaaatccatattcttaaaatacctcctttgatctcgaacacagacttgcttttgacactcgtcgattagcctccaccatccttcgttagtcagaagtttagtgcgccagacccaagcaaaatctctctccaagtgtaactcctgtttgaatttccaagtgattg

SEQ ID NO: 213967 - DNA, 561 bp, Cannabis indica
ggtggtggttttggaggtggtgctggtggaggaattggtggtggagccggaggaggagttggtggtggagcaggaggtggtaaaggtggtggttttggaggtggtgttggtggtggtgccggtggaggagttggtggtggagctggaggaggagttggtggtggagcaggaggtggcaaaggtggtggttttggaggtggagctggtggtggtgtcggtggtggagcaggtggtggctttggaggaggagttggtggtggtggtggagtaggaggaggaataggtggtggtgcaggaggaggttttggtggtggtggaggaattggtggtgggttctaaacaaattacaccataaatgttttagctacacagccattatatagcaaacccaactgtgtaataatcacacgagagagtgttcttaatttggtagtggcatcaaatgggatgaaatattaatatcgatatagttactttactatttcttactaattattatgaagaaaataaaagatagcttttgatggcttcttccattccatgcatatatatatatatata

SEQ ID NO: 213968 - DNA, 641 bp, Cannabis indica
gaaccctttgtgtgccatactataacccaagaaattaaagggacaaacctatgctacaatttgtttttgttgtagggcctgagattgggatagcacaagcacccaaacaccttgagactagcatagtctgggacggttttgaacaacacctccagaggtgacgtgttcatgagtataggtgagggcattcaattaataagataggctgcagtcctaaatgactcatcccagtatttgagaggaaggttggcttgtgcaagaaaagtgagaccagtctcaacaacatgcctatgcttcctctcaacaaccccattctgttcatgggtgtgaggacatgctagtctatgaacaattccaaaactttcaaggaggttagtaaaggctctaaactcaccccccccaatttgattgtagtgtcttaattttatattccaactgtaactcaacttgagttttgaacttggtgaaagtaggcaaagcctcatcttagttctaagaggtatacaaggtatacctagatgagcatcaacaagctgatgtaatatctgtagccatttactgaattgatgggtgcaggtccccataaatcgaagtgtggagaagtcgtgtagtggttcactagtaagtggtagtagagttag

SEQ ID NO: 213969 - DNA, 534 bp, Cannabis indica
tttttttaaaaaaaaaaagctgataaaaaaatcgtgtagttcaaaaaaaaaataattttatagttaacatttttaaattatataatatttgaattttataaaaaacgtaaaaaaaaatatatgttatcatattttaaaaaatatatatataccaaataatagaataagtcaattaataaaattgataaataaatatcggtagatttattatttaatttttagaattgataaatatatttggtttttttaaaaattttataggaatattttatttaattaattaatcaattaatatttataaatttaataaaaaattaaaaaaaatgagagaattaaggagagaacagatagtgctatttgaagtgatttcagaccgccacgtcaccgtctcatacttctcctttatatatatatggatgatatctaaatgggtaatacgcattaatgggtaacagaaaaaaaactaatgaggtgacaatttggtgacttactatatagcaagtcacaaacaattttttttttaattatatttat

SEQ ID NO: 213970 - DNA, 540 bp, Cannabis indica
ctctttctctttctcttttttggccaacccaaagcagaaggaaccaagcttctcatctgtattttctggaattcagctaggaattcaagagttcttcaggttgaggtaatccccaattctttgttcttggtgtttttaagctttgaatttggtttcaagtaatgattttgtgaaataggggctgttagggttggtaatgcttagggttctgactttatgttaattttaggttgattctaagttcttgttagtaattttgagcaaaggagatagatttgagcaagcttgagctttgaaactcaagctttggtctttaatggcatattgtgatacgatgtgtttttctgtgaattactggttggaaaatattgtgtatacccaaattaggtactctggaaggtttggtggcatttggtggggttttgagcaaggaatggaatgttttgggtgaactggtgcaaaccgggtaaccgggtttaccagtaccaataaaactggttaaccgattttgcaggggtccccgaatgttccattttctca

SEQ ID NO: 213971 - DNA, 1165 bp, Cannabis indica
gcataaaacccaacacatccaactagaaggatcgtcatcaacgcagttagatgaggccatggatggtgcacccactgaggaggtggctggccagcctacagaggctatggtcggcccacacattggcgatctaaacactgtagctttcaactcagctccagctacacctgcacacatgtagcttcacattattagtatttctactttatgattttatttgcatagacattttgatttcatgttctgtaaggcctgttggtcttttacttttgaacattacttattttcagctttggggttttcatgttcgttcttttggcctataggcactctacttttgaacattactactgtttagccctatagctttttactatggatatgtgaccgaccatacgatctttaatcctggctatcttcttgttgccttgacatgtaagcatccaggttaactttttttgtgccaatctaaagtatgcctgcacttgacttagaagcgggtttagtagcttatactacgtgttaaaatttctttacataagttttatgtgctagttcgatgcattgtacggtgtgggtgccccctacgtgagcacgcatacttatggtctctttgtcacttgcaattcactaagtttcatagaccttgcctgagaattttcttgaggtgctatctaatgtacatatatggaactgaaaaagaataactttaagaagttagtcttgttagcaagtggtttagacacaacatatttgaacataaaatattattttttattcattaattggtctttattgatggataacttacataaattgaatctacaatcttatataataaaaagtccacttctagatatcaatttgctacccctgcttgacatgcaaagcggaggccatcgttgatgaatgatggccggccatgccaaaaagccatgagtactagctcttttactctaactctattgatgagttgatagagctgctactaaagataacattctataagcggatcacggatagtacttgtggaggtgctccccattccaatatattggtaggagaacaaactccatgttctcgtaagggaaacgccgggtaagctgtgcaatcccacatcgcctgggaatgtcaagtgtgatgattctgagactgtgtaggtata

SEQ ID NO: 213972 - DNA, 1267 bp, Cannabis indica
ttatgtttattcaatccattcgcctatataatgcgattgaactgatgggaagaaaacatctctttttcgtatcagaaaaatacagtttttcataaaattaaaattccatctgcgatatcaaatttttgggtgtattcgacggtgctctacagtgcagtggggttccgatacagtacaacgactgggctgttttatcctggggacgaccggcaatttccgactgcttgcacactcctgggcagtgccgcgaacgtcttaaagagagcgacttagtccgcgactcaacccagaattcttcattcggtaatatcgttcctcttttattttgctagcagtttactcaacaatatatatttgatttaacttgatgatgatatgtttcttcattacgcaagcagacacacacaaactagtcaaatatttattactaatgtcgtttttttctgtattttttttttcgtttaataaaatgtgaggtttggataaatgatgcatgctttatatttatatattatctcacgtaattatcaaattattgtcacaattttcaacggtgatataactcttaagttggattatatatatcaatctgttataaatacaaggctgggtacacttgtcgaatgaaaggtcgtgcatggcgagctagctaataatatataatatatataatacagataattaaaaagatgactatcacatataaattaaattatttattaaatgctagttgaggggttggcttaagctgattgggtaatttgggtacatacagtagtgtgttatataatggttttcttttatataattatttgaataaacagtgtataaccatataaatgtcggagaaaaatgagttattagtactgataagtgttgttacctcataattaattattgttgtcccacccaaatatgaaaaacaagtaagatgtattatccaaaagataatgaaataaatcattttacccagtaacgtacgtaaattggaaaacattattattaaatgaaaataaatatagtttgttggtagttatatatagagggtgttatagttggatatattaacggtgtccagcatcttttaaaagtaacaccctaataattagatggaatttaatacttaattataccaaacagcagtataacacgaaaaagatgctaaacaccggtatcttttcacgattctcttattatatattatatatatatatatttatgatgaggatcgggcttcacttttttgatgatcgtaattaaagaaaat

SEQ ID NO: 213973 - DNA, 604 bp, Cannabis indica
atagttgaatattagtctttgcttaaaactaagaatatggctgaaagagttcttggaaattatccctggatttggcccaggttgataaaatgtcaaccttggtgctgggcaagccccaagtgtcaacttggccattgggccttgcttttggcacccaggatatgttgtttttttccgcgaaagtacttgttcctcatttttgatgaagacaaagaagaggcatagtcagattttttatctgatacttggaagtggccagattgacaaattgccatactaggtgctgggtgcccgagcattgggtgctccgagtgctcaaaaataaactttctctatttgattttgacgcctcaaatatgtttaagctatatctagttcatgttccagtacaaagtatgacctatttgaactaagatggtctcgaaaactgaaacccttattgaggatgtcaacttgggcgccaagtgaaaccctaggtgcccaagttgactttcgggtgcaggttcatataatttcagctctcgggacctagatttggttgctccatattttcatggtacataatactaaaagatgtccatgtcgactgctatgactctggact

SEQ ID NO: 213974 - DNA, 659 bp, Cannabis indica
gtctggcaagtagcaccattgccaaaaaagcaaatctcatgccaatacagttcctagaggaacccatcattaccgtccaagaaaaagttgacatgttggatgacacctaatgcaacttaccttcaaactggagccttaccagaaggtaagaatgaagcaaaaaagattagaaggaaagctgctaggtatctaatcctagatagagtaatgtatagatggagcttcttcatgccgctcttaaggtgtgtcaccaaggctgaagctgaacgactaatgataaaagtgcatgaagccttctacgacaaccatacaggggggcaaagcctatccaagaagatacttcgacagggttacttttggccaacaatgatcaaaaactcgatggaccacgtcaaaagatgtgacaagtgccacagattcttaaaaattccaatagcttcatccaacgagttcacgatgatgtagtctccttggcccttcacaatatgggggatagacctgatcggtcatctcccaaagggaaaggaggggtacagtttgttgtagtcgtagtagactatttcaccaagtaagtagaagttgaacccctgaaaacaatcacctctaaaaaagtccttgactttattttcaagaacataatatgtcgattcagacttccc

SEQ ID NO: 213975 - DNA, 676 bp, Cannabis indica
tttggttttttgcaggcaaaatttagtcaaactgattgataagttagacaagggtaacataagttgggaaaagttttcatatttggtcaagagctttcatgagaagagaatcggaggaccaaaaccaaggcctatttcacactctcgagactcctcaaaacttgaggagaatttctatgcaaatccctttcctggttgcatttgtcaacaaagagtttaaggtgtttaaaactagaacctatcccaaaaagcaagtggagaaacaacaattttgaaaaggttaagtgagctaatttgtaaatgtgataggcatagcacacaatttttttttaaggaagtgtgcaatggctcaatttttccttttcttcttaagtatgttcgaaattaattgtagagaaattgagaaataataaattttccctaaactagtggtatgacagagttttatctaatgaatttttatgtggcaaaaatctttccaaactttttatttttatttggtaaaacttctcagaaatatagcaatcattgcatacacaccatttcgattacgctttatatattttttctaagaaaaaattgttgatgttaacattattgtggtgtgattagaaaatttagacgaaaaatacatataaaaatagtgatctaatataaaaaaaaaatggaatatata

SEQ ID NO: 213976 - DNA, 863 bp, Cannabis indica
ggattttttcagcccaaaaatagtatgctagctatctccatcagaattctaagattacatggttgagatttggagatgaaaaaactagctacttccatgctgttatgaagaaaagaaagattgagaataggattgtttcctactatgtgaatgatgtaatagttgatgatcatcctaaagttgttgagcattttctcctccattttagaaactttatgggaaagaaaagtacaacaactaggaggattaagattgaatgtttggagaatggctgtaagctgaatttacttcagcaagttaagttggttcgttcgtttaataatgctgatgttaaaaaatctgtcaccctattgcttaggcacgctacagtaactttctaattactgtgcaaacctttactaatcaaaggatttctctaaaatcgtgccaaatttgaactttttaattaaactttaaaacttttgcaaacatatatatatctgtacggaaaggtgagatcccatttttaaaattacattcatattcaaaatatattttataaccatatcgcactgcgactacaaaataaaagcccaagttgtcctaagaccgaacactctagggctaaccatcttgacatgtacaatcatcccctagctctggactcactggtactcagccttagcctttcatttacctacacatgtaaataaaatatgtgaatcgacagactcagtaaaaaatcatataacacataacatattaccgacttgtatttaggcacgtcatacacctatctacaaggcttaacagatgatcaagaacattcttaataaaaatacgacctctgtaccacatgcacttagtacttgtcccgtactatt

SEQ ID NO: 213977 - DNA, 626 bp, Cannabis indica
gatgtgatccaatgaacaccccagtggaataagttaattctatttattattattattattattattattattttgaaaaagtaattctatttattattatttatcaatataatatatatttgaacagattaatcatatattaattgtattaatgttttttttttgtacgtgaattgtattaatgttttagttttgactttactttttattttcttataacttttgtttttattttgttctgatatttttgacttacggttgtatacgttatttatgatttaatttttaacttatatataaattttacattaaatgttattataacttttaatttgcattaaatttggtaattttctttctcacttgtttttaacagtaattttatggctatttttaaagttgctttaataaattgaatcaaaatatctttcttatatgatgaaaaaaaaaaaactacctttttataagaattttctacgtgcttttattttaaaaacttgtgcttctttagagattttgtgctatcttaagtggttttttgagccaattaagattattatactatattttaaatgattttgtataatacacttttttcttttagataagttgcaaatttctaaaga

SEQ ID NO: 213978 - DNA, 651 bp, Cannabis indica
cgtaaaaagcatcaaaacatcaaattattgtgcaaaactagcttggttttatattaagtttaattcaagtaattttcttttctagtgcatgttgtttcttggtgttgtttgtttttttcatgtagtatttctgtagtacaagtcaaaattttagctctttcataacaactatcaacaaaggaatggtgttttaatgagttggggtgttgtgtttgaggatgttatagttttattgtctaaattttcaaggttagttttgttccatgtggcttgcaataaaaattttacaacgcatggtttggcaaagcatgccatttgattagacgataagctatcctaatttaaagagataataccattataaattgttgtattattaataacgtgtgattttaatcaccacgtacaaaaaaaagaacaagggtaacaaaaaattggttaattttgcaaataaaaagaaaattaataatgggctgtagtagttacaaagaacatcacgtaattaatttggtagtttggttgccatttataaattaaaccagattataaggtcatctctaatggctttatttcatctcaaaaaaaaaaaaaaaaaatcatctctgttggtaaaacttaagtttagtgttaataaatcaacaccaaataaat

SEQ ID NO: 213979 - DNA, 500 bp, Cannabis indica
tttttcctataaagaagttaggtcaaagtagtaacaacgcatgagattgaatattaataataagtactggcaaaattgttctgatgaagtctatcaagtttagtgactaaatcttcatgtcttgtttttttctcttcatttcatactcttattattattattgaaacaaaaaactttgggtgatatggcagatagatatggttcttgccagtagtgcaaacttttatatatatatatttgtgtgttttttttttttttttttttttgttttgggtgatgctaataattctttaattggtcctgacacctagtcatgatcagccattgtgcttttgggtcatgcccttcgattgagctattattaattaagttgattgtattatcaattcacagtattatatcttaatatatatatatatataaattaattaattatagatacctatcagcacataagccaattaatatgtcttccttcatatttgtactattttctaatg

SEQ ID NO: 213980 - DNA, 562 bp, Cannabis indica
tactttcatttgtatgagtagactagatatgtgggaatcgaaggttgcaggtgtgcaagttgagaaggctgcttgctgctgcatggagaaacttgtgcgaggagctgccttcagctgcgtggagtaccttatttgaggagcctcctcctgctatatggagaagcttacgcgaggagctatccttagttgctactcaaggagggtaggcgcatattgcgtggagcttattgttgttgtgcgtggagttgtaatggaaggaaaaatctaacaggtagtggggatgtgacaacaaaaaaaggacaaaagagttggggacctcctcttgttccttttgtttgtctcaagaatcttacatgatccctccctcttatttattatccataggaatacttgctttttaaactttgcagttaacacttgcccccattccaaaagaacacttttaagtgatctttttagctgcaactgagctattctctaagctctttgcggtgcacctcgtccggtgaaacacttgatatatcgcaccgaaacattgatgagacccttcaatgaggtaggt

SEQ ID NO: 213981 - DNA, 778 bp, Cannabis indica
gatttaacggttgtcgttcacctcccctccttataaataggatcacactcttggaaattctcatctcatcttcacttcatatcagttgctatcttccttagtttctcgcttcttctaaatcctccctacacctaagcctttcgacatttttctctttctttgagtcttgacgttgtgagcctttatctacagcttgatagggagtatagcctcgcacccgtaagccaaagagaatggggtttctctagtcgtagtttgggggtggttttataagcccacaacacattagggagctccttgacccacacccctttgagtttctccagcttggtcttgaggtttttcttgatcactttgttggtggcctccacctagctgttgacctgggggtgcaccacagttaaaaatcctctttgtatccccctctcctcacaacatgatcctagtaagtctctgtattgagtaccattttcagtgacgattttataaggaactccaaacttccaaataatgaacttgttgacgaaggagactacttgtttaatagttatgtgcactagcagttttgcttcactcccttggtgtagtagtccaccgccaaaattgcgtactttgccccagcccttgccattggtatagtgctcctattagatccatccccgacatggcaaaaagccaggggctggtcatgctggtgagttcgacaggtgcacgccagctgtagtttgcatgtttatggcacttgtcgtatcttttggcaaattccttggcatacttc

SEQ ID NO: 213982 - DNA, 584 bp, Cannabis indica
atataaatatctaataactgaatgacaaatatcaattagattttttattttaattattatatttttaattaagcaattatctaataatttatttaattaaaaattaaaagattattaacttaatttaatttaaattattttagccaatcaaataattaaactaaattaattatgcctttatatgtcacccaacacgtgtggattgggactacacgcgtgggccatattttaaggtctaaaattaattttttaattttgccttaaataagatttattatttattttaccaataaataaaaatttatttattctcattaatctcttatttcacaaagattaaaataaatattattttttctaaaataatatatttctatccttaatattatttaagaataatattatatttaactaattaatatagtttcatccaataaaattaaatactaaaatattattaaatatacaattcataattgccataattaatcaaaataaaatatttctaaattactattttacccttaagaatttattttccatagacattaattctcactctaaatttattcatcaaataaaat

SEQ ID NO: 213983 - DNA, 1571 bp, Cannabis indica
attattttaattttttgtatctatatctttgattgtatcaatttatttgaattcatttaaataattaaataaataaaattaattaattacatattttatggtaaattatcaaggaatttttcaaaaatatattttttttatgttttatttattattttagagtctaaaatttttatttataaaaatacaattttctcaaataaaaagtaaaaaataactacaaaaacaataaaaaaatcaacctcacaagtcacactaactataaatcaattataaataactataaaataattaaaaacaacgaaaatataaaaagaacaaaccgtaaaaataaaaatttctctgcgttaccatatttttgtaattttttagtctattatgtaaaattttcaattatcaatatattaatgaacaaaattcttagtatatactatcttatattaattctttctactttagatttattttttataaaataaataataatttgactataaatcaataattttaatgaatataaaatatgttaaattgtcaatttcgtgttacacaactactatatcatagcccaattttaataattattacgttcaacccaattcgacatatgtatatttttataatcctaactcgtaataatttatattaaatttgtgttgtattattgtattgacatgatgatatgttacctatgatttcaaaagataaagtttttattaaaaaaagtattgaatttatattattaaaaacataaggcatcaactcaataacacttattaatatcttaatattcttatctaaacccactttcttcttattggtttttcttttatttagtccaacaggttgcattttctgattactttgcttgttacaaaaaaagtcatgacttgaatccatacatttatgaaaaatgttattgagcagccataatacctaatatctttatgaagtataatattattattggtgtaactcaatatcaaatctcacttattttattttaataaatattataaaaaattactagctaattataaaaacgacacttaatgctctacatttatgcatgggatgttattaatattatcattaaaaatttaatggttatgtgtgattattttacaacaaaattacattcaattcttagaatattttttatttatctatattagcgtttatattgaattttttcattagtttcgttttaaataaaaccctgatcttataagactaattgttgctatttttaatatgagaattaatatttttttaaaaaaaatataaatatttatgttgattataacaagaataaaaaatattttactataccgaacaaaaaatttaaatactcagttataaacatgtttattttatttatatgcgtgaaattaattgattattttgaaatttatttaacacagtaaattatttaaaaaaaaattaaaaatagctaaaatatctactataattataatatatactgtcactaaaaaaaattaaatataaaaaattaaatataaaaaagaaaacatatgtgataatcctacgaaagctccctacatatatat

SEQ ID NO: 213984 - DNA, 614 bp, Cannabis indica
atttccataaatattcaacatcttacaacaaagatcttatagctgctcgaaatacacaaaagtgatgaatcacctcgctatataaaacagtgatgaatcacctcgttgtacacaacagtgatgaatcacctcgtaatacacatcaatgatgaatcacctcgttatacacagcagtgatgaatcacctcgttatacacaacagtgatgaatcacatcgtaatatacatcagtgatgaatcacctcgtaatacacagcagtgatgaatcaactcgttatacacatcagtgatgaatcacctcgtatacacatcagcaatgaatcaactcataatacataacagtaatgaatcacctcgttatacacaacagtgatgaatcacctcgttattcacaccaatgatgaatcacctcgtaatacatagcagtaatgaatcacctcgttatgcgcagtagtgatgaatcacctcgttatacacagtagtgatgaatcacctcattatacacagtagtgataaatcacctcataacatacattagtgatgaatcacctcataatatacatgcatcaatgtattgcctcgtattacaaagtagtagtgcacctgctctcaaat

SEQ ID NO: 213985 - DNA, 638 bp, Cannabis indica
agatggtcatcaatggcggaaagttcagagcctggagttgctaagttctaactgaagggagttcagtgtcaacttcgcaatcagatctgaagggatttcaggttgaagaaatgtcgaagaagaactcagttgctgcacaagggattgtgcactaacaatcaggattcttgattgttgttggtaattcattactaattgctgtaaagattgcattagattcctttagagagaattggagattgtaatacgaaactattgagaattagtagatgagattaccctggttcggggaacccaagcactagtcggctgagatgtgttctcagtgcagatgaagcttgtaaatctttgtgtgttttactactttattatcgattcaagtctaaaattcatatcttgaaatcaatcaacctaaagataatcaacttggtaatttggatcattaaaaaaaacaagttgtactttcaatactcaagatagaagatacaagagaactcaaaaaacatcttgatgagttcaatcaaatcatcttggatctcaacaacataggagtccaaatagaagatgaagatgaaggtatcttactactcaactctctaccaaagtcctatgaacattttgtagacactattctatat

SEQ ID NO: 213986 - DNA, 528 bp, Cannabis indica
taaataatgtcataggtgaaaataggtcatagagttgggaaacttcattttgattagtgggatttgattatgggaataattaaataaggtattatttttaaaaatatatatattacgtttaaagaattttttttaatactaataacaaaaaataacatgcagataataaaaaatcaataacaaattaacataaatacaacataaaaatatcatattttctgtaaataaaatcacaaaaatcgtaaaaatgattaaaattccgtgaaactgtatttttgtaattttttttgtttatttttgtgtatttgtgaaataatctcttaattatggctattcgtggcccaatattttgggcccaaagtcttctatgtaataatgtgtgatgaaatatgcttgtggaatggaaccaataattaattaagcctagttccttccttgtaaattgaacgttacctaacacatatgggtgataaaaatagtaaaggttaggagtgaatatatgttatatgacagaatgcaaataatatt

SEQ ID NO: 213987 - DNA, 833 bp, Cannabis indica
acgtggaccaagttagttgaaggatttcatgatgacggagcaacgttgaaaagaggattctctaaagcaactgattctgttatgcccaattctatatcgttttctttagttattgtattactgatatataaggagcagttttctaatttgggaattatgctaaaggaagtattttgtttcttgaggagttttgcactcacacgaagagtgcccattttcctgttacggtattagagttagatacacaacatcactagttatactatacatcttcttaagctaaccccccaaaaaaatgggagaatgaacaaaaaaaagaaaaggaaatctaatacaagccttggctgcttttgcactttctcaagacaaaagggtgttctgtatgtagccactgccaatgccaaatgtgattaaaaatcagatcaaaacgtacattaatatgacccaagtttgtcccttcatcaacatctatacattacaaagatgaaatcagtgggacagtatgttgcctttgacaattccaactcctttatagattataacaggacaagcactgataatacaaagatggatatcaaactcatgaaagaattttactctattgatctcacaaagcaatggcaaaagacaacaggacaagcaagacttacgtaaggtgtgaactgttatcaattttagatctgtttctgtagttgacgacttaaaacattgcctacagattatctcacacaatgaaagctttgattgtatagtattactaactagctatgcgatcccttaatctcctggaccggatgccgccgaatatcaaacttgtcaacgtactcaagagg

SEQ ID NO: 213988 - DNA, 770 bp, Cannabis indica
tattatttactaaatcaactaagtaaaataggaataataaacctaagtgaatctcactaaaagacaaaaatgacaaaaggctaaaaagaccattttgcccttgcctaagccaaaaagcacacttgtcacttatgggtattttggtcatttctaaaactcgaataattctcaacatacccaatgtctaactaagtttcttcgctactactaaaatattaaaatgtgattctattagccaaacgccgcattctaatgttgcgggccacaaaacatgcaaaaatataaaattccatatatggcataaacaatacatcctgaatacaatgaatctctataaaatgataaatcataattaatattctagtttcataattaaaccctaattacctgctaatttccaagttaaaactaagcagcctttacactcatgctgatgtagaagctagcccctcagttgttacaggtcagctctcggtcaacaactcttacttctttgtattgtttgactctagggccactcactcttacatcacagcctgaatttttgttaaattagatagactacatgatagttatgataaagggtttggaaccctaatgcctggtggagaattagttatctccaaaaggtagattaagtctatgccgatcagaattgagaatagggagttgagtactgatttgatagacttgggtttcgcagattttgatattatacttggaatgggtttcttatctaagtactcgactagtattgattgtaagcagaa

SEQ ID NO: 213989 - DNA, 638 bp, Cannabis indica
agttcccaaagtcaacctaggtgcagggctagtgacccatcccaggtcgacctgctatgactcaagactacttaactctgagatgtcatctttcttaccacgtgtcaaccattgatgtccacgtcatcaaggctagtgtccgagttaacaaggacttagaagaatgtgaaaaatgagctagaggagttctttttttatagggaattagatcctattaaataataattaaaaatatgaagaaaaaatagtttaggctgatcttggtcagtgatgatgattcatgatgatccaatggtgaaaaaagactcttggtgaaatttgtcaatttttgaactttgaatcttgtccatcagattgtttttgcattatttgttggaaaaattgcaactttgtagaggatgaatttcaggcttaaaattgtcaaaattgcgatgttggtgtgagacatgatttgatagaactttgaaatagtttcaaaacgcaagttaaatcgtgtcattcaaatcaatattaagtgagttatggctgtttactgaggttgacaacctggtacccaggttgacacttagtgcccaggttgacattttgacgtcaacctagacgctaggtgagtgtcaaaatgtcctagacttgtattt

SEQ ID NO: 213990 - DNA, 1306 bp, Cannabis indica
agagagagagagttgaagagagatgaaatttggtcttatttccttacttgaaataaaatgaattaaactaaagtttttatctaataattaaaacttaacttcaaattttctaacataaataaaaccactaaagggcaaataacccaaatggcagaaagaccatttttcccttgtctaagccaaaatgtatccttaccacctagaggtaatttggtcaaatataatacttcaaataatttcgatatttctaatgtctatctaagtttacccgctataactaaaatactaaatcatacaaaaatatgattctattggccaaacatcgcgttccaatgttgttgggcataaaatatgaaaaacatgaaattttatatataacgtaaatagcacacctagaattcaaatatatcaccaattcataaatcaaaattaaaaatctaatatctgaattaaagcctatttatctactaatttttatattaaaattaagcggtatttacaagagagttgtttgacatagaattaggttagattagatctctcttctcatcactttctttatatatgcattcacttagggttaggttagatgagatagggcttaaaataaagagttgggttgaatctaatctcttagggccaaaatataattgttggctttagagtttgattttttccactttatttcaactgatgaaacaaaagtgactttctaattttagcacttttctcatctgattatttaatactaattttattttaataattatcaaataaaatataatttaaatatatttattaattacacccacaaagtgtaataattaacaaataaactcctatttcttttttcttctcaaaattgttcaaacttggtgaaaattctcaaataagacatagtttattttaaaattctaattgacttattaaatcaattagttgagtctataagatgatattaactcagacaatgtggggaacattcacctacgtaaccaaactcataaaaagtaaattttgaaatttactgagtaaaattcctaacttattaattcttcctgactccactatagatttagaatatacaccaattatagatacgctatgaatttatctattatttcaatcacaataatcattgattctctatagaaggtttgattgagtagggaccaaattacacttcaatgtactttattcttaaaatacttagctacttctaaataatatttcaaaaaattgatataattactaaaatgaggcatccattatttattgcgttgagctaaactctaaagaaactatc

SEQ ID NO: 213991 - DNA, 587 bp, Cannabis indica
ccgactagtattttcttgtatattaaactgatatataaatgtgtatggatcattttaagcttttgtattttgcttaaatattgacttagttattgaggtttcaaatatacgatctaattgtatttgtgtgttttgttcacatgcctacttactctttatgtacaacatagttattacttgttacatgtgaaacgataattatacttcaacataatggaaaatgctaaatattctaaggggatttataactagtgtgatgtagcatttcttaattagtgcctcattttgatttgacatcaacataatcttttcatattagattaaacagacttttttatcattggaatgagaattattattactttttaatcttcaaaaatcttcctcatttctctgttactaaacaaattcaattgaaaccttcaagtcaacatgtgtgtaaaaaacaactatgtacgagtagggctgtaacttggaagattacaagaaatggaccaagttaatgagttatattactgaaggcccagccctgaagctggacggattatatacatggcttgataagcgtttctctcatctcatacaaa

SEQ ID NO: 213992 - DNA, 577 bp, Cannabis indica
aaaagggaaaaacggttaggagagaaaaaaaaatagagggaaaatgagtttcaaataaaatagaaaaactgatcaacacccaactattaagaaactgctcaaaaccaaccacacgactcacaagcttaaaatttcaaaaactaaaaaaaaagttaataaagaagaagtgtataactgtggcggttacaaagtgatcagatgaaatttttttatgaattatattttttttaaaaaaaaaggtacatgaccgtgataagaaacatcacatcaataaactttttttaaaaaaaaaaaaaataataaaagatggcataacataaaacatgtgtcaatatcgggataaacgaaaatttcatacggttttaaaaagacagtataaagtatacaataaaattgtaataaatactgtgtggcagtataaaagtaacaaaatatgaaactacagtataccatataaaaatctcatacataatagtataattgtaaaaatgatattctcggcatatattccaaaagtttaagtttctaacttgtacaaacttgatgtttttgttcttatcgagtaaagtatatctgt

SEQ ID NO: 213993 - DNA, 746 bp, Cannabis indica
tatacatggcttgataagcgtttctctcatctcatacaaaatcacggctttaaggggcccaatttatttttatttttagataaatatcataaaaagtttcataagtttatttatttttaacaatattctatatcaatttttcttatagaaagcaaggggagtataaccattgaaagttttcaataagtattcaaagtctaatttaatttacttatgttttatggatctatgattgtatagttatacatataatacccctacatttctccttttcctaaattcaaaattctaggagtaaattgtcagaaaaggaaaaatatgaaattggtttttttaatgtgcatattttcagaaaaatcgtgtatgcttgaggtgattaaaaaatatttcactgaaatagaattaaccttaattaaaacaaccttaatcaaaaaaaaaatcgtgtatgcttgtagtgattaaacaatatttcactgaaatagaattaaccttaattaaaacaaatgtcacctatttcagaaacaaaacaaaaaagtgacccatacatgtattaaaatgagcaaacattataaatataataaaattcaattcaacactgccaaaatcaaggaatatcgaagcttaacattccccacatacttgaagggatagacagaatttatagaggaacatgtgcactaactcgaaataaattgatgataaaacttagaggaaattacactctataccctttttatattgtcctc

SEQ ID NO: 213994 - DNA, 752 bp, Cannabis indica
gacgactataaaaaaattagacttttttttttaaatatcaaaacagataaaaaatacatcgatagatccctttaaagggatgcattgtagaagcatcttaatataaaactaaagaaatgtatttgtttttaattttgattgattataacataaactatgttgtattttagcacaaataaattaaaagaagtaaatatggaaaatacaatgagaaattgatatttttgaaacttaagagcccatatcgtatggtccagcactgtctgtttcctcttggcccaaatccataagcatgtcataagtatgttgaccaatatttcactgattggatccaaatccaattaaaagtcatgaacgtgagatttcctaatgggcctaagctttccacatgggccaaactccatcatagcaaaagcccaacaaaactgttcacttcaccaatttttgtatccattaataaaaaaatacacttatattacatttcattaaaaagtatccacttttatgagtaatttgtctaatatactctcactttctacttaagtctagcacataatttacatttacttaaagggtataatagagacatcatctataaaagtatgtatatcttaaagaatataaaaatagtaaaaattaatataaataaaataaagtaagtatacaaatgtaatttttccccctttagtggcatgttttcaaaaatatattttgtttatttaggctgaaattttatgttttgattttttaca

SEQ ID NO: 213995 - DNA, 541 bp, Cannabis indica
cgttcctgacctagtacgcgttgaatgcacgataagattatgattgagagtatgggcgcctattataatcttgtctatgtttgtgttatgtttatacttttcttactgagtctattgactcacatatattgtttatgtgtaggtaagggcaaggtaaaagctgaattgcagtgagttcgggttagatgaagattgtacatatcgagtcggttagacctgaagtgttcagatcttcgagacaaatagactttattttgatagtccctaagtgataatttttgtaacttttgcattttgaaaactgatgtaactttgtaaatgggatcttggaatgtgtattgtatttatgtatttaagtttatttatgaaaatttttaattattcactttttcagtaaatattttaattaacaaaagagtgcacaatatttaaaaatacgataacgtgtctaatttagtagagcgttacaaataatcggttgaaaattacataaatattattatagaaaagaatagtattagtgtaacaacacacaatcttt

SEQ ID NO: 213996 - DNA, 580 bp, Cannabis indica
aatatttttatcaaatctttcaataattttttattgatttttttcggaagtagcagaatattataatttttaaaattaaatttttaataaaagggggtagaattttgtattggtcaatgttcaggggaaaaatgctaattttaaacggtaaatgaatcaaaacctaacagaaggggcataattatgtaactaatatattttaaggggaattttttacaagctgtatattttaaggggcaagatcaggtagtgtcaaatgttcagggagcaaaaatactaattattcccctataaattaacccccaaaacttatttattgctcacaaaatccccaaaaccccctttacaaaaaaaaaaaaaaaaaaaaacctaccaaataacttgtaatctattaccaatttatcattttcatctattttaggctattaaatgttatgccggattgttatgtgtatacaatgtattgtccacatgatacataacacaatttaattagtctacatagataaatatttaaaagtttaaaataaaaatagaccattttaaattaaaaaacgcatatgcttgtattttatttcaa

SEQ ID NO: 213997 - DNA, 690 bp, Cannabis indica
atcaagagaagagaaagaaactatatggagaattttcatggatcacccacgctctctccaagagccttctttttgtgtttttaggattctattttgtctatctcaactaaaattcgtgacccccttcattaaaatagagtttttcaacccaaaattgagaaaagataaagttgcagtcccgtatggagctgtggttgcgaccacaaatagtctagtcgcgactggtcgcgacaactgtggaaaagtgaaaatagaaaaccattctgcccacttttggtcgcgaccacggaattcaattttttgcttcgacctctcttagtaaaatatgcataactttcacatacaaactccaaatgagctgattcaagatgcattcgaaagacgaaaaagagatctaaaatttctatgctttgacattttccaaattttgatcagaatatagtctaatttaggcttgaagtttcacctttattttctcacaaaattttctctattttatagatcgttgtttttccgaaatttaatcaatttatatattccaagtctgaaacctaaaatcaaagaaaaaaagtgtaattatattccaaaaataataacaaagaagaaaaacaactataaaaaaaataacctaaaacttaaggctaaaaataagcctaatacaaaacaagattgtggtaagtttcgtttgta

SEQ ID NO: 213998 - DNA, 1511 bp, Cannabis indica
ctaaaataactaaagacgatccaagaagaagaagaagaaaaaccgtcccttacgatttccatattttttttactaacattactatattttattgtatttttaggcttctaaaaaattaaaactaacttacttttgtcatatttttgtaaattcctctacaaactttttattttgggtggaaatggcctcacaaaggagggcctcttgaaacattttacaacaatatcgacaggcccaaacttggcccagagtagaatgtagatgaagcccaatgtagatcatccaatttatcttttcgaaaaattgcaattgactaagatttttgaggaaattatatgagagtatgactcttttctaattcttttcataaatatggacttttattgattttgcatatggctttttctataataagctaattatagggatttttacaaaaatattaaattttggtcaaaaatttataattttactgtcacacggaattttattacaaaaatactgtctttttataaaacaatcataaaacaacaaaacagaacaattgaaacaacagtagaacaactgaaaaaataattgtggaacaaccgtaaaaacttaatacagtacacagtaattttgaaaaacattccaccctacagtaaaaaagttaaaaaattgaaaaatttcagtagtggtataaaaatcttacttatatggttgtttaaattataatgttatattttaattattacttcgttttttgtgcatttttgtcatttcaactaattaattttaacatataattgtttaagtagagtttcatttctactctacaaaatgataaatacatcttaatatttttaaaacatatatagataagtttaataatttttaaaaaatactttttatattttttaagaattttttctcacattattttgtatttatttcaatacttatgtcagttttatttttataaattttttaaagggaaatttacatagtatattaatttttgctttttttttacaaaaatactgccagcggtatttttactttttactgtgtttttttataagttttatactgcaacatactgtgttaagttttcactggtattctactgatgttttttagttgttctactgttgttttgagttgttctactttgtgttttacaggtattttataaaaatcagtatttttgaaaacttttccgtgtgacagtattttaataaaagttaacccaaattcatgtatttttgtaagtttccctttttaaatcatttataacttagcaaccggggcggcagcaaggccaaagcccaccacaaaccaataagagcatgtttaatggggtagtttgagtgagtctttgagagaaagtttgtgagagtgtctatgtagtctcagctattttttctttattttttggtttaaaaatattaaatgggtccaccataatgtgcgcgtaacttcatggtaactcagcagaaacttcttgttagttacatgagacacacatatac

SEQ ID NO: 213999 - DNA, 752 bp, Cannabis indica
aaaatcagaggtacatatatccaaatcctctactcattctcattccaaaactctataaaatcaatcattcgcctcctacagtactcctctactcattcgcctcctacagtactcctctactcattcgcctcctacagtactcctctactcgttaagaaaaaaccatgtagagtacgtaagcagcgtgccatgcaatttaaagaaaaaaccatgcagagtgtacgtaattaagcagcaataccacttactatacaaaagtctaaaattactaaaatgtccacccaatatccctgaagtccaatattatttaaaaccacaaaattattatagaatatgaagacaaactatacagtacatatatccaaaagaaaaatcagaggtacatacacaaaagggacagtgcatttgactggcatgagtcaacatagtaatgaatctgtagcccaatttcccaaaaccaatcaaaacaaaaacactaaaatggaaagtgctctcaggaggactttcataaatgaaaatatattaatgtatatactgtttatatatatattaatatatatattaatgtatatactgtttattaatatatatactgtttatatatatattaataatatatatactgtttatatatattaatatatatattaatgtatatactgtttattaatatatatactgtttatatatatattaataatatatatactgtttatatatattaatatatatattaatgtatatactgttta

SEQ ID NO: 214000 - DNA, 631 bp, Cannabis indica
ggcttaaaattatgttgaacagttgtcaaacttttctcaaaggatgcttttatctctgtgtgttgtagctctagtaaattatgtattgtagaccatgaagtctcaaaattttcttgtgatgagcgtaagtatctctttagctatgcaactgcactttctaccttgtataaataaaacaagataaaaataaattaaatacattttatataaatatttatatacaaatgcactcaaaatataataataaaggaagttataatgtatacctatttgtagtagtagtgccaaaatgtattactaaatttgtccatatagaaataaatttttctttatatttattcaaccacacatctttgacataatcaattacttgtgaatatctaccatcattttcttcaagtgctttgagtctcttattatactcactttccgatgatgataaagtgagtatgttccaatcagaaagaaaattatcccacttttttttttactcaaaattttttcgacatttaatcaacacattattagatatatgatatcggcacaaaagatattttgcagtaggaaagaccttttcaatagcattgattaacgtaattctctatctctgacaattacattaggaagaaag

SEQ ID NO: 214001 - DNA, 813 bp, Cannabis indica
tttgacttcaaactaagaaaaactaagttgcttaatttttctccaatccatgatggtattggaccttccaatctattgttccccaaatctagaactagaagtgaagtgcaatatttcaaggaggaaggaaaatttcctgagaagttattgtgccttaattgtaaagttttaatacttttcatattaatagagttagggatatttccaaacaacttattgtatcctaaattaagtacaactaattgtgtgaaattctcccaacaatcaggaatgttttcaaataaattattattcgaaaggtcaagtaattgtgttgacctgtcccgctcttttgcttcacatagggaagaactgaattcgttgaacttgttattggagagatacaagcgggttgcattaacaagaagagaaggtgggatagaaccttgaaattggttggaacttaagtcaactattacatcaacttcttgtgaaagtggaaagttggacaaggtgttgttaagaaggttgtgagacatatttaaataattcaagttggaagttatatttggaaaccaattaggaacaggaccagaaatacttgcattagaaatgtctagctgtatgagatatgtttgggtttggagccaattaggaaatttaggacctaacttgcaagaagccaaacttatggtttccaattgaaatgaggggatataatatttcgaatcgaatttcaatgatatgtctgagttaaaggaaaaatttaagtactttaagctcgaacattgcagattaagcacacgagacatacacccagtgagagaatttgaa

SEQ ID NO: 214002 - DNA, 938 bp, Cannabis indica
agaaactacaacaaacttacaactgcaacatacacaaatcaagctaaaattttcaaaaactgaaaaaataaaaataaaaaagaggaagtgaataacaattgtagtaaaaagaaggattatataacactttttttcttaatttgattgtaattaaaaaaaaggtaagaaattgccacagatgtgacaaccaccagtttcccatcacactatatttactttttatttaaaaaaaaaaaagcaccctaaggtgacaaatgcaaaatgggtaaaacacaacttttatactacttttagtagacaaaatatacaaattaacattaaaaatgaaataatcagcatataacagtaaaaaaaacatttataatctcaataaccaaaacaaacacaccttaaagttatggaccaagtttatttattgaataatgagtattgattacaagcaattattaatctgaaaattgataagtttattttactctctttagtttatatatatgggtgcatttttaatgggtattacctatttatggataatattatgaaattttgagtttttatgcttagtttttctatctaattaaaaaattctcttatttttacattatatgagtttagggttattccatcggctaaaaaaagaattaagaaaaaagtttttcggcaaaaaaaagttaaatttgaacttaagtattttatatgtaagtatattttttatatagtgtaaaaaatgatattttttatattttaattaagtaattaaattaacataaaaattaaaaatttacttttattattgcgtcattagatcaaaatctaatagtttaatatttttaaaattaatattatagaaagctaattcaggctttgaaaaaggtgttgaatggttgtaaaatgtattgagtaatgaaaaacacgaactgattctacaaaaaaaaaat

SEQ ID NO: 214003 - DNA, 681 bp, Cannabis indica
cgattagaaactcttaaatattattataaattttcaattttggattaatgtcttaaagatgttttactatactccaacaaaacttggttttttaagaataaaaaatatttaatgattcctttaaaattttattttttattaaaaagttataaaaaattgatgcttaacgatagtttacgataaaattttaactaaaaaaactatatataataagtcataccctttcacacaattgtccatttgagatttttgtttttgtttttaaattttgatatatcttaaagtaattgtgtgatatttaataagactattttacacttgcaaacagtggcggaactacatacatctatggagtggccatggccccccctaactttttagaaaaagaaaaaaataaacataataatgtaataaattaaattaggataattagatttgacttattagaaaaatgtgatttttctcttattattaagcctaaataaaaaattgtagaagttgaaaattgaaaaactaagcccaaacccaataacccatttacattagttatctattttatcgtaaaaaagtaataaaaaaatgattaatataatttatttttttaagacttactttggtatgatatatatttatatgtgtcttaatatacgtatttttatggttatccaataccatatatat

SEQ ID NO: 214004 - DNA, 750 bp, Cannabis indica
gcaaattcaacatgtggtaaacattcgtcccaagtcttaatatttttacttatgatagccctcaataaagtggacaaagttctattaactacttctgtttgaccatcagtttgaggatgacaagtagtggaaaactaaacttttgtccttagttttctccacaatgttttccaatagtaacttatgaacttagcatccctatcggatacaatacttctaagcataccatgtaatctcacaatctccatgaaaaacaaatctacaatattagaagcatcatcagttttatgacatgggatttaaagaccgcttagctttaatttaaaaattagcagataattaggaatttattatgaaaattaattattaatattgaattaattacttatgatgatttatttgaattcagaatgctttttttatgtcacatatagaaatttcataatttttcttattttgtgcctaacaacattggaacgcggtgttgtagggattagtcaggattttagaatttcccaaaataccccttagtgccattttatgacttttagtgtgggaggggaaaaatggtcattttgccccattagtctttttgtccttagtgaattaatttattagtaatgatctgatttttattaattatcttagctgaaatcgattttagaaaagctaagtgttatttcatttatttcaaattaaagaaaaaactaaacaagaagctctctcgctctccaaactctctctctctct

SEQ ID NO: 214005 - DNA, 680 bp, Cannabis indica
gggaaagatggcctcccgagtcttttctttcagaaacattgggacattgtagggcccgacgttactgaagcgtgtcttgaaatattaaatttgaacaaggattgttgtagcctcaatgagactcttattcgtcttattcctaaagtaaagcagcccactaaaatgtctgaatttcgttccatctgcttgtgtaatgtggtgtataaagtggtggcgaaatgtcttgcaaactgaatgaaggggagcctcaataatgctatctcttctaatcaaagcgcctttattggcggtcgtctcattcaagacaatgctattcttgggtttgaaagccttcattgtatgaggaaaggtaaattcgggaatggaaaaaaaatggctctcaagcttgatatgtctaaagcttacgatagagtggaatgagactttttggaagccatgatgatgtgtctcgggtatgaggagacttggatctctaaggtcatgaattgtgtccgctctgtttctttttctattttaattaatggctcaattaaaggcaactttaccccggaaagggggttacgacaaggtgaccccctttctccttttctatttttattatgctctgaaggtttgtcttgtttgttgcatgaggcggagagggctggcaagatccaagggctgcggttcggcaatttgga

SEQ ID NO: 214006 - DNA, 554 bp, Cannabis indica
gtcggcgtgggaatgaatgaatgagttatgagtctctgactgaatgacgcggtttcaaggcaaattattgaaaatcaatcaaagccaagtcatacattgaaatcaatatagtaataactattgttctcagaactataatataatgctcagagtctataataataatttaatacaaagtctaaactcacaagcaatctccctaaaaaaaaaaaaaaaaaaaaactacacaagcaatctttctcatttgtgtatactaagagcaactctatccaactccaaattcgaagcagaaaaataaagctagctacaaattttcccccaaattataatatatactaaattatatttcctaattgtacatgcgtagaacttaacatttctccaaattattgagagagttgaaaattgggtctaatttggattaatgtggcaagtcattatctctattgttgggtaactattagctctattttttttttttacactttaatatagttttttttttttgcgcaaaaattcaaatatcaactaacaaagcaatttaaatcgttatt

SEQ ID NO: 214007 - DNA, 734 bp, Cannabis indica
aatagtccaacgtaaacttgcttgtcattaatcagcattccattcagctctttgattgctttctgggcagattcctccttgtcatattgtacaaagccataaccttttgactgaccattgttatcaacagcaaccttacaggaaagtacagttccaaaagcagcaaaagtgtcaagcaaattcttgttatcgagtgatgtgtccaagttcttaataaacacattggcatatccactcttccttatgctaggatctcgatgagaatacataattctcattggtttcccattaacaggagtgaaattcaaatgctccaaggcattagcagctgcaattttacataaagatcacagttaggtccatacactcataaaaataactgaccagtaaacagtgatcactacaataaaaagtaaacataaaaacacatatgcccttttcaataaactcaaaagttagctacattctaaatcttgatccaaacatttagggttgttaaatgaaaaggagaaacacatgttacaaaaacattactttatcatttttattttaaaataaacaatgcaatcataagatcttccactgctgcagcatataaaatccaaaaaaattattttcttttctcccttccattattcaaaaatataattattttattctaatgataacaaaaataataataaaaaaaaatcagataaaaatagcatagtgaaagaaaagtaaaaaatcaaaag

SEQ ID NO: 214008 - DNA, 522 bp, Cannabis indica
ctactttttacaaaaaaaaaaaaataagaggattgcaatagagtttatttgatcggatagggaatcagttagtggacatgaatcattagaaaggcaacctgagatttatagtgtgatatctagtcttcatttaagtcatcttagtgagctgtgtactgcacaaggtacataaactcttgccataattctagattttaaatttctttatttataataaaaagaagggtaaatagcggtataagcacccaaagttttgagtttgtaagtggcataaatccaatgattttttttagttggcataagtacccaatgtttgtaaaactgtaatttttctctattttcgtcagtacaggttccattttaaatttattaaaaaaagatttggaagtaactgatactacatattttcgtccagaccaaataatctaaaatttgggtcttatatgtgtcatgtttaagacaataacagagtctgtactggtgaaactggaagagaattacagttttataaacattggatac

SEQ ID NO: 214009 - DNA, 1149 bp, Cannabis indica
ataattatgaatagaaattattagcttacaaattgattcctttccttccacctaaactaaacaattagagaaatgttaaaaagtattatttgggtctaacattctgagatattatatcactattagtgtaattaagtatcaaatgtcatgtaatttaatgtaataacataaaaaatataggtaaccaattgtagtgcgacaactctaaaagatgttagcaccactaatgtctaatagcagttcgaacaattaacaaaaaaaaaattaaatctccgaaatttaaggatttattggtaatgatttcatctaatgaagatttgcgacataaatatctaagtttaacttctatccatttgtagtgcgacaactctaaaaggtgttggcaccactaatgtccaataacagctcaaacaattaacaaaaacaattaaatctctgaaattcaaggatttattggtaatgatttcatctaatgaagatttgcagcataaataaatacttaaatttaattttagcagtaataatacctaagttatatttctgaaactctgtaggtacctaaccgttatatattaggccattaaatccatgtattattttcttatagtatatttggattattattttttaaataataaaaatttaatgatttgaatcaattaggaattgacacgtggcaatttactacctacataattaaacttggtatttattcattagtaactagaaacttaaagttaagtacaaattactactaatcttttattctaataaacaaaatcataaaaaaaaaaaaaagactcctaaaaatcaaaaacataaactccgtgacaatgtgacatagttacagaaccaacacgcgcttgaattgcttttattggtctcatcaacgaattcccaccgcatttatccccacacactctctctttactcattttgtttcttctgtcttcttttatctttccttcttcaaactcttctctctctctctctctctctaaaatggcgaaactagttttgttaatggcgcttagcttccttccggcattggctttggcaacccgttgggtgaaggatccccttgtagttgaaggcaaagtttactgtgacacatgcctagctggttacgaaaccaccgccactacttac

SEQ ID NO: 214010 - DNA, 586 bp, Cannabis indica
tttttttaaaaaaaaactataatctcaattaatgaaacagtaaggtacagagattataacttaaaaggtggtaatggactattccacaccaactctttatccactcctaaagcttttctaacaattttgtgagctaaaatatttacctcactaggaatgtaagaaatagtaacatttgggaacaaggacaaagaattcttgatattcactaaaacatcagacaatattgacagatcaaaagtggaattgttaagcctattcacaacaaacttgaatctaattcaatatgagaaatggggaggtgaacatcgatgcaccaattaacaacatgtagaagagcaagagactctgccattgctgaagttggtatcccaaaaattctattacaataacctgcaatcatttcccctttagcatctcttacaactccaccaaagcttgctacagccctgctagaatctattgcagcatccatgttcaactttaatcctcctcgcactggtggcaacctccaagccacatctcttattggatctagtattgtatcgtgctatgaatggaaccaaagagaaagagaagaaaggaa

SEQ ID NO: 214011 - DNA, 896 bp, Cannabis indica
ttttttaatatgatttttttttattttttttttattttaataatgtaattaggtggaccaataaaattgtgtcatgtatatacactatgtctacgtagacactctaacatgacatctaacaactaaaattaaatggaaaataattaaatgctaatagaatttgagttgggggttttactgacaaaaagtgagttttaagggttaacggctagcaaagcgatacttttgaaagttttgccgtaatttattctatgatctttgacatcattttatttgtatactgctctaatatacaaatgctaaacttttttttttttatttgtatgtaaatataatttaatatttaaaatagttttataatcaatttattatcattctcttattatgtaaaataataataaaaaatttaaatatttatggtaatgtaaatattgaatcatagcaaaatttattataatttttggcatagagcaaatcttttacaaggcaagagctatatttgtttattggagatgcttttgcatctttaagtatagaaactcaaatttgactacttattgcactcatatatattctattagatatgtatatcttaatgaagtatccaaagccacattcatttttttgaaaaattaatcataaataaataattacataatgcatgggtagcttgaaaagttcaaacatatttttgtgtccgtttagcactgcaatagacacatgtgttggagatgaatgtctaagattgtagactatggaatagcacatgtttgtttgaatagaaatcggtgatgcatgctataatactaattatatataacatatatatttgtgtgttaaaataattaagtctgtgtgctttgattttttatttttcttttctttttggtagttat

SEQ ID NO: 214012 - DNA, 513 bp, Cannabis indica
taatttagtacatgacattatttgatttactgcatgtcgaaaattactaattagctttagatttaatattgaatcatcaataccactcaaatagtaaaacttcttttattttcttttcttaacagatttatatcataattcaaattcatgtaaaaattacataaaatatggcttttaaaaaattttatcattttaatatgatacttttaaatttgaagaattttatgacatttttttaatatctaatattttaatttgagtaggtaggatgatgtgaatttcttcttttgttgtgttgaatcttccttactttgtgttttgaactgaatttctcttttttaagtcatcaattgttgctgtgggagatggacgtcataattgccagattttgatggagatgatcgagatcaattatttgtgattggtgttgtgagatcgatcggtggagaagagattcatcagtgctgtgaggttgatggaagtgagagagagataaatcgcataaatggcaca

SEQ ID NO: 214013 - DNA, 605 bp, Cannabis indica
atcttataatttaatttaataaacaaaaatcaaaaataacaaatttttgaaaaactaatatggttagcaaatttttgaaatttaaactagattatttcaaaaaattattaatattttaatatcaaaataagaatgttcaaattttaataataaaataagtaatatctaatcttataattaaaataaataaaataatcaaacttttaaaattaaccgtaaggctatttttatggaaaaattaaattttcaaattctaatgctactaatatctaaaactaatttcaattaatcaaaaattaattttattctgataattagatttttaattgaaaatttagattctacacaaattctaccgaaatttgaattttgtttcaatgaaaaatgatttttgaatcaaaaaatatgacaaaaacaagtttgaggcaaagggggtatgcattgtatacccctacgctcacggaagtgggcttcgaccgagacaagcagcctcaatggccgaggaaattcggcgtgacacggttttagacagctcgtgttcgactttcctcggtcaggcttgtatgaaactgcgtgaatgttgagtgaatcccctcgtgcgcgcg

SEQ ID NO: 214014 - DNA, 670 bp, Cannabis indica
aaaataattcccaacaatatcatcatctcctgttccattgagctcaactagctatggaaatgtgttcaccacatcaagggcttcgagaatttgttgctcggtacgaagctctcgtgttttctaggtttatttatttattattattattcttatttatttttgaatctatagaaatttaaggttttaaggggaaagtgggtagttgttatccatgaggatatcacgtgtacttctgagattcatctctttttaggaaggccccgttctcaggcttgaaagagtgggtcaaccccactaagggagtgagtctgcgattccatgttgagtaactataaactcatcaattataacatcagaccgcccaggtttgggaatggttattaggcagtggaaagaaggcccaacatggcttatacagatgtcgtcatagggtattccccaacggaactatctaagagatattcgaatgcaaaggcttatgtggagatacctccaatatgatcccactaaattaggggattcaccttgcgcaatatcctccaacatttattgtatgaatctggcaacgcacaacatttgtcaattgtaaatgaaccatgtgattatggatctgtgggttttatgccctaataaaactctatttcaatgtaatctctatcatttaaatatc

SEQ ID NO: 214015 - DNA, 799 bp, Cannabis indica
caattatggagtttcgctcttgtaacaatagcaaccttcaaatattgttataggtatttattttatttgagaaaaatacattgtatgtttaaatctttgaaagtttgcaaataatttacacgtgcggagtacgtatactctcactagtattttatagaaagaagataagaaagaattggcatcctccatgccgaaccaattttttggggtatattgagaaatacctcttttatttatcaattaaccaaaactacctctaattttatatttaattaaaacatacctctttttatatgtattgtacccaaaataccctgatataagggagtcacatggagagtatattgatgtgacaggggtaaaatcggtaaagtgtttagaaaaagaggtaaaaatgataggttttaaaaaagagggtaaaaatgaaagagaacaatagaaaaagggtatagagtctaatttcctccaatttttttgtgtacgtatatgttttttttttttcttttcctaatcaattaacttaagtaaaaagtaatttgtgaggtaaagtaaggtactaaggtggagtgagggtagtaatggacctaagaaattttttatctatgtgttatatctaaaatagagtgagtattattgagttttttttcacaaaattttacataaatatcttttttttcaatataaaaaaatataccatataaaaattttggactcaaagtttgggtgggccttaagcacgaacctagtctgtcttagttcaaaatcaggcgtgattggagttttcctaatactatcataa

SEQ ID NO: 214016 - DNA, 686 bp, Cannabis indica
aatattaattgtaactatattattatatgtaaataacagcagagtaataactaaatatcacattttctccaatttaaaactgacagcagtatatttatatatttatattcacgggttattacgcaaaccaataacttatccacgccagtattgctatattatgccatgccgtagttaaggatttttaatattatttattaaatgaagatcaagatgtgtatatttaattatatgagtaataatatattatttttatggtggttgacactttgaagtacttcttagtatttttctatcagtagttatttttaatatatatatatatatataataaataaaattatttattatatctgattaaataaacaattttatgattactccattaatatcaaattaaacttacagaaattatgagtttatgtttactttgtttaattatattgtccatcgatataataaatatgagtaattatagtcctttgtattggtgatcataatttaatttttttttttcattttactcttctaattatctatttatattttagtattattaattcactaataacactaaaacaaagttgagttttagggaaacttctaataataaaattgcgcctaatagccttgtcgctcctaataattcgcacctaaaaatgttattaggggtgacaatttttgtc

SEQ ID NO: 214017 - DNA, 598 bp, Cannabis indica
aaaaaaaaaaaaaaaaactctccaagaaatccaaaagaaaaaacgacagaatatgaaaagagagagagatgattttgtgtgtaattatgcttgagagagaaaataccgttaatatatattttttttcggaagatagagaaagatgaagaattgtacggagatatttgacgtggaactgacgtgggcgagttaagtacaataggccgtataaaagtatgagattagtgcctaagaaatccacgtcagccacatgagaaagtcaactgttcctcttatttcagtttgaaactcaggcagcccgcgaatctcgggggtggctgctctctctcttatatatttgcttgtcttgtcttatattttacttaaataggaccaaatccaactcccatttcaaattttattttataacaggtcggtccgtgataagttgatcttataatatacagtccaacaagtatatattattaggatagttgttgtgtatatatattatttcttaattaaaaaaaaaaaaaaaactgagtccaacaatcatttttttattaatcattgatttcgatctttacagggtaggaaaattataaatgaatttgtttcc

SEQ ID NO: 214018 - DNA, 665 bp, Cannabis indica
gatccattttcgtttgacgctccatcaacgaataccttccatgctggggtccgcagcactggcacgcttgaactagcttcttcctcattacactccgttatgaagtctgctaaggcctgtccttttatggaaatgcgtggtacgtagtgtatgtcgaactggctcaattccatggcccatttgaggagtcttcctgacgcttccggtttctgtaagacttgctgaagtagatggtttgtaagtaccttaatgggatgagcctggaagtagggtctcaacttccttgaagccatcaggaggcaagaaactaacatctcaatcaaaggataccgtatctcagcccctatcatgcgcttgctaacgtagtacaccggatgttggactttgttctcttcccgaactagggctgcgctgatagcgtttttgaagacagctaagtatagtaacaagtcttctccgtgaactgtctttgatagaatcggtggtttagccatgtgttcttttagtttctgaatgtctcctcgcattcttcagtctattcaaattcttgacacttctttaaaatgttgaaaaaaaggatacacttgtcggttgatcgggaaatgaatcgacttaaggcagcaacctctccagacaagcttcgcacatctttgtgcttcttgggg

SEQ ID NO: 214019 - DNA, 503 bp, Cannabis indica
atgtaataattctaagaaaatattacaataagagatttttgacagaaagatcaactatatcagtcctctaagttaatttgtttaagcggcagagcatcttagattttgttttgattgaaacacaaacacatgacttttcactggcttggactatttattgatttcttctcataaataaactcattagagtgactgcatattattatttgttgtgagtgaagaattaagttcatgaaagtacaagacagaaagtgacttttattttttgatttattctcataaataaactcattacatccttaaaacaatattcattagagttgaatagacatttctcttgttccattttttatatagattcctacccttccctttggaactcagattttagggaggggaaattagaggagttttagaggtttttattttcttttgttttgattcaaattaaaaattagagactgttagtaaccaaaaataaaaataaaaattaaatagagatt

SEQ ID NO: 214020 - DNA, 1112 bp, Cannabis indica
tattttaaatttaataagaatttgaatgaaagaattattattaatttatttataaattttttttattgaaaacttattcattaaaattagtaaaaatgtataattttaaattattatacataaattttcaaaatttaaaatattattcattaaacaatagttacttaaattgattctaagagaaacaatatgacaataaaattatatattatttttaaattaattaaaaatttatataaatattttaaaaaaaattaatatttatattaaattagtgtttaacataaacaattttatattattcaagtatttttattttaatattttaattatttattaaataaaaaatatgataaactattttattgtatatttatataatatatacttgattatataggatatattattttattttattttattttataattttatttttttatttttaattttttcctaagaattattcatttttatttatttattattatatatttttatttcaatttaagttatattttctaaaaggaaataaataaagtagtccagtctatgcataattccagttagtttaatcattttcagtgcaatccagtctaatcctacgtaccaaatagacccttttaataaataaaataagatgggattataataaataatatttaattgaagtcaatttagtaatgatgtgtagtaataactttggggtgtaaatataactacaccttatagaaatagtttagggattccaccaaaaaattcggaggcataatttaaaaatgtaataatttagaaggataaattttaggaaaatgtaattttataatgcaaattagctattaaaatagcttccaaactagtcgggacaacacccttattaggattagcaatgagccgtctgattcttttaacaaatttaaatgaaataggaactgaataaatagattgtacaagatgattataatctataaaattaaaccaaaaggagagagaatttactcattgcttttaagggcctatccaccaattgacagttagtttccaccaccactataacagtagcagctgccttttccatttaattttaactcaactaagaacctctttca

SEQ ID NO: 214021 - DNA, 679 bp, Cannabis indica
tttagttgtaactctatgtacacttcactaactggtatgctaatctaatggctactaattttccttaacatacatatgttggtatctcggtgtaactctatgtacacttcactgagactctgatatataagttattccaatcgcaactgacatgcacgctaaatatgtattcacatatataattattatcctaatcttacatcaattctaaatttaggtgtaccagtcaacctgagtaaaaaatggtgcttgacaatttaaagacccctaagttacaacatacataaattggtaagtgatacgttaatcccttttcggggacttaaattaaaactagaaatttctctatcgattagtatagaaataccctaaatattgagagaacaaagaaaaataacacttcggtaaaaacacccaaaaaatggcaagccatttcttaaaaatgacaaactttttttctggtccctacctggtaaaaacagtagactgtttctaaaaaaacagttcgccgttttctactgcagatttttataaaatctcatttctcacacaaacctaacacaaagctccagaacagcttaaaacatcttaatggacataatctaatgaaaattaacatcaacaagtctccaaatcaaaatttatcattaaaggttcaagcttgagcttgaaaactcaa

SEQ ID NO: 214022 - DNA, 623 bp, Cannabis indica
aaagctcagaaaaagcctcctgatatataagtaatggatgacgccgaagaaaataatcctcgtgaaggaatcaatcatcgccttggaaaagagtcgttgagcccttagggatctatgagtcatcacatgaatagactggaagccccgggaaaacccaatattgcggtccctagcttgacgaaccttggctgaacaatgacaggtcacttcctaaccagattgatgaggatggcgcctatgatccaaccaagtacataccgatcgttaagttgaaaatcgccatcttaggcgtcgattggaggaagcaaaccggcataatgcaaaattaaagcgtgaaatagccatagtaagggcagtgtaggggaatagttcccgaaatcaacttgaccttggaagaagagattcacgaggcaaacctcacaacttgcaaaccaaggggcaggagacaacctagagatatactcagaactcccaggagatgcaacttgagggaactgaggaaaatctggggatgcagcctgggatatgtggaacatcagacgaaaatcgccaaccctctcttcaagctcataagaaaggaactcacgcaaacccctagagggggagagagaaaggctcaggtt

SEQ ID NO: 214023 - DNA, 857 bp, Cannabis indica
tttatatatgtggtgtgtatgtaacttatttttttttggatttcagttaatgaactttgttgtttttaattttttttgtattacaaataatgaaatatataaatatatatatttaaaaaaacacataaataattttaaaaataaaaaaatatatattagaaagtgtcataaaaagtatattatgttcataagaatgtgttagtaggtgcaatttatgatatttggctaaactaaaatttgtgtataaagaaaaaaaaaaattgtgagttgtatagattgtgttaggttattttttgttaatttagttgtcaaaatattatttaatttttattgttcaattaaagtaattttttgtgttaattcgtggctttgattgctctttttctttaaagaaaattttagtattttttgtttaggaaacttatcttacaagatgaggaattctgtttatggaaagttgcctattttttaaaaatttgactttttttttttctaattattaaaatcgattttgccttgtttatagaagattagataattttttatgacagaaaataaaaatccaaaacgtgatcttagaattatttaaaaagtttcctatttcggccacatttgcctatgcagattccaatcttgtcgctacaaatcagagattattttagaatttttttttacagttgtgaaaacgtgtatgtggttgtctttagggtttctatgatctataaataagacctagagagcacccaaacgttctcacctctttgaccttcatttttcatatttttatctttatgaggagagaattttttttgtgaaaacctacagtgttcaactagattttagtctttgtttattgt

SEQ ID NO: 214024 - DNA, 888 bp, Cannabis indica
taactcatccctattaaatataaatttgatagattatgttctaactcatgggctgctcagtaggggtgttcatcaaactacctgtaccacaaaaaaaaatacagtttgaaattctttgtagtcggtcgcggtttgaattttcttaaattgcgcagtgcattgcagtttgcgattttgaattattaatgtgcagtttaaaccgcaccgcacatcataaaaataccaatttttatatttgtttaggtctaatatgtgaatgtccaacccaaagccaactaattattgtattattgaaacttaaattttttgttcatatttattttcaagcctaatggtatttttgaaaagttttgctcaagttttgtttgtatttgctatagtttaattattagtgatagtccaaactgcaaaaactgcaccgcactgcaccgcgaacacccctactactcagtcttatgcgagaccaaaataataactatcaaactggtattgacgagacatatatttgccaaccgcctcacgttacacatagcgagaagatcacctcgcattgctaatgccaataaaggaatacaacgaggtgaattattttccaacacttagcgattttttcctattgagatggacaggaaggagaactcatatctgatgagacacgaccttccaagttagcaataactgtctacaggataagaataaagagtagttgggtagttattagatattatcccatgtgtaattaaatgaaacgtcaggattgtccacgtttcatgaacaaatatgaatgaaccaatcccaaaaagaataactgccaacctatattcttataaataggagcagaatccataggaaaaggaacggtaaatttaagagaaaaaatattattat

SEQ ID NO: 214025 - DNA, 1107 bp, Cannabis indica
agtgattgagcaagtttgagttcaagaactcaaacttggctcaaccatggcattattcaattttttgtgttctagctgctgctattgcttgggttatgttattgtgatgtaataggtgatctggagcttagtaagtttagcattattttgagctcgaattaagactttgtgtttctctgtagccgaaaacgacagaatatttctagggaaatggtctaccgtttttattggcagactacccaaaaaaatagtatgtcgtttttacaaaattgccagccctttttcaggtagttttgccagtctttttttcgtgtttccttgtattgtcatgctaattattaatagaaaaacttccagttttgagtttaggtcatcaaaaaagtttcagcaagtttttttttacctattttacgtgattgtgacataggacctccatttagggcatacatttctattcaggttgatcgacatacttgaatcatgaaacgaggtaagattagtataaaatgtgtatatatatgtgtatgtgtattatatgcatcatgtattatgttatttgtatactaccaacactagtacggttgtggtacggagtgcattgctatagtatatgatgttaaaagggtatgacactgtgttaccaacactagtatgagacaagtacagagtgcatgtggtgcaacactcagtggtactcgaggtgttattccgccctaccaacagtagtacaagatgagtactcagtgcatgtggtataagggttgtacttttgttaagaagatgcatttaaagccttataaataggtgtatgggtgcctagatgcaagtcgatatgatgttatatgttttgtgcttctcttattgagtttgtcgactcacagatattatcttcatgtgtaggtagggcaaggtgaaagatgagcactagtgagtccagagcttgagggtggttgtacatatcatgatagttaaatatggagggttcggactcaagatgacttggtccttcattttgtagtcgcggagcgacactttcgtaaacatattttggatattgttttaaactctttaagacaagatcctaacttttatgtatggatatatatt

SEQ ID NO: 214026 - DNA, 663 bp, Cannabis indica
aacaaatttaaaattttggaggaaaagaagactcaaacttgtttctataaaatttagtttttacaaaattgcattttaacttaattttttttatatctaaatggatttttataaagaatatataatttttaaattgtcttatttagttttaaaattttgatctcttaattattcaaaatgatttttttaagaactaattttttttttaagatttaccaaaaaaatgttaaatatttctcatttttattttcaggagatactatttgataattgttaaagttatgggtaaagttgctaaagttacgtcaacatttaaacaaaataatagaatgcaacctaacagaaggactaaatttttataaatgtaatttttttaaaaaaaaattgtaaatgtaaaagttcagggtaaatttttaacattgtgtatagttagagggcagaatcaggtagtatcgaaagttcagggggcaatattactaattattctttttttttaagtatattttgtgaaaatttaaaggaaaaggttattattctattatatatacacaattgaacttatatctaagaatattttatttaagaataacttctaatgtattataaaaaaataaataaacaaataagcccaaatttaagatacttataaataagaataacctc

SEQ ID NO: 214027 - DNA, 619 bp, Cannabis indica
cttagtttcttaatatttgactcttgtatttgtataaataggggttcatcccattagaataaacaactgagaaattctcattcactttcttctttctctcttcatcttcttcttctttctcctcatctattttatattattttataaaaatttagttattatttagatattaaaccaaagaatatgttatttggttaactaaatataataataaaaaaagaaaactaaagaagcttttgtgacaataaaatatatgtttttcacatatcaaaatcaaaatgaacatcttaaataataagttgggatggtatttttttagtcaaaataactataattggagattttttttttttactaaaaatactattaagaaagagaaatgaatattgttggtttttttttttttaaatggaaatgaatattgaatttaaagaagaaaaaaaaaaacttatttcagtttaaaaaagaaaagaagagaaagtgtaatgagtcacctattataatgggattttttcaataatatacataattaacaatttatttacaaaaataaccttatacaaatgattagtaaatattaacgttaatgtcagcattaaataacgtgtatatatatatt

SEQ ID NO: 214028 - DNA, 828 bp, Cannabis indica
aggttggacaggttgcttaccggatagccttaccaccatcattttcagtcgtacacaatgtattccatgtttccatgttgaggaagtatgtgtctgaccacccaatgcatatcctgagttatgaagccttggagttacaaccagacctgtcttatgatgaacaaccagttaaaattctggatagaaaggagaaggtccttcgaagcaaaatcatagcattgattaaagtactttggagaaatagtaaagtggaagaaaccacttgggaattggagtatgacatgagagctcattatccagagttgttcaggttagatttcgaggacgaaatccttttaacggggggataattgcaaagaccgcttatgattaacactttgggttaattaataactagggtttattatgagattaaatattatttataatatgcatattatgggaatttatttaagttaatatatatctatttattatgctatttatgtaaatttcgtaatttctatggttatgttcggaagctgtggaaaacgacgttgggcctttagagagtctcatttggtatgttttggtacgtcaatagtgggattttattgttaagcttaagaattgaccaaactagccttgttaatcctttagcttttgaattttattagggggctaaatggtattggttaagatatttgtctttatataagattgtatttaataaatctgctttttattagttgattttaaaataaaaataaataatgatatatgagtatttggaaaagaaaacttagaggagatcaagtcaccttctccatcaattctctctctctctct

SEQ ID NO: 214029 - DNA, 506 bp, Cannabis indica
tgttattttattatttaggataccttaaggttacttattttttttctaacaattttaaagcatattttaagttgtgggaagcagtacatatattttttctgatataaaaaatgatgaacaagataaaaataaccaatccctttcttttatagattatatattaacaaagaagtaaccaaaatattatatttaaataaaataagtataccatctaattttatgggttagtacaataaatattataatatttcatatatatttaaaaattttctagtatctaaataaatttactttaaataagtcatgtttaaatatttcgtttcttataagttaatttaaaaattagtagatatttaaaaatttaattttctagtaaagaaactaaaatgttacttctgattttaattattttttccgaccacggtaatgaaatatatgcttcccataggttaaaacaatccttaaaaaatagatgtggtgatataaaatttgagctcaaataatta

SEQ ID NO: 214030 - DNA, 830 bp, Cannabis indica
ttcagctagaggacttgaatatatcccatcgaaacacactcgtgccctctctacatccaccgtgatattaagtaccaccaaaacatttttaatagtacaaaaaacttccgtaggaaaggtcatgtaatctcacttaaaactatattcacaacaaattatatcttaattaattaattaatacaaacttatttcttttacaggttgcagattttggacttacaaaattgactgaatatgggagtacttcattgcagacacgtcttgtgggtacatttggatatatgccccctgagtaagcacttatgatatcttacactctcatatatttttctaactaacattattattattattattgttgtgtgttattaatagggtaagtacttaaagttttacgtttgtaaacggcataaactttgtttatttttagtgatataagtgtctaatttttgtaaaacagtaatttttctctaattttatctgtacaaagtacatactctattattatcttaaacatgtcacatattagactcagtttctagatcattaagtgtagacagaaatatataatatcaattaattctaaatatttcttttaataaatttaaaccggagtctgtactgatgaaatttgagaaaaattacagttttacaaatattgaatacttatgccgctaaaaataaatattgaattcatgtcgcttataaacttaaaactttgggtacttatgtcactatttactcttattaatattataataatgagatccaaagaggtcaagggaaggcaaaatgatctcttttataaggttattttgcacaaaattgat

SEQ ID NO: 214031 - DNA, 513 bp, Cannabis indica
aaactgttctaaaagaataaatttacatttattagtgttggttaataattagagagtctaataattatactatattttagaatataatgtgatatgtactgttaatgaaatatgaattcttaatattttgtttgacaaaataattagtaattatacaaaaaaaataatatttttataattaatatttaaaatagaaaagttttaataattacatggtataattacacgcaattcttacgagactatgagattcgtaaagtgtaattgaaatctctcaattactcttaattacacaattacagtgtaattacatacatgattagacaagcgtgctaaattgtacaacctctaactacactcaaatctatttacaccatgacaaaataacaagtggaataataaaattcaagaaacacccttggtaagcttagaaattctaactagatttttagtgatacttatttgatattaaagatgatctgataaaaataatatgtgattggtaaagaattt

SEQ ID NO: 214032 - DNA, 1387 bp, Cannabis indica
ttatggttgttttactgaaggatttcatggccgagtgccatccagcgcctaggttggcatatgacgtcaacctggacactgggtaagtgtgaaaatgtctaagggatgtactttgagatgcctaagtgatattttgacattactttgtctatttttgtgttttggcgaagctggtcaccagtttttacaaaaatgtgagactcaaaactcttcctttctgagtgagtttcccatgttggaaatgagaaatacgaagttgtgaatttgatttctcaaacttcatggatcttagttattttaaaaaactagacggaaattcgaaacaaaaccagaatcggataagcagaatccagcgcactaggccatttgtcaacctgggtgctaggtactcattccctagctccctagatctcgttttgatacttccaatgttcttaaacttgaggcgaggtctcctaccccatttttgaccatttaggattcattggtcaaatcaaatttggcatttaagcaatcgtaagcagtgcaccaggttgattgtccccagtacatgtcaacctgggcgttgggtgcccaggcactgggtgctcctggtgctcaaaaataaatttgctctgaattatattctaatacctcaaatatgtctgtggtatgtctagttgatgtctcaatgcaaagtttgatctattttcactaagacgatcccgaaaatcacaaccctacttggtaatgtcaacctaggctttgggtgaaaccctaagtgtcaagttggcttctgggttaccggttcatataattttagctcctgtggcttggattaggttgtttcatgtcttcatagtacagaatactaaaagatagtgagttggattcaagttattaaagtccaaacttccattccaaagctcctgaagttaacttgggcgcaaggctagggtcccctccaagatcgatagctatgactcaggtctactcaacttcgtgacatcatcattattgccctgtatcaaacattgatgtcaacgtcactagagtaattttctaggttaacattttcccccaagtcaaccttacacttgtgtggagttgacttgatgatgtgaattgagcccatttcacttgaaactaccatatggatattaatttaacaatcttaggcaattatttttgttcttcaagtattctcaatacaattaggactttcgattcccttgcttagtcctttggaattttcgaaaattagttaacaaagaaacaaaagaaaaaattatcttttatctttttctttaaaaatttgaaattttcttatatttgctatggaattagaattaattggatttgaatcctaatcctaggtatgatgtcattctaaaattagaggagaaaa

SEQ ID NO: 214033 - DNA, 633 bp, Cannabis indica
tggcaatcccggtaaatcttctaaaaacacgtcaaggaactcgcacaccaatcttgtgtttttaggtccagatgtcacaggttggcctgtatccactgtattgactatgaatcccagacaacctctgctcatcacgtcctttgttttcaaacgtgttattcttggtatgcgtgtctcttgaactttacccacaaacaccgccaggttagcactattaggctcaaacaccaccatcttctgcttgcaatcgattgttgccacttacttagacaaaaaatccattcagaggaatattatatcaaaatcaaacagttgcagctcgattagattggcgattaattcacaaccgtcaatccaaaaagataaagaccgaatccacctagtggatacagtaaggtcttctaaaggtaacaaggtaccaaaccccgaaacataaatatcacatgatttacggaaactttcaattactctactcgacccataggagtgagtagctcccgagtcaaacaatacagtattggaacagccatttatagataactgacctgtgaccattgacggactaacatcagcgtcaacctgagtcatagtaaaaagtcatcccggattttgagtagtactcttcttaggctc

SEQ ID NO: 214034 - DNA, 1108 bp, Cannabis indica
gtgatgcactactcatagtttttaaaataatacatttaaattttacttaatatatatagataaattgtaaaaaaaactaatatatatatatatattcatcttctctcatctccatcacattatcttgtctattttgatgtactcttctcccagtactttacctccattagatattttacatgtaaaaccatccatatttttattaaacttttgatactattatattatgattaaatttcagaaatcttagtaattcttcatatatatacatatatattattttaaaataaggtgtataaatataatattaaaagaacggtattttttcttttgccaaaaaaggtaaaataataggatttagcatggatacgtaaattgtagaagatatatgtcttgtataatataacaatagctaaacaaatcaacccatctttctttgttagtgttgtgtagcttataaatgaaatttgtgacaatatagtttctaaatctaaaaaagacaaaaaaaaaaacatagtaaataattaataaaactatctcaatatttgaggaaaaaaaatgaaactctaattttagcatgccatcgaaaaggttaaattattagtcacaaaataaaaaaataaattataaaattaaaaaaaaaaaaatctaacaaaatttacttaatctgatgaaaattcccttaccaagagtatgttcagtaaaagagcatcaagcatcagataaagtacattaaccgcatgatccaaaccttatacaataagaatttaaaataaatacataattattatatgttattacaagtcatgattgtatattaaaatctctcataataaaaattaaagatatatgtatgtgtatctttttgagaaaaaaaagtactaaaaatgattatatagacatagaaatataatggaaattggagagtagcatatgagaatgagcctagctattattttcttgaatctcaagagcttatcataaaaaaaaatttattttttactacatcaaataatttatgctaatgaataaatcatgaataattcaaagtcattgaggacaatcaaattgccaaacataacaaaaaaaatccgatgtctccaaatat

SEQ ID NO: 214035 - DNA, 600 bp, Cannabis indica
gttaggctttatacttctttgatagttgtgggcgactttatgtcgaaaaaggcttggatcttgtctagatttgcttctattcccctagtgttgactatgaagccaaggaattttcccaagcttacgccaaaagagtatttgagggggttgagtttcatgttgtagctatgaaggattttgaagcactcacctaggtcctccacatgcccccgacctttttggacttgacgagcatgtcgtcaacatacacctccatgttgcggccgatgagatctctgaacatcatgttcaccagcctttgatatgtggtcgttgcattttttagcccaaagggcatgactttgtagcagtataggcctaggtccatcatgaagctggtgtgctcctgatcaggtggatacatctttatctaattgtaacctgaatatgtgtccataaaactcaggacttcatgaccagccatggcttccactagatggtcaatttttggtagcgggaagtagtcctttggacatgctttgttcagggtggtgaagtcgatatagactctccacttcttatgagatttaggtactaacactgggttggatacccactgag

SEQ ID NO: 214036 - DNA, 516 bp, Cannabis indica
agagagagagagagttcctaagaaaaagacaggtcttcacgtcaacttcgagtaccacttcatcctcatcaagtcggtaagcccggtggtggtggtgatggcggccatggacggcttcttcttctccaccatctgtttcgaatccatcttctaatggtgcttccaagttcctctcattccttccctctcgcggcctcttctcctccaccgttctcacttcgaatccgaatgtgggtattgagaagtgttacagttgaggtgctagtaattttactcgattgattttcgagattgatgaaagctttgttttttagtttgaatgtagtttaattatcatgtatttggtgaagaaaagctgttgattgagaatttcttttcaattatttataactgatatttgtgttagtacatgtataagaagcgaatcaattttttgggtggggttattaggatacaaacgataaaatggaatcagaggtatgggaaagaaggttttggtaagagtgtctgttcatg

SEQ ID NO: 214037 - DNA, 641 bp, Cannabis indica
attatgggggaagcaataatgtgtaaaatataatactgaatattcagcaaaataaaatgactggaacttagtactgataaacaattaagccggaagagtaatctagtttaattcctgggttggaggttgttagaatttggaataagatgcatggggttccattctatctcaaaatcaattgacaatgggaggagtagctcattcatcttatacatggtatcttatttctacacattagtaatgtgggactaactcttatagagtttttttttttttttgaaaaactcttatagagttaatgaaatgaaaaaaaaacaattttcattctatttttttagtttggttgcattttaaaatattagaatgtcattccattgaaatgattttttcaccattttgttggaatgactttcataatgaaatagaaaggaagactattccaagtaatatgaggaaaaaaattcaataattttaatatcaatttttaatatatttaaattttattgctattcccattctcatttccattccaatttttcattcctcccaactaaacacaaccttaaatgtctttaagccaaataggtttagaaatgaaaataccaggaagtatttatcattaggtttggatagtaagatgg

SEQ ID NO: 214038 - DNA, 542 bp, Cannabis indica
tcactactaaacttctttatagttatcctcttgctggagaaatggcatctctttgttatggtgcggaagctgcgattcagcttgggcttaagctggtgattttccaaagcgactctgcaggggcggttgatgctgtgaagtctaataatcacaacaattctaaactaaaccataatatcaaggagctcgttgcaaaattccaggcattggctgagcagctagacttatgggaagtctattggatacctcgaaaactcaacggtgtggcccatgatttggcgcaatgggcagtccgatctaacatctttggtagaataggattgcccaattttgacagctccctggcgagtgggacggcggatggctgatttatgttttgtttcatttctggtttatgtctgttatgtagtagttactttacttaggcgtttgtttatgttttggtttcccttgtgtttgccgaactctgttctgttttgttgggtgcttttttgggcaggttttaataaaaaaaaaagcatgtacatattatatatacaatt

SEQ ID NO: 214039 - DNA, 516 bp, Cannabis indica
catccaaaaattaaaaaaaaatacgatcaaagcaaaaataatacggccttctccaatggcagggcctaatagaatgggcaccaagaaaaatccaaagcaaaaaaagagaaaacaacgcaagaggccgaaaagactcgtacccattaaatttaaggcccatgttggtgtaaatacatagttatacacatatactttttagcagttcacttaaatgattgattgagatactgacagagtgagcaaaaaaagggccaatagaattggaagactgaacgagagagagacaaaggctttataatgggttgtcttcgaattgggtacttacttgattggagagcagaggcagttaagatagatacgtggaggcgttgtggttatggagatggatttccgttgaagaattgaaataggatatggcgttacagcatcaaagaatcccgggagagagagatatagagagaccagtgatgaagctgtgcgattttgtgtgggtggtgtttgatagggtgaatcagg

SEQ ID NO: 214040 - DNA, 760 bp, Cannabis indica
gagaaagtcaagcctcgcaaagataacctgagaaagcctactacatactatatgatgtttgtaagagagaaaattctgtaaagtttttttttttttttaaaaaaaaaaagacagtagtgcatacaaatattattttttaaaacaaaaaactagtgcactaaatacacttattacatgtgtcaaattttaactagatacagttagaacattattttgaatattaaatttgattttttttttctgactagtgtaaagtaattagggatatacaatataaaattttataaaataatacatgactaagagagacttaggcctatttggcataattttttgaaaaagctaaagatttctttttgaaaaaaaatgtgataaaaaaatatttggtaaacaattaaaaaaaagcttattggctaaagctggtccaacctaatttttagaaaaaattattttgatcaaaagactccatagtaaatttatttatactaaaaatatatttacttatttattatatccttaaaaaattatttaaaatgaataaattataataaaataaataacatttaaatatattatttttttcttaaaaatatatattttttttaaggaaaataatctttattagacagaaatatacgctaatacaaaggactgaagagcaagggggaatatcactctcagaaaagagacgacctaaccaataacaagcactacgtgccatacagtgtgcggctttgttagcagaccgttgaacatgacc

SEQ ID NO: 214041 - DNA, 702 bp, Cannabis indica
tcttaattaatttatacaattaagggatattatatttacactcttaaaatttatttctacaccccattgttaagtgcacctcattttgtttgttaaaatttacattttataattacaccaatttataattccaaaattaggtttatctatgcactccatgccgatttaaaatttaaaccatctccatgtcttcaaatagtatgttccaatacaataactgtcatgttcataatggtcgagtccttaaacataagttttgaaagttgaatttgttcaccgatttatttatttagtttttttttttcttgaaagagaccaatttatttagtttaaattgcagtgaacatattattaacattgattgatttatgtgtagaattgtgatcacttttaacgtttgtgaagtattggaagataaaaagaattggttgtaatggacgatttattgatcatgatagttaagtaatagaaatttttttgagtaatcattgtgtttcttaacaataaatcatggacttagttgattatgtacaaacttatgcaatccttgtaaggatattgcatatcatatatataaaaattacaattgtaacttgtttatgagtttgcttttttttttcccctgaaaatatgagtaaatttatggtaagtgggggtgtgtgaagattttaattttgtttaaaaaataatactttttttttt

SEQ ID NO: 214042 - DNA, 748 bp, Cannabis indica
ttgccgcaaatttccctatatattatatattttcaacaatataaattttccaaaattgataatacacatatacgcaataatgcagcacaaaatcaaaatttaaaataactttgacagtaactattttaattatattcaccagacccacgactaaaattaaaataacgcattgctttacacataacaatatatagaattggcaacactatgatctattcgattagagataattgaatgttaaaatactgtaatgttaaaatacggattattgatgttttcatgttattcttgtgttgttttcttgtcgtaatcatgaaatttttttgttatttgaatgttgttttgatgttttttgttattttcatgttgttatttttatgtttttatgtttttttatagcacagtaaaattgtaattagaaataacataaaaaccacaaaattaaaaaaagaattttgtaaaaaatatataaaaaattatttgactataaacatgttaaaattttgctaaaataatactttgtgtaaattttcttttcaattagtaggtcctagtttattcaatcatattcttttggcattttaccattttcactcctattttttttttttgggtattagttcataaattctcaaaaataacaaaaacttttgtaaggattattcattcatttatttattttttacaaaaaatacagacgattattttttagttgttctcaaattgtaaaaaattgttgggaatcttt

SEQ ID NO: 214043 - DNA, 639 bp, Cannabis indica
aattaggttagactcggtaatcacaaccgagataaaccattctaaagccttattataaatagacgtgtgagcgtaacacgtaggtctatgtcaaatagacaatagatgtagtggcatcaatgctaagtgattttaaaattggcattcatattgttgtttatactgtcttgctgggccttggctcatgggtgctctattgtgcaggaaagagtaaatttgttgttgatcaaccataaggttgagggcttttaccgcttaggtcggcgtgtattgatagctagtaatattttgaaaaagtttttatgagatcccgaaacaaaaatgtaatcttttggatgtttgtaaagtttaataattacaagttactatttttgttctttattcattttaaagtttaatttctgctcttagctctagtaaatctcagtttagcgggattagcatatgtttagttacagtttgtagcgttcctattgttagggcgttacagtggaggtggtagaggtgtagactttgtggtagttatgatcgaggcaggtgaaggaacaagaggctcgccagagcatgtatcaggcgtagaggacgtgacagaatataccaacaaatcctcatcgtccccctaacgagtaggagtagttg

SEQ ID NO: 214044 - DNA, 696 bp, Cannabis indica
atcataattatcataattaagttctcattgctattttcttaattttttttattgttttttatagttatttttcttcctaaaaatgttaaaatttatttaatcaaatagaaataaaagattggttggtttgtaattgataattgataatcaattattgtgagacgatacttaattggtcttaccaagatttatagcaaattgcgattgtgtacacttacataacttaattttcgcaacatatacctaataaaaattcataatattcatagcatttaaatagaaaaataaaaataatttgatgtgagaaatcaagaataacatttatgaccactaatcaagaatttatgttttagggcttcctcaatcaaaaagaaactattccataatcacaactataatcataattgaaaattaaagagaatagggaaaaaaaaagaaactagaatgatgaataattggtgatgtaatctccatcttctccacttttcctacaaacacatttgaaaagtctctaaagacgaaccctaaaacttttaattttacatatccgtgaaaattacctttgatcaaattaaaaactaaattacaaaattcaaaaattagcgctcttgccactacaagagtgcctggagcaaaacccgaaaacggaatgtagcttcgctacaaggaacaaatatcttgctgcagccatggctc

SEQ ID NO: 214045 - DNA, 576 bp, Cannabis indica
gatttgttgtgtgtgtggcataaaggtattagtattggatttgttgttggaaggtcgttggtacatttttaaaaagctaaaagttattttttttaaaaaaaaaaaaaaatgataaaaaagtgttggtaaaactagcaaaacagatcagacaagataacacgacttgagactcgcacgagagttagcagatttgagtttgtcctaaatgggttcgtatcgtattcaagttgacttgtctaacccgaaagtgagccgttaataaatgagtcatgtttgggctgatacggctaacacgaaagtgagccgttaatgacatatttatcgttattttagtattttaacaagtcataaacgtgttattagttgatatgtttaaggaaaatatgcttataaacggttacatgggtcgtgtagactcgttaataaacggatcgtgttcgagtttcattttttggcacgattattaagcgaatcatgttcgggtcaagtatatacctgttaatacatagatctcgacacgacacgaatacgacttacaaacacgaattgttaccccttagtgtttggtaaatagtt

SEQ ID NO: 214046 - DNA, 583 bp, Cannabis indica
cacctgggagacatatgaagggtctaaggtcaatgtcaattgcacaaggaaaactaaaagcttgtcatgaagtaaaagtcagatgacttttgtgatggttatagttttttgacacaagatcaagccttgttccccgtgtcagaacatggtagtgtgcgtacctcctcggaatacacccttctgttcgcccgacacatgccctacaccagcacggtaccagctgtacaaacccttcgtcccacgagaaggagcctttgtagggacccaatagtcagcatttttaggtttttttaccccaacagtaggtggggttcttacaaaaaacacaaggcgggtcatgggtatgctcgtacctgcactttagcctatataagcccatttatttctttataaaggggggtcaaaaaattacatagccgaagctctactaaaaactctctaagctttcatcttcttcaagaaaaatttagggaatcagagttagggtttcattgtaaacaccacttataatatatttaaacgcctataaggccaatatactcactcgtggactaaaaattattaatgtccaaaccacgtaaaa

SEQ ID NO: 214047 - DNA, 1325 bp, Cannabis indica
ttacgggggcgccgtttttggctagcaagtgagttgtgcatactccaatgaatctatcgccgcatacgacgattcgtttggagtggttggcctaaaaatccatggtgaaacagattgaggtggaaattttttggattcaggcacgtcaaatttctggtggtggtattggtagaagaagaagaagagatgtcgagggtcacaaaagaaaaaaaagaagaaaaaaatagatttttattttatttttttaattatttttctttttaaaagataaattatttttaaaatttaattaattttctaatatttaaaataattaaattatgtacccaataaaaatttgacacgtgtacaactgtgtacacctgagcagtctactataatatttaactgtgatttttagacggaggggtacagaacaaaacggaatgagaatttaggtagttttgcctccaaaaatcgattttcgtggttaagtattaaaaaattgaaaattcaagtagtttaactgccaatatcttatttttaaaacttaacagaataattaatttacaacactaaaaataattgaaatattatttgtaacaaactaaaaaattaaagggtataataatacatagtcgtcattcgcctaaaaaaactttaagttaatctttttagtcttgtattaataagaatgaagtcacgtgttcaaatgtacataacagtacacaattggaattcttcatcaaagaaaaacaaaaacaaaatttggaaaatatatattagagatattgaataaaatttaatctaaaaataggaaataggtcgaataagtgtagtaaaaagccctaaataattgacccaataaatggatttcctaacaatactttttccttctttatttgattgacaataatataaatctaacaccacatgaaaagcattccttattcaatcccagttaactaacaaagttaaagaagcttgccattattaagtcttagattaattactagagagcctatactataaataataaatatatatgaaacattaggtattacttattgataattacgaagcaatttaactataaatattaattttaaaaatgttaaactattagatattgatctcgaataataaaagtaaaattttaaatttttttacttaatttaactatttaattaaaaaaaatataaaaaaaatatatactttgtatactatattaaaatatatttatataaaaataagatgagtcaaatttaacttttttagtccaatttttttcggttctaatggaacaatcctaactcaatataatgtaaaaatagagagattttttt

SEQ ID NO: 214048 - DNA, 886 bp, Cannabis indica
acaaattattagtgtaggtaaaaattgaagaaatgtagataatgatatttacctacaaataaacaaatattttgtatttgtagataaaagattgtggagaaaagtcttcccctacacttatctatatttgtaggtagaaaatatggtggaccccactacttgattagatgatgatgattaaacaagtgatgtggattatgacatgtcatcctatgtggtatccatgtaaggaaagtatgtggcatatttttacttgtccatgtgtcatccattagttggtacatgtgtcacacttttgatttgtcaacatgtaacacattaattaatccacatgtcacccattgattagtccacaattcatatttaatttgttttacaagcattccacatttcattacatataaaaagaataaaatgaatcaacgtacattattagatcatgaacttggtatcaaattctgtagaaaatatctataagttatcaaaagagattacaataattgtcaaaaacttaaaacaattgatattacattaaacttaattaattatacaattctaacactactcaatagcctattaaatataaattacgagcaaatttaacatagccatggtagtttatgacattctccttgactcttgtcgcactggaattcatctcctgatcacaaaatattttgcaaaattagttataagaatatattaaaaatcaatacacttaaggccaatattaatataagatattccaatatttaaaatctaacacacatttgtctaaattaattttaaaaacaatgaatttatgctatgtaaaaaatattaataaaaagaatagcatatagtaaatccatcatgaacctatatcactcgtatcattgatcaagaa

SEQ ID NO: 214049 - DNA, 561 bp, Cannabis indica
ttatgaattatattttggtttctttaccatatttttttactaatttatattaatttgtcatattcatgactattaaataattataatagaagtgaaggacatgataaagaggcttgttggctgtaatgaatttcttggcatgcatggatttttcgatttccaaactttgtgatagaatgtagcttcagattgataatcctagagtttagaactcgctgatttgaaactggtatagtgactcaaaacacaagttacatttgttggttaacttgtaagcaaagattacaaactcaggatcaggtaatgagattcggctgcatacaagttgatacttgtttgttgtgtgatcttgagaagaaaccccccctacttgttttcacttgtgattatagtcataatatttttgtaaacagatttttgactgagttaggcttagtaagaagatgaagcttggcacttgtttgaaatggatagagagagaagtggacactccaagttccgcagggaggtctatagcaacagtaaaaattgtaattttttgtatttgggatgcaagaaata

SEQ ID NO: 214050 - DNA, 637 bp, Cannabis indica
gatttattaacttgttcacactttgactaattttacaatattcgtgtaatatataattataatttatttaattgcttctataaaatgaaattaagtatattggttaatcataaaactaatttaaataatatttaatttagtttttaaaaaataaatatttaaattaaataatatttaatataaattaataaatatataatttaaatacattatatttcttgatttataataggtttttaactgaataataataattgttattgatttggcgtcaaattttaggtctttaacgtcgattatatgtgtatatagtgtcagttatttgtatataaccgtacatgtggcgtcagttctttgataataacagacgccatagggtaatatttaacgtcggttgttttcaatcctatagcgttgcctgggtcagcatcggtagcgaatttcgctaaaaatcggcgttgaaaaggtcttaaaaaactgcctctaaaagccaaaaatttatagtagtgtccctaatgaattgtcagtcaaggccctgtcatgtagggaactatggcctactcaatatgggcacaaaaaacacctgttactctcataagagtgctgttaaggctataattagtctaagtttcgggtc

SEQ ID NO: 214051 - DNA, 653 bp, Cannabis indica
aattatagattactgatgatgtagttgcctacttattcctttaacccgaaataattagaatatatgtgtatgtgttttgggatagatcgatgttcataaatgggcaccattcatgatatttggtacttttatgaatttataattttttttagggaaacttataaaaatattagaatttgggttaacttttacaaaagtactgtcacacggaaaagtttttcaaaaatactgtgtttttataaaacaccagtagaacacaaaacagaacaactcaaaacaacagtagaatacgagtgaaaacttaacacagcatactgcagtataaaacttataaaaaaaaatacattaaaaaagtaaaaaatactgcctgacaatatttttgtaaaaaaatagcaaaagtcagtgtaccatgtaaatttcccttttattattattatcttcaattgtaaaattatgtatttttttttttaaaaaaaaaaaccttaatgtaattatatttagacgtcttttaatgtaaattttaaaatcataaatatcaatcaatatataaaggaaggtataacccaaaattagctcgcagcttatcttctcttttttgagttttttttctaatttttagtaatttatagttttaatttatatattatacctaa

SEQ ID NO: 214052 - DNA, 612 bp, Cannabis indica
agaatattttaaaatacttttttgtgcatattggatcttccgactcatccgtcgtttttattcttcttctatgttgactcaagacacaactataaacagttgatcatgagtaaatacttacataaagagatataaattaatgtattgaagtaatatatctttctttttcagttattattagtagaacgttataagaaatagaaagtgattatctatcttttttggtgatatctgactataattaattactattttttttattaataagataaaatgggaagaaagaggttacttattttactatcaaaaatcttacttttagtcacaacagaatttgtgactaaaattaaaaaagttgtgaccaattataaattattattcttatgttgtgactaaaaggtctgtgactaaaagtattagtcacaaaaattacaatttattgtgactaaatgtgtttttagtcacaatacttattgtgactaaaactaaattactcacagcttgtatctaaataccttgttcacaagtaactttttgttgtgattaaaagtcacatttagtcacaaaatttttttgttgtgtctgtaaggttgtcactaaaagtggtctttt

SEQ ID NO: 214053 - DNA, 797 bp, Cannabis indica
acccgactcatgatctagaattggccgcagtggtttttgcactgaagatttggcggcattacctttatggggagaagtgtgagatctataccgaccataaaagtctcaagtatttctttactcagaaagatttgaacatgagacaaaggcgttggttggaattagtgaaggattacgattgtgagatcctctatcatcccggaaaagccaatgtagtggccgatgccctgagcagaaagggtcccgggcaagtagctagcatggttcagatctcacctcagctagcagaggatatggttagatccagcattgagtttgtggtaggtcagcttcacaacttaacgctgcaatctgatctgttggaaggaaaagtaaaaagtaaacggtccggccgacgaagtagtacgaacgtaagtaccggtacgtaaggttaaggtttaggtaaggaaagtaccgtaccggaagtagtagggtagggtttgggttcggtcggttcggtaacgaaccgaaccggaaacggttttaccttttaacgtaagttcgtacgaacgaacgtaggggtagggtagtcgtttttttgtataaagccagggtttgtgttccgaacagtgtggaacttagaaatgagatctttgaggaggctcattctaccccgtattctctgcatcccggcaccaccaagatgtaccaagatttgaaaccgtacttctggtggagcggtatgaagaagaatttggtagaattcgtatcgagatgcctcacttgtcagcagattaaggctgaacatcagagaccag

SEQ ID NO: 214054 - DNA, 684 bp, Cannabis indica
aataattatacatatattatataaaaaattagctatttttcaaaataatatatatatatatatttatcatacaaatattaagttttagaactttgcaatgtaagagagttgtaggtagtttctttgaagatttaatatatatttactcaagtcaaagtgtatatatatatgcagtaattaacctaagttttttttttgttttgaaaatgcagtaattaaccaagttattagttatgtaaaccatttaaaaattatgtaacaatttaaaaattattctgcagtgttatttgtgattaaaggtgaaccatccatattttgaccctatgagtgtggtcattcaatttttgtcatacccatttctttaagaaaaatgcaaataaagtataaaataatggtttaatattattttaaatttttgtatttaacaaaagttattgattgaattttttcattttgttaaataacaatttaaatttttattttttaaattgtacaaaatataccttgacttaatttttattaaattaaaatttaataataacctgatttaaaaaatattattatcaaactagttgcatttttgtatatgtttgtgttaggtttagggtttagggtttagggtttagggtttagggtttagggtttagggtttagggtttagggtttagggtttagggtttaggg

SEQ ID NO: 214055 - DNA, 525 bp, Cannabis indica
gcccatgattcttgtagtgtatactgctcagtatctacgattttgcacaatcgagaaaaaattttcctgacagttttccaccgtcacttattcttcgatggccttagagaccgacagatagatatattttacctgactatttaaagaagtcagaaaacctaattttgtagtagtattgtctaattgtggccatacttttgtaaccatacctataagtaggtgcatccacctccattcaaagggggctggggctgaataataaaatacaacaaagagatctctttagaagtaggctagataggtcgagctcttctgaactctataatttttgtgtctttttttaatatttacttactcacatataattatgtcactactattctctgagaattctaagtgagtaataaaatattatttttaagtgttcaaataatctttgaataaggcagatttgggttcatacttctaaattggatttttgctgcgtcgccatgtgtaaagcagtgacttgcagcactgcgctgg

SEQ ID NO: 214056 - DNA, 634 bp, Cannabis indica
aagaggctttgatggtcttggatgagatggtatttaaagttctggaatcacaaaatttataaatctactgttccaacaaattttcttgttgttgcaaatttaaagtttgttgttacatattcaaagtctatcgctgcaaagccaaaatctgcagaagcaaaatctccagtaattacaaaaagagtaagatctcaagtaaggagatttgtccctatttgtcatttttgtggcagtaagtgacatattaggcctaaatgtttaatcatgtagaatatgtaaaaaaacaaattattttgataatttgaaatattttcaaaagaaacatagtgttatgaaacaaaaatagattgaaaaagaaaattgtctagctgatttttctgataaaagtcttgcttcacaaatgtggtattttgatcgtggttcctctagacatatgacatgtgacaaagattttttgataagcatcaggaaattgcagtttggcgaagtcacattgaggaatggcttagctgaaaacgtcattggaatgggaattctcaattttgaagaatttccgagattgaaaaatgtgatgttggttaagggactaagggctaatttacttagccttagtcaaatatgtgaccaagggtat

SEQ ID NO: 214057 - DNA, 552 bp, Cannabis indica
gattttttaagttcttatactcaatcaaaacccttttcacctttcctctctccttttcagtttctttggtctaaattgtcatgaactcttgtaaatctttcaagtaatccttgaaagattcacacatgagaagatagtggaatgttgtagttttggtgtaatttttcatgaaaaatcaccgacaacgcttgttgggacagtgagcttgttatttcgtgaacacaatcattttctctcaaatctcgtgattctcataatcatctttacagtccaaaattgttaatgcatccttgagaagaatcgctaactccatcatgcttttaggatcttttgatttttagaaatttatattttagattttattttttataagaaaaataacttaattaattaattaatgttccatattctcttttctggttttttatgccatcttgtctcaactgttgggttataatagttgtgttttccgatagtgattgattcactacacatactcttcaaataatcaacattatcttttctgtgtaaacattaaggtgacgtttggtt

SEQ ID NO: 214058 - DNA, 570 bp, Cannabis indica
atatttttgttttaatttaaaaaaagattgtttaattttttgggtttaattattgggtttatttatttgttaacgtttaacgttaacagtctgttaagttaatcgtgtaaggctaaataaaaaaaagaaatcgttaaaccaagaattgccgttagatagacacttttaatatataaagatatgcattttagcttcatttagtttaccaggatctttcaaaatattagaataatatacaaacttggtattctacttttctcaataatcttcatctagtctagtatttataatttaaaatcatatatatctgtactcttgactgaaatttaataaataaaatagttttaatatagcaaaattgtcctaatttatttatgtagattctaaattaaaatttaagtactaattaaattgatcaaatttgccgataattgtgttaagaatcatgaggttctatttcaaaaccaattaatgatgagtagagtagcacatgtttttatatattgttcaatattctactatttattctatgtaaaacaatgtctataatgaattgtataaatgctatgt

SEQ ID NO: 214059 - DNA, 935 bp, Cannabis indica
tggtatgaaaaagtgaacaacactcaaatgttcgtacactaaacaaatccaccaaaacaaaaacacacacaaatagaaaccgacctttcactctctctttctccccaagaatccattaattaaaaaaaaaaaaactagaaataaataacatatttgttattaataaagtctaatatatattttttaaaaataggatataatagcaatgcttaaaacaaaatttgcctctgtctctgtctattcactttcccactctctcttacacaaaaaataaagccactttctttcttattctactttccatccatcttcatacatatctctaatgtttttattttatttaattaaaatataaaagaaattaatatatatttatataaacaaaatcctaaggagacaccgtgccaagtattttattttaatttaataattaatataaaaattattagttaattataatttatatattagcattatattaggatggctaatattataaatactgatcaaattttttaatatagtaaaagtataactagacacaaaaaaaaaaaatattaatttaagcacgatacattaaaaaaaatatgtgtttaaacacgatataatataaaaaacacaaaattcatataaatacaaataaactaatccccgaaaacatttaatatttattattattattattaatatatatttatcaattataaataaattaaaataataataaaatttaaatataatactgaatatatatacgtgaaactgtattttgaaaaaaaaaataagtaaatagtaatataataatatgaatgctctttgtttatatatatacatatagtattcttattagacactagcggtatttatcactttcgaaatgtattcatttacgatttgactagctatactctctaaaaattattatattaaattat

SEQ ID NO: 214060 - DNA, 557 bp, Cannabis indica
ttttcggcgacggtgaattttccgacgacgatgacttttttggcaacttttctgatgattttttcgacgacactaactttttcggtgacttttttgacactattgacttttccggcgccagtgacttttccacacgaaacttattattgttttaaaaatatgagatttccatctttttttacaaaaatgtagtataaaaaatcccatataaatgtaaaaaaaaataaaaaaaacccataacctcatgatattatttatttatgccataaaaaataaactcttgtaattttatcatatattgtgtaatttctacttaccattaaataccaagtaaattactactatattgacttcaaagttttattgttacatatacacatgtgtatgtagtagttattagttgatatttaacggtaatatttaactggcgtatcaaatttgcaaagaaggagattttgctgcaaaaaataaaaataaaaagatttagtgtataaaaattataacataaagaaattttgtagcaaatataaaagttcaagggtcacaagtccaaaaag

SEQ ID NO: 214061 - DNA, 1327 bp, Cannabis indica
agcaactaaaaaaaattctttcatgatgtgagattctactattgggatgagccttacttgtacatgcagtgtgcagatccaataatgcggcgttgtgtgccggaagaggaagtcgcaagcatcctagagcattgtcattcatctccctatggtggacactttggtggacaaagaacagccgcaaaagtcttccaatcggggtactattggcctttcattttcaaggatgctcgtgattttgcaagaagttgtgatcattaccaaagagttggcaatatttcagcaaggaatgaaatggcattgaattgcattcttgaagttaaactttttgatgtttggggaattaacttcatgaggctatttccaccatctttggcaatctatacatcttgttcacggaggattatatctctaaatgggttgaagcagtagcaagtcccactaatgattcaaaagtggtgatgaagttcctccaaaagtaagttttcactcactttggaacaccacgcgcattaataagcgatgaagttactcattttgtgaataaaattcttgctgccttgttagctaaatacaatgtctaacacaagattgctactgcctatcatcctcaaatcaatgggcaagctaaactttctaaccgagagatcaagggtgtacttgaaaaagttgttaatcctagtcgcaaggattggtctcaaaggctagatgactctctttaggcttaccggacagcatataaaaaacctttgggtatgtccctatatcgattggtgtatgggaaggcttgtcatttgccggtagagctggaacacaaaaccttttgggctataaagaagctgaattttgatctccaagctgctggagaggctcgaatgttgcaattaaacgagcttgaagagatgaggtttttctcctatgaaaatgcttaattgtacaaggagaaaaccaagagatggcatgacaagaggattcaacacagagtatttgaagaagggcagcttgttctgttattcaatttaaggctaaagttgttttcggaaaagttaaagtctcgttggtcgggaccattcaccatcgtcaaggagtacccttttggagctgtggatgtaaagaatgaatagtcagagaggatattgaaagtgaatgggcagcgacttaaacactatatcggaggggaggttgatcgagcaaagacctccatcactttggaagaggcttgaagaaaaatgacttcgggttgccatggctttggtgactcacatgtgggcaacccgggagtggaggaactagactatatcattttatatatatgttatgtaataag

SEQ ID NO: 214062 - DNA, 1065 bp, Cannabis indica
aggctatattttgagtagtcgctaggcgataacttttgtatcaaatactttgtattacacttgtaaaattttaaatacgagatcccaatttatatagaagttatttacttttaatttaagggtaattaaattaaattttaattaattacgattttcaactaactacttgattagcaacgacttgcatagttaatataaaattcgataacatgtctaaactagtagggtgttacatctcaatacatattttagttttattttcatattttttttaaatcatgtatatatgtattttttatttttttaagaaaatttcatataattttttaatttaattttttgtcataatgtttaaaatataatatatattttttaagaatataaattggaagaaaaaaaaattaaaaaacttagcataattaaatatataaattttatataaaataaaaatatcaaaatagggtgtctttagaataacttgaatattttgtacttttttagctacaattattgttgagtgaaaaataaaattaattaaaaattaatatataaattcgaaattaaaaaataattaatagtaagtaagtaagttaaataattaattaaaaattataaacaacaggtaaattaatatatgagttttgttaacaaaattgtagtttttttaggggtgcacgcactttctgggtctgacgtatgggacaaactcttgacatggtgggaccccgtgtcataattttaaataagtataaataggaaagaaaaataattaaaccacacactaattatcaactagcattactaaaagatacaacatatgagtttgatcgacaacgatttctaaaccaattaaatcgttttgatagtttgactcaacacaaataatcttaattataatacaacttaattaatacaactgttgatcttttgagatacctaaggtgaaaattcaattattgaatatgtctgaaaaatgtcttactattcaaaattttcataaagtattatatttggatgatacattaatgtcttatctcacatgttattttattgttcacaataatt

SEQ ID NO: 214063 - DNA, 493 bp, Cannabis indica
attttacttaaataaaattatatataatagttttgacctcaatttaacataaggagaagagaaaaagacaaatctatgtttgaagcaacttaattaggaaaagaactactgaaagtgtaccaataaacaataatataaaaaaatagaaaatattgattaaattggtaattcttgagaaaagataaaaatggtaggaaataatgaatgaaagttatttttatttttgttgatcatttagatgtgaaaaaaaaatagtgctaaccccaaactaactaagttatcatttgattctttcatcttacatacacctagatttttcttcaaatatacgttcaagaactttttcagcaatatatatatatatattcttatttttttttattattattgtttattggtacacaatctgttagatagaaattttaagtaaaagtaatattttttctagtagttcttttccttaattaagttgcttcattcaaatatagattta

SEQ ID NO: 214064 - DNA, 532 bp, Cannabis indica
agtctaattagcaacatttttcctttcaatctaatttgaatatataatttttatttttctcacttgaacttttaacactatcaaatgcatcccttaaaatatattactagttagaatttcttcccaaaataaaacaattatataatgatgccctattggtttggttttgtttcttttacaactaataattaatatttttatcccttaactttaactaacacaaaattttgtctcattttattaaaaaagtgaattttaaaaattataattgcatattactttttaaaaattaaagaaagggaattaaaaatttgataatattcttacataaataaataaataaataatttaaagtaaaaaaaattatgtttacttaagcaaacctaaactacttctaaaaaaatatatatttaaatttcttatatttgcaaaacaaatttaaaggaatcaaatgaaaaatattaaaaaattcaataaaatattttaaacaaattaaagcttttgtaaaaaagaaaaaaatcaaagcattttt

SEQ ID NO: 214065 - DNA, 559 bp, Cannabis indica
ctacaaacatcctattcaagaaagccctaataagaatggcttaacactagaagacatggaaccatgtgagcaactaatgtatggtcttagcagtgctagcattaatcgatgtggcgagatcaaactgccactcactgtcgataatcccccacagcggaccaccatcatcaccacattcattgtgatggatgtgaagtctccgtacaatgtgatgctcagaaggccagccctgtatgacctttgagctatctcgtcaatataccacttttctgtcaagttcccaacgacgaatggtattagttgtctccttggcaatcaaggaacttcctgcgagtgctataacgcttcgttatcgctcgccaagaatatcgcttctattgctttggccttagaggggtgaacaagaccccctctcctgctatgacaccagagggcgagaaagacctctcctgcaagagctggagaaatgaccaagacctttggagtccaaactacagagaagacgatgacaacacctaaagccaccttaaggtgctcccaagatggggatgacattgac

SEQ ID NO: 214066 - DNA, 605 bp, Cannabis indica
aattcattggattggtagggtaatttgaagctgttgtcgccagtatggtgagttgaagctaccgtcagaatggtgggtggaggctgtcgtcgaaataaggagaaaggtggctaggtaatcaaatctaaatgagagaaagcaaagaagagaaatagagagcataagtggagcgagttatgacacatctatatatgttttatttgcatctcaaaaatttataaaaatacttatttcaataattttattttatattaaaattatatctgtaatttgtgccaattttttttaaaatttttattcttcctctttatattcttacaaaatatacatataaaaaaatatattttaaatatttaaagaaaataattaaaatataaaaattatataaatttaattgaaaaaaataaaaataattataaataacttttagaaaatattaaagtaaattaaaataattattgaatttaatacaagatgatgtaaaaagaaattttaaacaatattagaacaaatattaaaattaattttttaaaatattaaataatgcttatatgagatatatgcaaatataatttttctgtccttacatatataattaagtaaat

SEQ ID NO: 214067 - DNA, 616 bp, Cannabis indica
ggaaaaaagatgccaatttcaccctgcaaatgtagtacgttgtatacatgaagaaaggaaaacaaattaaaaatttacattttagaaagaagtttatgtaactagtttatcaaggtcatagacatactttaagactttctctgaaacgcaacaaaagcaccaagaaaattccagttgcatactgacagaaaagaaaaacatgatgaggacaaaaatatctcacaaaagagtaaaaaaaatctcattaaacagcaattagttgcatgtaaacctggaagatgacaggggactgtgaaactgatgcccgcagcaaagcatatgaaagataggctttcactgagtcaataaaatggaagttccttgtaaatgaatggcttactccttctaataaaccctgaaatacaacataacatagtagataaaatagtttctttcatttatgagaaaaaaaaaattgcagagatattatatatatatctatatattatacatatatatttgcataaataggtatagaaacaaaaaggtgatcaaaatgtgtaaactgtagataaatgcatttgatttttattagatactcaaatactgtaacccccaacccttggtcaaaagccca

SEQ ID NO: 214068 - DNA, 1149 bp, Cannabis indica
atcatctgacatcggtaaagaccatatgaaaaatatgccacctaccaatctaacagtggggttcattctcatgaagatcccatcaacggcgatccttgcaagagaatcggcctataaatacccccagagacacacaaggcaagggattccgatccaagcttcgacttcttctcctataatcccttcgactctccaccttaagatcgaaggcaaattctttgtaaacacactactgtaattattaactccagaatattactactaggcttccttttcttcaagaggaatacggtggattggagaatcaccataaattccggttacttcacctgagaagaagaccggaagaaatccaaacacatacaattttagattcatgcaaaatcagacagaaaaataagttcaaaactaaaaattcaactgtgaaattacgattaaaaataccagaatacaaatcctcctaatatcaattttcagattcataaaatgtagatctatctgaaatagatctggagttcctaatcaatccaaatcaggtataaaactgaagaaaaatgtatcaatacaactgttaaatgttctcatgttgcattaacattattttcagattttcaatggttgatttattcatattaaatcacgaataacgaagaaaatttgaattcatctagagccacatacatagaaacattgtgctagtttttaagtttctgcatagttgcattgcagttacattaatattttaccaacgctctgaaactagacgtatcaatgattacaaactatcaatgatacaatagtttttatgatatttacaatttcatatccacaatccaacacaaagctctttaagaaaaagattataacatggttagttttattaatatattcatttggttgttataaagttggtttagaaaattctaatagttgtttctctacataatattattaaggtacgattgattgttgatcagtgaaaaaaaaacactgacaaattttttcatgacgatgcccatttaattttttttttttatttctagttgcattttaagttgtatattagttgaataatagttgtgctacaacaatattattattatttttttaagaaaaacaaggctcaaaattggcaatacacgactcata

SEQ ID NO: 214069 - DNA, 671 bp, Cannabis indica
cattctacattcaaaaccaagtctaacgacataatattactatatttaaaattttgggttccaaagcctcacctaagcgatgcacattaacaatgggtggcagtaaaaatcggtgtaccagaaatatcaccgaaaataggggcagtgtataccaaaacaaccacctcgacgagtagatcacacccatgccaactatttatcaaaacggtacacgatattcccagaaagtcgtcggaaaggggcagagctataaaaatgtcaccgaaaaaagtagcgcgccggggaaaatggtttagtgtaggttgttctcctcgacgagctgagattagtggtgaattcgtcttgtcaaatgcacaccggaggtgatcgaaaaatctgttcaaagtttgaacccccaaactttgacttgcgatcccgagctaacggcggtggaagatgcagcgccgcttggggggtgaggtcgccggtaccatggggttcgagtggtctggtgcgtggggctagtcggtggccagaggtgggtcgtcggagtccaccggtgatggagctttgtggcttcctttttgtgttttgaagacagagacaaaaagagagagatagatagagagagagagagggacgataggaggggtctgcttattttttttgttttttatatatacatatatatt

SEQ ID NO: 214070 - DNA, 721 bp, Cannabis indica
acagatggaagctgagaagactgcaccggcctaaaatatttaacatccattatggcacacctcgtgaaaagtgcttattaaatgaagggtctattcaatcaatttcccatcattttgacatctcatgagacacacgccaaacacgcgtgaattgcaacagtcgacatttaaagcactgccaatttacgatgcaaacgatatcctccgtcactgacgtaccagctgacaaccatttaggtgacaccataaaacttgaagctacaccacgtgtcagaaacaaatcatgacaaagcgaagaaacactgcaagctcccgtaccacaagcggtcctagaagtatgggggtaaatgttgtctgggcttttgtaagcttggcacatggaacctaactgaggaggccgagacaatcatcagctaattaatgcctttggccccaccttctatgaggggctttcacgaaggataccttcattgcaaggcggggacacgtggagcatcgatgtacatggtatctccaagtcccgggagcggaagccaagcacccttcgaaagttgggggcttccttaagtacgcatatatggggtgtggatggatatagaatgatttgtatccccgtacgatgtcacaagagagctttgtccgtacttgttagattatagaagtgatatccattctttattctggtacgacaccaagtcttgtcccccacgtcaggccatag

SEQ ID NO: 214071 - DNA, 756 bp, Cannabis indica
gtcctttggcgagagcttgctggcaacagtttgatgctacagttgtgagtctttaaaaacgagatttcttttgctagttttagagtgttataactgatttctccaaagctaaagtgtgccaagttgctatgtatttttttttttttgtctttgtgatgtgctcgaaatagttcagtgtggcaaagtaaaatttttgcaactaattatgttgtttttgttaccattgcttactttaatcaatggaaggatgctcaacaaataaatactaatgcaattgagtctagttcttcttgtgttagtttagagcattgggttgaccaaatattgatacgattaaagtcaatgtagatacacctgtcattagtaaaaatgatcactttagagttggatggccaacctgtgaccatgaaagcgttgtgctacattcttgttcgaagttgctgcttggccagggctaaagcagtggcgataaaagaagcactcagctagatcaaacaataaggtttttcaaaggtcatagtggaatccaactgtaaggttgttgatgttttttgtggttctttttaaatgtgtcttctttgatttaatttttttaaattgtcgtgcattaatttttgatttaaaaaaatattttaattatctttgttaaacgatttgcaaataaagttactaattatttggcgaaagtctcttgttctttctcgattgtggctagggtaggaggcttgtcctagtgattttcaagctattgtgatg

SEQ ID NO: 214072 - DNA, 525 bp, Cannabis indica
atttattgaataacatttacaccaaaaaaaaattaattatacaactaaaaaataaaaactaaaaatataactaatgatcaatacaccttaatattaacttctagtataaaaatatgtatatattatatatatcttatgcatggcttgcatatatatataattgcatggttgtagcttttaagaaagccaagattttatatatatgttgggaattgttttttgtagctaggagtattaggctatatatatgcttggtaagagtagtggttttaattttagtacatatacaaaattataattccaattatatgaccgtgtatattatagtttctatttttctagtaattttgaataatttatgatttaaaagaattatttttatgcatgtatataaaaaaatatttcaaaataatttattttatgtttttgacacgtttatacgttttttttttccttttttaaagatgtcatcacgtttatatgttacaaattacaatttaatttgtttttatataacagcataca

SEQ ID NO: 214073 - DNA, 795 bp, Cannabis indica
attgtaatattggatatttttgccttcaaaaataaaaataaagtatttaagtatataaaatctaaaacattaaatatttataccacaatttactcttaaataaaagacagatactttattagttaaattcatgttttactttgcttattacctagttatttatttaaaagttgcacaagtatgctaaaactttaaaaatagtcatgtttttttttttttttgtaaaagactgaatttttaaatttaatttcttatttgtcaccgtttaaatcttaaaagtgttaaattctttgttttatcttcaattatatctatgagaaattattttatcaatctatatatatttattataaatttattatattttgttccattcttatttttatatattttgagactaattatatagattcttaatttttgttagagttttagatagaagaatggaaagtgaatgtggaacaaaaggtatggtaagaaataatggtggaatcttaaactaattaataatgaatgagcaatttatgtttttacaaacgtatacacaagctttctatgtgggatagttggtgaaagaaattaaataaagagataaatgtaataaaagaaagacacaataatctacataaaattttacaatgcaccctaaaaaataggtgtatcgatgcatcaccattatatatatttttgatatcttcatagtaatagtttcattttttttatatggtaattagatatactatacattatagttatttacaattctacaattttttttttaagaaattttgaaat

SEQ ID NO: 214074 - DNA, 973 bp, Cannabis indica
ctatttggattgggacagtaccttctattgctagtccgtttgttggattggacttgcctttccatttgtaacctttgagtttggctaaatggaatagcttcctttcaaaaaaggaaaaaatgatttacggctagttatatatatatataaatatatatatataccaagagaggtctctaaacttttctacaaaaatgtcacttcgttctcaaattttcatttgcacactcaactccctaaactcaattaatctgcctcacatactattattggtgggagactcgaatacttgcattagtgcaatttgtgtttatgaaaagctaccaactcgtattacaagttagaaatagtggtagacatggtatggtcttctcatcattatttacatgatattattgtaggactggtttaaagtagtttgtactgtttttcaaaccttaaaagaaatgattcaattttaatgaggctgcattattgtgaagctcccttttaccaataattgaactgaaaaaataaactgacatgatttactaaaaaaatctagtagcagtgtaagtgaatatactaaaaaaaaaaaaaaaaacaaaaaatccagaataatcgatgaaacgtacaaattaaaattatgtaaccggtccaactgtcgaaattagtcatgctatatatatatttatatatatatttttttttgaaagaaattagtcatgctatatgaaacacaattggtaagtgtaaacagaaaataacgttgaatgaatgatataaaagactaggttaggtccaactccaataaatgagctctgagtcagccaactatcattttatgtggaaatagccttcacaactatcattttttttttcttatttcaaatcttaattgtgctgttatcatggatagctctacttttctttttacaaagaaactatgtgaaatttgaagttatcaaatacgtgagaaaaattttcttactta

SEQ ID NO: 214075 - DNA, 1096 bp, Cannabis indica
agtaaaattgaatgaaattagacaaaagttcttaaatctaacaattttgggaaatttttaacggctaaaaaagttcaagaaacataatttgatatatgttaaagtttagcgagaaaaaatcttaattaattttttttataataatatttattataattacaacattatctttataaaaaaaattaaaaaaaattgtaaataaaaagttgtaatcaaattaaccgttgatcgtagattaataaactatgcttttatttaagaatctatatttgatgttatatgaaattgctagtaattttttttgtgaagaaacagtaattattattttctttattgtacagtgagaaatagtaattataattttttcatgaaccattttttccttgctcgtatagttttggcaacaagacaatcttgtaattaacaatgattagtctttacttaataaacaaataaagaatatatataaacagacagaagattagcaattgacgatagatgatattgcaagagcagtataaatatatataataatgatggtgtgtgaagaaaatcaaattaatgtattattatatatctaatcccactggaaacaaaatagaagaagctgctgattgggttataattatttgcattgcacacttgtcaaaaaacacaataaacgacaacaccaagacgtaaaacgacacaatatggaatggaaaagaagcaagcagcgtcaccatctgtaactgtaattatatatattaggttgaataagttctgtactaattagaattttattaaagtatgttttttcaatttttactactgttaaattttttattgaattattaaggttgttgggttagatttaaattttttatttaatattagtacagaaaatttaacatgaatcaaaattccaatgaatataatttgatatatgtaaaagtttgaaaagatttgttagatattaaagtttaagaaacataatttaatatatagacaattactaaattgattaaattaaaagaaattaaataaaaattattaaatctaactatctcaatagttaaaaaaaaattgtaaaagttaaaacaataaaagtacaatt

SEQ ID NO: 214076 - DNA, 598 bp, Cannabis indica
tgagctattagtaaaataagctatctaagtgtccgtatataggcgcgaatgtctagagtagtgggtaaatagttttgttttgtcttttgttggtaatatataaggctttgacatttggaagaccttaagagcatagaagagaatgctattttctcaatgccaaagggctgattgctgtaagctagacataattttgggtactttctttcttggaacaacttgatatcatatttataagaaaacatagatacaccattttcagctaactattttttcttctcatttctaagaggtgttgttgagagcttcgggtggtgaaaggctaggaactcttctccttattggtaagtgcttctaacatttttttttgtttaaagtgttattgtgttcttgtggttcttgatatttttagaacaatgtattgttcaaaagatagtttagtagtgtttgtatgttttgatttaaatttgtaacaaatagttgtatttttgtgttcgaacttgtccatggtaggcatagtatgaccatagaaattttgtatacaagcaacaagaatttttttataaccatggtgagtatggtatgaccgtacgatttt

SEQ ID NO: 214077 - DNA, 600 bp, Cannabis indica
ataaataaaatataggttaccttgagtgaaaagatgaaatgcgaagaacaatcggaggctcgagcagcgtttgccggaggtgcggcggcacaatctcgtcagaatctggtggagtttttttttttttataattatttacaataaaaatgtaaagaaaaagaaataaaaagagagtaatgaagatttagtggacaaaataaggggttgggatgaaaaaatagtggttgggatggtaaaaagggggctgccgacagtggtggtcggagggttttgtagagaaaagcaagggaagaagaaagagaaaaaaaaagaaaatgggggaggggggtccgtgccaagttttatttagcctggatttttgatggtgcaattaggtgcgccgataaaagtctaggctgaataaaaacacatgaaacactgcgtttcatttatgttgggacttttgccagcgcaattaagtgcgccggcaaagttcccaccgaaattttcacccacgctttcatttgggcgggaagttgaccgctaaaaaattttagagcttttgccagcgcacaattgcgccggtaaaagccaaatcctgatgcaacgtgtcaattggtc

SEQ ID NO: 214078 - DNA, 900 bp, Cannabis indica
atcgcaagatttgaccgtattgggatttgagtgtgcgaggtcggtgggggtggtggttcgacaataatagaagcaggaggattaaaaagagaggggatttgaaaattaaataattggtaagaatagtaaaactttgggctgtaatttgaagcatagtaacttaaatctttcaatggaaaaccaactattataggcttctactggatatcaatgcaatggctgaataaacattaattttcttcaatatttttatatttaaagttttcagctttttgtgttttgagtgtcagaaatttaaatattaattttataaataattaatctaatacacgctagaacatattgatagtgtgcacactcaaaagttatttatatcaagggttaaaaaaatgtcactatactatacaaacaaaactaatatcttcattcaaaaaaaaaaaaaaacaaaaactaatatctcgaattattctatgtttataatattatttttataaattttaaataattataaataatttatagcattaaaaaaatttccatacatataatgttactagttaaaggacccgtgcttataatttaaagtttaagaaagaacatgatagatattggtatcctttaataaatatttgtcaaataaatatttggtatgaccttttatctctaccatataattcagaagaataagtttggtatagcctatcaataatatttccttccaattcttgtaagattgatttctttaccatcttttgaagtaatagatacctgaaagtagtaatataacataatcaaattaagaacaaaaaaacatgcaattaaaacatacactacattcataaaatattgtgtatgatactttaagcatatgagaacgtaggggtgttgagggagggctaa

SEQ ID NO: 214079 - DNA, 582 bp, Cannabis indica
acgcaaaatcattttttttattagtattagaatcatcgttgttatcgattattatgtattcgtgcataatccattctgttttgatgctgtttttattgtctccgatatgaaaattgagaacattttttaggccaatatctacgccattatgttggattggctttgctgattgagaccttctccaaaaacctaagtgtgcttttcgagtagcacgaattccatttttgcacactctcgggctaaaaaaaatccattctttcaccttttctctttcgaaacattcatacgaatctataaaccaaaacaaacaattaattatttattgattagtgataattaattattaaattaattaatttctaactataaatattcatttttattctgtttttcctttttctaatattggtcttaatcaatgtggtagctgatgtgattttgatgaaaatgagaataacgagcttcattgatttattagtttgttacataataacattctaaattcaatgtacatatctatatataaatattagccaaatgatttcatcattgatattaaagtgttaagtttgcctttcaaat

SEQ ID NO: 214080 - DNA, 1011 bp, Cannabis indica
atacttgttggattttaagctcttcttcactgacatttctgctctgccatttcttccattgtttctttcttctctcctttttttgtatgtgtgttttgcttatcaaagaagcaaaagccaccctataaatatattcttactctttaaacaaaggaaggttctttaaagtccatatagatctactgagcaaaataaacgacaatcttcactacttgtacactctttctcttcgttttgtttttctttgctcttgtttttttctattttcaatagctgaaaatggaacggttgagtgggacaagtattcttccagacacatttgaaggtaccagagatgacattgtaagtcaaatgggattaatttggggtcagatcaaagctccattgatagttcctttgctacaacttgctgtcgttttgtgcttaatcatgtcgttgatgcttttcatcgagagagtttacatgggcattgtaattgttcttgtgaaactctttggtcaaaaaccagaaaaaacgttacaaatgggaacccattagagatgatgttgagcttggttaactttagcttatcccatggttttggtacaaatcccaatgtacaacgaaagagaggtcattttcatatttcatatttcatttttcataccattattgttttgtctctgttttcattttatttttttttatttgtaggtttatcaacttctctatttggagctgcatgtgggctttcatggccatctgatagaatcatcgtacaagtactagatgactcaacagacccgaacaatcaaggtacccagaaaaaaaaacatttgtcatatttgattaaaaatctaattttttttatgtaattatggttaatgggaaattcaggatttggttgagtttagtaatgccaaagatgggctagcaaaggtataaatattaaagtcgaaaatagagacaatagaaatggttacaaagctggtgctttaaaagaaggcatgaaacgaagctagtgtcaaagac

SEQ ID NO: 214081 - DNA, 1224 bp, Cannabis indica
ggtaaaaaaagttactgaaaatatatattttaaatcgtatcatatttatatttcttattatatttttttttatacaactaaatattaaaattttgatatagttttatgattgaatgatcaataaataatatacaaacccacgcaaagcgcggtttgtttcctaatttatttatatatactatagtttaagaaaaaaatatatcaatatgatagatatattttaatttatttatttatttatagggtataattttttatcttattctattcaaaaaaaaaaatattttacttttttttataaatggatttcttttttagaatatgaggtataattttttaaaaaaaaaaattgaaatagtagatttttctattgaaattattattattttcacgagatttttttttattagtttttacaattctattttacaattaatttttcaaatatgtaaagaaataatatttgtacgtattacggtatgagcacatatgtgctaccatcgaatatcttttagtatcttttttttttctttaaagaatatatgctttttttttttttgtttgtcctttcttttttcccactaactaatttaatgtttttcatatctgtttacttttaattaataaaatcatacttttcaaaaaaaaaataatgaaatcatacataaaaattacagagaatttatgtagaatgtaatataaaagcttggtgtaaaataagataaagtttagtaatgtattttacttcatctatattttctaagtatattttaaatgatgtagttttttcagttttaaacaaaaaaaaaaaaaaaagtaacaatattacaaaaatatttttagttggccaaataaaaaaaaaatacacaaatacctcttacacacacttttcaactcacgatacatgcttcctggaattgaaacttgtatctgatgcaaccttcaaccacctacctacccaaaacaactaaagcgaaataggggttgtttcgaattcatgaaaaaaaaagtacagaaaaactactacaaaattgaaattcaactagaaatccagtttaattgcataaaactaagggcattttacataaatgtatacattttttttaaaataattacaaaaaatgtgcaaaaaaaacacaattttaaaaaactgcacatatttgaaaaacatatttacaaattcatcaaagtcttaataattataatagatatattaatgatttc

SEQ ID NO: 214082 - DNA, 862 bp, Cannabis indica
aaaaattctttactagacaactcttttgaaagataatgagcttagtcttaaaggatttaagattaagacttttttcaaaaatatatgtgatatacattatatatatgttttgaaattatatattaaattaattaccagttttagtttgaggacgaccagtcctacaacgtcttggataaggatgttgaggaccaccaagaactggtctactgagctctgaacttttatcaggaacaccaagatcattatacacatcataatcataaactctctcatactcctttctctctcctttcccatttcctctcaatcttttcagttcttcatttctcaattcctttagtccacttggtgtttgtgatggtaaatatgactgtaataatatatatattcacatacaaattagattttagtgtcctcacttttataaacatatgatttgaacctataatattttataatatgtcaataactcaaaccgactaaaatataaatatttggtatttataatatacttaattttacttaaataaaagtttaataattttctttttttttttgatttcggcctttaaaaagtgtaggccctaggcatggacctagcccgtctatgcctagagcgaatcctgactacaatattcattgacatgcatatgaaaaattagaattatataattattcatgtgcataaaacacgagatatataggattcgttaacactatattatattatattatattatattatattgtataatattatattgaattatattttatacctacgtggtagattgacttttacagatactcttaaatatataacattttagtaaaagttaaaatttaagataatataata

SEQ ID NO: 214083 - DNA, 570 bp, Cannabis indica
tatatatggaacacttcttaatgcatatcatatgaaattaaaaatatataaagacataaatttaaaatatatagggtaaattttcaaaaatattttttatgtttatttagaattttataccgcctaaaatttttatttataaaaatacgtctgtaaaattttaaaattataaatatatactttgctcaacaaaaagtaataaaacaactaaaaaatagcgagtaatcaacctaacaacaactacaaatcaattataaataaactataaaacaatcaaaaatatagtttattatttttactgaaaatttatcttttgtaaattaaaaagtttaaagtacaaaaataaattttttccgtaatgatgtatttttgtatttatttttaaatttttgttctataatgttatctttttttaaatgaataataatagtaataataaaagatatttgcggcataaatttaaaaacttatataccacatccttttcttttacagattaaataccaaacattatattttttctatttcattactacaaatttgttaaatgatgattggctttttaaaaga

SEQ ID NO: 214084 - DNA, 596 bp, Cannabis indica
gattataatatctttacgaagattaacatcagtcccagtccaatgtatactccatacatctgaaacaagcatactttcccaatgttctggaaagaacataacacttatccaaggtataagtatactttatcgctgattatcacatcattataaatccattgcactaaggaatcaagggacatcattatctttcgaagcttataataacaattacattccaatgtgttgacatcactataattgtgagtaactatatgttttggacttaaccaattttgtacacattaaaccataaacatatgaaaattacatgtaaacataaatgttttctaatcttctattgataacaaatcagattgtgttgaaatgggttttatttagggcataaaatcccaaaaaactcccacttgcactaacataaaacaagtggtgcatttcaatcaatcaattgtcttgatatccagatcaagtttagtatatttgactaaatccaaattactggaattgtaaatctgtggtaagctactgctttctccaccattacttcctttgtgttcataaaacattatgcaacatcattttctatatgcattact

SEQ ID NO: 214085 - DNA, 946 bp, Cannabis indica
ttgtagctataaatttatttgtattatgaacgtataagattgtaaaaaaataaaataaaaataacaaaatgataattacactctctaatataaattgataaatatatatatatatataataaaaaaaaacataatatagcatattctgaaacatgtaaaacaaaaaaagaaaacaaactgggaaatgatccaatttataggctagtgcctttaaaagtttgagccggttcaaaacaacctacacaaatagatgaatgtacttaattgctgcattgattttttatcatggtagatggttaggattttagagccccatatttggctaagaataaacgtggctaagaagaggaaggaaaaactaataaaaataaattagttttagagataatgtagtttagcataaggatattggcagcaaaactacatgatacagtttgtaacacttaaccccaaaaactaattttttgtggtaaaaccctccaaaccttacttatgttatgctatttacactttctttaaaactagtaattgttaaatgccatcgtgttctgctaatgactacacaaatatacacatgatataatttacgtagtccatatcattttaaaacttaattctctgaaccatctagagcctacaaacttttatatctcccttcttttctcaagttctttctgctcagagcgtatcggaactggggcaaacccatctggaggctaacccgtcttggagaagaggcatgtccttgatgctggccatgccaggcttgttctgaatcataacctcaattatctttaactttttacaattgctggtgtgtttcgaatcagagactcagtttattgttaatggaggttggaggaggagaaggatgtaaggtatttgtgagtttgttctttgttacggagaacgattgagatttcgagaaagagagtggaagtctgtg

SEQ ID NO: 214086 - DNA, 627 bp, Cannabis indica
aattagatttctggagctaccatatgttgtgtcaaaaaaactagatttcaagtagcttaaaattattaattaagttattggactacaatacttgtaactcatagtcacattaaatttttttaaaaaaaaaaattaagcaaaatataacaaaagggtatatttgcatagttcaagaaatttttttgcaacaaaaaaaattaagggataaaactctacaaatatcataatttaagagacaaaagtactaattataagttacataatttatggggactcatagtcacataatttatcctatttttaaatatttctaaggattataagtttttttttctacaaaagtagattattttttattttttaaatgactgattaattgcaccaccgagtgtgtggtgtaattggctagaaggatttgcataaggttccttatttagttgtttttcaaattttgagtcccatagtaacacttatcttgagccttaaaaattacgctattttaggagcaatgagtatctgtgtgccttattgtttcgtgtataggagggtcttgactggcaatcatcttaaagtgtataagccccaacttacaattaaaccacgattctcttagatttctattaagcc

SEQ ID NO: 214087 - DNA, 544 bp, Cannabis indica
atatataatttatataactaattttttaatttcaataataatacacgaagccagcacaagctcaaatgacacgagcacaaaattgacatgaaaaaaaatatacttagacacgacacgaaaaatataatttaaacacgacatgacacgacacgaaaaatatagactttggcactacaagcttgaaagcacgaatagattacttcaaaagtattacacattaaaaatgtcaataattttataataataacaatgataaatatttagtacttaacttaacaattgtaataaaaatacaaaaataaagaacacgaatttgagcctaccctataagaaaacaggttagtttatttaagaagaattggttcaaataaagcacgatacgaaattactggacttgcagatcgtgtcgggcctatcctataaaattgttgtatgacacgactcatattttttcatgggccgactcagcatacgaccaatatcttaaaaattacaaaaaaaatataaaccgaactaacacaacttattttgtgattgataatga

SEQ ID NO: 214088 - DNA, 787 bp, Cannabis indica
atatacttaaataactacaatatatatgtattataaacaaaaaattggacttaagtttttttttctagctactaaaacagataattgtgtttatgtagaattttctaatattatatgatattatacagaagatggtcatttcaaaagtgagttgcaatatcttaccagattgtatgagaatagctgatttgggttgctcttccgggccaaactccttggctattacatcttatattttggaagcaataatgtcatcatctcaattcttgagtcatcatcatcagaatccattaacattccaagtgttcctcaatgatcttctcaaaaacgatttcaacaccatatttcaatcgctttcgagcttccatgaggatctgaagaagaagaagaagaatgaaaaacgagacgagtttattgatcccttgtgctttggcatggccatgccagggagcttttatggaagaattttccctaataacttcatacatttctttcactcttcatacagtttacattggttgtctaaggtacatatatataaaaaaaaatatatatacaaagtggtctaataacatatttcaggcacatatagatctaataatcttcaaattgacagaatatcttgctaataatattctacactgatttcttattatatatatatacaattgatgtgttttttaaggttccaaaagggttggttagtgaaagaggagaagcatataacaaaggaaatatttatattacgaaaacaagtccggatgtggttgtgaaagcttatttgggt

SEQ ID NO: 214089 - DNA, 859 bp, Cannabis indica
tttgcactttggcccccttacaacaactttctatacctccgtccctgatacaacatgtataaaaaaattaatcacaccaggggcggactcacattgagacaaggtgagacagtcgttctcctaaaaaaattcaaaaatatatatatatatatatattagttagttaaaatacatatttctaattaattaaaagtgataattgtaaacatgatataagctttggcatagtggttaagttatttgacattatagtggaggtcatggtttaaatcctaacaaagcatattttcttttagtatgttaatttttttttgaacctttattaataaaatttgtatttagtacttcaatcattgaagttaatctttctattgttacttttttttttctacttaaatcatatttaatactataaaaatacaagtttgcatcaatttttaatatgttatatcatgtagaaaaaatagtacacccccaccctcacttacaaaaagaagtacgctctccctcaacttaaatcttgggtctaccactgagttatacgtgcaacaaaatatttgaatcttattttcggcactataaattatttaaattttttgccaattaataagtaattataaatattacaagtgatcataaataattataatatacacgataaagaaaataattgagctaaaacaatttcctagatgtcaaatgagatggatagtaccaaaatgcctgattatataaatatatatatatattgtatatacattgtttaacaagtaacaacaaacaattttagtatatatatgatgcacttttatgcgtattagctatgaataggtagtattaggaaaatttgagtttttat

SEQ ID NO: 214090 - DNA, 819 bp, Cannabis indica
gtgttatatgtattgtattactattattaatacaatactatgtttggtattgagttgtattaatagattgttgaaaatttataatatattttcaatacacttgaacccaacaccaacgtacaggtttgggtctgggtccgggtccgatgactcccgggtccgggttgcgagtctcgggtctgggtccaggttcacgtctggatccggatctaggtttgggttcgggtcctgggttcgagttcaggtctgggtcccgggtcccgagtctgagccgggtcccggtctcaggtttaggtctgggaatgagttcaagtttggatccgggtctcaggtcacggttctcaggtctgggtccggggtccggttcgagtccaggtccaggtcccgggtcaaggtctaggtcccaggtctcgggtctcgggtttggttcccgggtcccggtccgagtcctagttctgggttagggtccgagttcgggtctgggttccaggtttgggtttgggtctgggtccggatccggatcagagattagtgatgaccctgaatcccttgtaagtattataatacaagttaatatggatcatttattatgtattaaataatacaatatacattgtatttaaattttggtcatacattaatacaatacattgctttattcaaatgtagtattatttattatttaatacaatacaacctttatacgcgtaccaaacgagaaattgattaataatatttaaaaaaggacatcactctaaagtctaaacatagttggaaaataaaatgatttagatttattaataatacttagaaaaagga

SEQ ID NO: 214091 - DNA, 1067 bp, Cannabis indica
cgttggtagcgtctttgtgaatgaatttgccaggttatgttttgaagcgatcttcaagaccgtcacatcacctctctactatattccttagtagatggtactcctctcatatgcttgcctctcttatggctccttggttctttagagttagccaccactctactattgtcatagtagagcattagtagtttttctacttctagaactacttgcagggttatgtagaatttattcaaccaaaccactttcttagctacttcacaagctgttatatattctgcttccatggttgaatttgtaatactagtttgcttaatgcttctccagactacagcttctccaccaagagtaaatactgacccaaatgtcaactttcgactatctttgtctgattgaaaattagaatcaatatatccagtaggatttaactcttcaccggaatatacaagcatgagatctctcattctctgaagatacttgagaatgtactttacagcaatccagtgttccaaacctggagtagattgataatgactaacaatccccacagcgtagcatatgtcaagccttgtacacaacattgcatacattaagctcccaactactgatgcataagggtactttctcatgtcctcttcctcttgaagtgtttttagacattgatccttgcatagagtaatttcatgtctagacggtaattgttcttttttggaattctctattgggaatctttctagcaccttatcgatataagttttttgagaaagtactaatgctctcctctttctatctctatagattttgatcctgagagcatagcttgcttcacccaaatccttcatttggaatttgtcggctaaccacttctttacatctgataacatttccacattatttccaataagtagagtgtcatcaacataaagaactaggtataccactatattacccttagtatattgtatacacaggcttcttcttcattttgttcaaagtcatactctttaatagttttattaaatgtgatattccatgatctgaagacttgcttcaatccataaatggat

SEQ ID NO: 214092 - DNA, 503 bp, Cannabis indica
aatgggtcacttcaaaggcccaatatggaaatacgacccatttggtaggtgtatgaagtccaaaagccaagctcgctcatcaagaataagtgaaggcagatccgcgatctcggacctacaatcccggagcaatccaaccaagcagaaggcggcaaggtccaaagttcaaagtgaagccccctaactatcaaagggataacccaattagcccaagacatacaaaaccaaagacatgaagtcgaacttgttcaggcagttccttctttaagagattcaaaagatggaatccgaaagactgaagtctacaacaccaacttaaagaaaaggaaacacgcaaatagaacatttggaaatgggaggtgaaacgacatccgcaactgctattggtcacggacgtcaccccatgtggcgcacagtgagagtggtcccgagaaatcagggaatgtgtcgactgtgtctgaccactaaaaggcacactgcaaaaaggataatacctttttgct

SEQ ID NO: 214093 - DNA, 738 bp, Cannabis indica
gtaattatactatatattttaaaatacaaggtgtgtttcgatatgaggtggtaattacatatgaattcctaatatcttgtttgacaaaataattagtaattacatgggaaataatattttttagtagctaatgtttattatggaaagtttttagtaattacacagtgtaattacattcaattctcatgggggccatgagaattggagagtgtaattagaacccttaattacttccaattacacagttaattacatgatcagacaaacatatcaaattgtgtaattacttttaattatacacaaatccaattacattgtgattttccaaacacaaccaaatatgcttataaattaaattgatacgcactctcatttttgttctctcttattcagagtagaccctgacgtttagctaattttcgaccatagttttggtctgtattccaccaaacgataaaaatcccacgtcgcaattagaggatggatcaattatgggttttgtcacaatggtgaaggcaacaatatcttccacatcagataaccacaaagtcccaaaataatatttgaatatttttccacgcaaattaaaataataatatattatcttcttaaccattctaataataccaatattgataatctttttttctctttgtgaaaataaaatataaaacgttggcatgtgcttatccagaatccctcagtttcctcactcgtcagatttcagactatcaagtg

SEQ ID NO: 214094 - DNA, 514 bp, Cannabis indica
catttcaacttagggtcggccctaacctaatgtaattatctttctgatacttcgtggaaagaggggagggctgggatcgctgttattgtgattgatttggcaacctcttcttcttggaattaccttactgaatcggtctatgcacagtcagctatggaagctgaattgattgcaattcgctttgctcttgagcgggctgttaataatgcttcgagtaacgttcatatgcttttagattgcttggaagtgattaattccttaactaagaatgtttgttccccggattggggttgcttacctatctctctcactgttttagatttagttaaatgtattttggattgtaagtttttctttattagatattgtttcaactctgttgtggatggtctggcaaatagcgctagaatttctagtcttgtggcaggctgttttcaagggaagggaaatctccatgtggttcccaactatcttttcttctactaataaactttggttctttcaaaaaaaaaaa

SEQ ID NO: 214095 - DNA, 506 bp, Cannabis indica
attattatttggactaataatggctcaacacgtcgtaataataataacttaatggatctgtcaaatttaagactaacggacctacaacaaatgtgatcttgagaactattgctactatttttcaaggttggggattaatctgcattatagtgaactttttaaggacttttgctacaaattttgctttattaaataatataatgtttaagattaaaattattatatattatgtatattattatgagtataatatataatgtgattgagaattacatacatgtaatattcacataaattataatataagaggtggagttacttacattttgtaacctccacattatcaccaattatgtgtgtaaagagtggttacacaacttaatcttttaaaattcaaagctataatacaaatatagtattgatgatttaattttatcatttataatgtgtataagtgatataaaataaaatgagaatgattttgaatgctttggagagttatttac

SEQ ID NO: 214096 - DNA, 514 bp, Cannabis indica
catccatccatctcaagaattttgatctctactcagcgaaaatatcgcaatcaacagtgtgtgtttcttcagttaggcgttcacaacctacagcttccctgagtctggctaacccaaggtcttctccaaggtccaggtgaggctggctaatttgttagctcaccaactcttaggctcgtctctccagcgcagaaccggagttgaggtccagttgttattctagggggcctgtcacccctgggtccttccttcagtgggaggcaccaatggtgggtctacagttggaggcgtgggcctaccacttggatccaccggggtgcttgtgccaggttggctaactgtggtggccaaacctgctgcgcctgttgtggtgacgagattcaccacatctacaatattcatgggagttccagttgtgactgtaacccgattacctggatatgcaatctatgggtcttgagggagagctaaagatgaagatgctgctacatgagttcttcttgtgctcaccatg

SEQ ID NO: 214097 - DNA, 771 bp, Cannabis indica
gtcatattgtactgtgcattaattaaattatttaacgtattactaattttaaaaagaaaaatttgaatttttcatgcttacattacatttaaccaaaaatcaaaaaaataaaggagtttttttatttttacatttcaaaagagttttttctttctcaacccaaattgatatgacaactactagagcaaccatcatagtaattgaaaccgtaaaaataataaaaaaaagttaaaaaaatagtatatggagtgattcccaaaaataaactaaaggtgaataattaatattaataataagagtaaatgtcattttaggccctgtgttttgcaaaaattactcattggattctctattttgttaaatgataaaatggactctgtgttttccaaaatagtaaaattaggatactgagttcaatttttgacaaatttttttaatataacaaacttcaagattttcctaatacaaaaaaaaaaaatacataaaaatataatcaattttgtcataatatctctagatatcgaattattattaagttttattttgattaaaaatcagtttaaagtcctatttataccattttaaaaaatactaaatctattttattaaataacaaaataaaaaatttaattagtaacttttacgaacacataatttaaaataatatttaccataataataatatgttattgttacacgtgcaacacacgtccaaaaactagtattatataaagtgtgaaaatgaaaagaactatctgtaaatatctattt

SEQ ID NO: 214098 - DNA, 328 bp, Cannabis indica
aatttttctttctatactaaacatgctaattattatttatttacattttaatttcttttttaatcaaaatttaattctagaaatataagattagtgatattttttttttcaaaatcatctcgtcacatttgtattttttggggggctaattatattattatcatgaaataatgatatgataaaagatttaaacaggttaagtgaagtataagtaaatatggtttcatttgcaaagaggttgaggttaggagaattaggggtatgagagaatatagtttgatataaatttatatatttacttagatgagagttacgtggcgagccacgt

SEQ ID NO: 214099 - DNA, 1515 bp, Cannabis indica
ctttgagtagattaactaaaaatgacacaaagccaatgtcttaaagacaacatgataacacactaatgtgtttttttggaaaaaaaatactatttcatcaatcgagttacagaaacaaaatgaaacttacaaaaactaccaaaaaaaaaaaggcaaacaaagcaaaggaatacaacaaataatatagaaaaaccaatgccaaaccattaccacgcatccaccctaaaagccatcgccgcaaacaaccacattcttccgcagccagacgtaaagcagaggtgtcaaccaaaaccaagggagtaagaagaaagggctagagaaaccttagtctaaaaaattgaagcctctaattgaatttatacaaatcaaatttcaattatagtaaattgctatacaattcttgttgagacccaccttacataatcatgattaatgtttatggtggctaatgttaattaaaataaataggtatgtatggaggaagaacaaaacgtgaaaaacctaaaatgtgtcatacaacacgtgtataacaatttttttcaatcaaagatggatgcatagtgataatgaaatcatacactctaatgtttaaaatatgttcctcacatcattcatgattattttttttctttttcattcatgattaattggttgtttgacgataagatcatgtgaataatattaaattcttttttttagggaaagtggacactaattttggccctcaaatgattaagtatattcttaccaaaaaaaaaatatttaaaattttcaagaatatgggattttattgataaaaatgatatatgaactctaacaattgttgtaggctttttttaggttaaatgatttatttttattaggttagtaatttgtggagagctagctaccactttttttttttttttaaatatacttcattttattaaatcagaacaaatcactcaacagaatagaaataaattcaataggagcattactttcattaaacatacaatcaacataacaccgagtttttatggcaagataattcatggctcgattaacagattgtgtaagaaattgtaaacaaacattacttaaagactttaaaagcatctttaaaggagaaaaattaaaatatgtatggatttttgggacaaaaataaaattatatgaggggaaaaatatagggaaatttttatatatatacattatatacattaatattacagaaaaaacgttaaatgaacacaatccatgtgtatgccgtgacacgtcatcaagcttaccgtgattagcttcaataattttggaaccaccggcgatgaaggagacgcgcccacaactccacttttctcggtcatccctgcgcgtggtaacctgattcagacggaaagaaccgaaaccaaacttgaacgagaaacaccattgacggagacctcgacagatctgaaaaacttggagaatcgatcatcatatctctcaaaatcgttgttgtatacaaacaagcaaaatcatcatctctctaaatcg

SEQ ID NO: 214100 - DNA, 634 bp, Cannabis indica
tgcattattcctcaaaatttaaaacaaggctaactagatttttacattgttgacgtgcgaactttttcaaatagtcaataattttttcgaacaattaagattgtgggattcaacaagtatcttttttctcaaaatgtaaaatttattgcattaaagtataattttccatattaaattattattattgtatataaaaataataataaaaaaaaaacgattgtgattttaagaagaaacaaacagcaattgcgaaagcaaatgcacacaaaattctctatttctctacaaatgagagagtaagtttactaacccattttaagaaagttcaacccatcttctacaatttcacttatttccctttcgattttagatttgcattagatgatactgtatcagtaaagtctgggtttttaccgggaaacaatcaagcaaatcatatactacaccacacaaattttaaacaaaatttgaaaaatacccaattatggtggaagaaattaatgccaaaatacgaagcccattttaataaaatgcgtaagaacttggagaattgaagcagtaaatccaaatgaaaaaaggagaagaaagcaaaaccttagaagggggaataagagagtttccgaaattgtggtgc

SEQ ID NO: 214101 - DNA, 769 bp, Cannabis indica
tatgggcagattatacaaagaaaggggacgaaagatcttagaaaaaaagaagtttactgattgtataaccctaattctgtatctagaaatatctgaataagatagactcgtggactatgcagagttaactgcaaaaccacataaatacctggtgtcatttttgtttgtattattctgctcaaatttcttattatttctatgtcagttttattacaaaaaaaggcttattaattagttaacaaaattttgcattaatagtttggtgcttttattgggagcctacgtaataaaagcttagaaaattccctccttatgaggaaaacgacaatagtcgtcctgaagagaataattgtcgtcccaaaaaagagccaatgggctcacggaggccacccacttcaagaacaacgcgttcaacacgatcaacacgttcaaggagaagccaacgtgataatgatcaaaacccagaaactaagaatgaggaaatcaatgctgaagctggttatgtacctagaattgaggatgcctatgattccactaggtacgtaccattggttgtatcgaaaaatcggcaactccagcaatgactggctgaggctaaccaacgaaacgctgagttggagagagaggcagccacagccagggcgactcaagaaaacgctgcacaaaactagcctaatcctagagtgagaaggttgcgaggtagacctcaaggttcaagaaccaagaggcaggagatggcttcggaaaacccccataacacttaggggga

SEQ ID NO: 214102 - DNA, 1441 bp, Cannabis indica
tttaactacttaattaataaaatatcttctttttacactataataaaaaatatgtacataacaaaaattatttaactcaaactcaactatttttcttttcttatttttcttgacttaaaaactttttattttaatttttttttttttactaatagaacactctcagcccagatgatataaaaataagagtattttttttttaattagatagaaaaattaagcataaaaactcaaaatttttttaattttacccattcatgggtaatatccattaagagtgcgcccatattatatatataaaatacataaatagtttcttgaaatgagggatcacgtgggcttgcctaaatttaaaaaaatgaaaaaaataaataaatacttttttaaaaaaaaaaactgtcacaaaagtgataagagtcaccatttcaaaattttcaacttttgtatatactagatagatgttacgtatccagtcacgtatgttaattttattttagtttttagttttttttaatatcataattttaaaatttataatattcaatgtagtgataattattgaaatttgaaagtataataaattattattcgtcatacatttatcttcgtaattaatgaaaatgctcatttagttaaactatcaaaacattcaaaattaatttaaaatacatttaaaatttaactaattttaaatatagggtgtaaattttcttttctttctaaatacatatccacatcttatactactcatgaattcttgtttgaaaaattattcgtagatttattaaacatgaattcttgtttgaaaaattattcgtagatttattgtttaataaatgataataataataataataataataataataataataataatagatatgaagaaacttaaaatcaataacctaatatttattaagaatatattgaaggagagtgacttaataaccaatagaactatgaagtagtttaagcataatataaattatttttattgcttgtaatcaattagaaaagccatttttcttttataatacgactttcaagcaatatttattacataaaaacaaaattgggatttttttcgtagttacccaaaaaaaaaaaaaaagaaaaattatgattttaatgaaaaatatattctttacatttttaaataaatatgtaaaaatataaatgtcattttcatattattttgtaagattatttttgtaatttgaacattatttttgggttgtttttacattagaataattacacatagtactattttttgtaaaaaatttaaattaattaggatttttaatctctcaactttgacatgtatcaaatcatgttccttaatttgattcaaattatagatcgtaagcatgtgcttgagggtggtccttaggtctttaagcattgcctacttacgcttaaagaacatgatgacgta

SEQ ID NO: 214103 - DNA, 578 bp, Cannabis indica
acaaatattgtaaagaaacgacaatatttgataaaaacgacagtataaataaaaacaacaacaattcagtaaactttgaaaaaactttgacgagaccttgacaatcataaaaagatcgtaaacaaactacagtacataataaaaacgaccctattttcaaaacgaccattgttgataaacgacaataatttaataaacgacaacttatatattaagaaaaaaatgtattttaaattggaaaacattattttagggtacgttccgtttttctgtttccaatttttattcaaaaaaaagttataaccaactttaattcaaagttttgttaattttcaaaccatataattaattaaataattatttcaaactattattttcaaataatagttgacattaacagattttttttcttttgaattcctgaacccttattaatctacagtatatatacataaatatttacacacgtaaaattaaagagagttagtataatttcacaatggcgaagagcaacatttcaattttattgttgttttgtttgatgagtttgatgccattagtgagtcatggatttgatt

SEQ ID NO: 214104 - DNA, 1414 bp, Cannabis indica
tcctcgacgtccttcttggtaaagtccacttctatctgcattgtgttggaaatggcaaggttcttagcggtagccgacttagcttgggaataagcataagccatctttagaccgatctgtacagagaaaggacattaaaatttgaactaattaacgaagggcaaaaggaaataagacataccctcgaaagttccttcaggactcctcccataacaagctttagagacaagtcattgtccggccaagccagctgttcgttctcctcaagtaccgaccgattcacataatgggtgagcatttccctacctcgtttggtcttcgggtgtagtgagcagggaccttaacgtgggcagatctgcttctgatcagcttggatccgcctttcgcctgtccaggcctatccgaactgcctcgtcaagaatccttagatttaatgccttttctctggatggagttctcaccgccttagacttcttggtcggaggagataagcttgagcttcttcccactctcttattcagggcctcaagcagtttctgaggcatgtctgcacggaacaaaagtaacataatcagaaaaaagcatgagagatatgaaggcatgatgatcaagaaaattaaatacaagatggagtaccctgcactttggtaggggcattttcccaaacaagaactgatatggcatcgtcatccgacgaatcttcctgctcctctaggacgaccttcccctttccttctataggggtggatggtcgagcaggtagatcgggctccgtgatctggattgaatgttcaatcggtctttgctcggctaggagggttttcttccttttgagcaacctttcctcctctgaacattcctgagcctcatcctcctactcagaatactcctaagcatactgcttggctcttgcacctcccttcaacttagcctcacacttcagttgaatgagctccttctcttgctttgctccctcagctcggccagcactggactttttcttcctccccttcacaggcagggatataaagtttgctggataaagccagtactccataaagttggcctccgaggtcagcaaaatgatattccgagcaacatccggaagttcgacaatcctgtgagctgtgtctctaagagcagtataaggggtggacagtaatatatcaggatctgctgaagctgagtataagtggtgcccatgccttctacaaaataatactcttcaacaaaaccccgagtttgctcatgaccttatccatggtgcctgtcaaccatttgaaatctggctaagaaaagtagaagtacctcgacctgctttgcttggggtagactttaggtcaaaaaaccaactgacctcgtgcgaagacaacacccccatttttaaatgccgtagaggatgaacagggcagac

SEQ ID NO: 214105 - DNA, 1433 bp, Cannabis indica
ttacaaaataaaaaataaaggaatttccattaataaaattattagagattagatttataccttaatggacattgagattcaacgatttctccaccaaaagtggcggccagagctacaaccaccacctctaagctcggtttaaccctaaaaaaccaaacaaaaaacgatcaaactctaagaatatatttttgggtatgaaaaatgcaagatttaaaaaaaaaatgggtaaaaacagatgaaaaatgaaaacaaaaaaaaagggggggaagaaatgggtggttgggcgagggctttgtgggtttgagaggaagaagggctgctggttattttagggtttgaagaagacaatagctggagagattatataataacatataatgtcggttattacaaaataactgacgccatatgtatttttcattaaaattaaaaaatcacctgcggagtcggttattacaaaataatcgaccccgtagggtcttttttttaattaaaatttaaaaaattattacctacggagccaattattacaaaataaccgcctccgtaggtgtttttattaaaattttattaattaatttcctgaaagaaaaaaaaccgcatctaaatgtttagtttgtagtagtggccataaatggtagcacactgttattagtgtatttcaatattgggtctcacaaatttaataataataaaaaattatcataaaaaatattatacctaacattatacataaaaaaacccacaaatttttatgtaagaaaacatacaaaaaaaaaaataactgtaaacacataattagcaatcactcataaaaaaaaaagattacattaagttttacaattgtgaattggagcatggtactaaaatttaatataaatatgtcacaagattttttttttggccaaatataatacaatttttatatatctaggagatattcttacaaatttaatataataataaaaaaattaaaattttaatcgaggttaataaaaataagtacatattaattacgaaaaatattaaaggacacattaaagtgccaagcactactagcatactattattggtgaatttcaatatcaactcttaaaaattttaaattaataaatgatttagaaaactgctaactaattattaagtgatatatcgatatggtattgagcatcttaaggtatcacataataataatagtacaaaaaattatttaataaaaaaataatacaaagatcattaataacaaataaaaaataaaaaaaaataataaatcgaagttaataaagatatgtacatattaataacgacaatattaaagggcacattaaggtatcaagcaccataaaagatatcatactgttattggtgcatttaagtattagctcccataatttttaatttaataaatgatttagaaacatgttaatcaatta

SEQ ID NO: 214106 - DNA, 633 bp, Cannabis indica
tttgaactatcacaatttttttttgaaatcatcataaaataattaaactatcattaatataattattccaaaacacttaagaaaatacaacaaacttgagactaataaaagttataacaacaacaataagtcaataatctttttaaagtttcaacaacacacctaaatcaaaataacaaacttgaaactaattaagttccaacaacaatataaatgtacaactaacatacttacatcaatagattaaaaataaaacaaacacaaacttccaactccaaattttaatacacatgtatgggcttgggtttgttgctaagaagagagggtttgtgaagagttatggattttgccctaagatttataggcttgggttgggctcatatgtatgggcttaataaaataaatataaaaattgaaattttaaaagatgcggtgcggtgcggtttgaatcgcggtttaataattcaaaaccgcaaaccgcaccgcaccgcgcggtttgggaaaaattcaaaccgcaaccgcaccgcgaagaatttcaaaccgcattttttttgcggtgcgggcggtttgagcggtttgatgtacacccctactaacagtatctacaatcagcatgtaaataagtggtgaaaa

SEQ ID NO: 214107 - DNA, 545 bp, Cannabis indica
tatgaaaggaagccgaacctatatgaagtaggtaagagcttaggatagttgatgctatactagactgggacagggcatttcacaaaattcgcttattaagaaggatgaaagaatagatctttaaggaaaaatactatcctgatggatgttttataagctacacactcctaaggtagatggaaagtatgtatgtgaagattttagagatgaatctgtcatagaaatgcgtgccgaatagaatccaagataagaagttagaaagagatctgctaaaattgctaggggtaatagcttatgaaggtatcttgaataccaagagataagcaaagaattaacaaatcatagattaccaaaggagaagttgaaagcttcaaactcaaggtcatctgctttatgaaggagacaatgaagtatttgtgcacggtttcgaaaatttctttttaaagaatgaagacaaagaaaggcttaggcacgactaacaatatgcttacaacaacgatgagagaccataagagggcaaccactcggaatggatcactactaca

SEQ ID NO: 214108 - DNA, 708 bp, Cannabis indica
tacactttcagtgaagttaaatgatcataatttccttctctggaaacagcaagttcttgctgcgattcgtggacaccaacttcaacgattcattcaagatgttcctcctccatcgaagtttctttctgatgcagatcaagcagcacaaaggtataatcccgagttcttgaattgggagattcaagatcaactattagtctcctggcttttatcttccatgaatgagagcctgctcattcgaatagtcggatgcaacactgccagacagatttggtacgctttggaaaaacattataccttacaagtctcctctaagattctggagttcagaactaaactccaaaatctcaagaaaggttcattgtcactagatgagtatctcttgaaagtaaagcaacatgtggacttacttgcctctgttggagaaacattatctgctcgagatcatattgcagcaatttttaaaggattgccaagtgattatgacacgttcataatctcatctaatactcggattgaagagtattctgttgctgagatagaagccttgctcttagcttcagaatcaagaatcgagaaatctgataaggaaatggatctaaatgttaatcttgctgtgactgagtcaacaccaagatctgctgaaaatatgctgcaactcgaagcaaatgttgctcacttcaacaggtaactcaaatatcctgctct

SEQ ID NO: 214109 - DNA, 567 bp, Cannabis indica
tttatcaaaaccaaatgcttctataagattgataaaactgtcgattgaactagggcagttcgacataacattccatcctcgaacatccatacaagggttaagctttagctgacttctttatagaaggtataaccccaaaagaaatcccatctgatcagtgagatgcggaaacctagaagctatatgtggatggtgcatccaacgagttttgggtgcggaggtgatattaatatctccggaaggatttaaattttactatgctctgagattccaatttgacgcatctaataatgaggctgagtatgagccttgattgccggcttaaagatagcagaggccttgaaagtcaaaaatctcatatgtcatagtgattcccagctaatcgtaaacaagatcctcggggaataccaggccaaaggcttgaaaatggcaaagtatttagagaaagtttgaaagaacttggaaagattcgattactttaaaaacgaacaaatttcgagagaatagaactccaacgccgatgccttagcaagactggacttgtagaatgatctggatgaactaaat

SEQ ID NO: 214110 - DNA, 595 bp, Cannabis indica
cttccttgctattcttctcaaatctacttcatcttaaagaagaaaccaactttcattaatctcccaccaagccctcctaagcttccaatcatatgaaaccttcatcaattcggaaccacaagtagtcttcacatctctctcctaaacttgtcacgaaaatacggtccaatattctacttaaatctcggccacatccctactgtcatcatatcatcagccaaactagccaaagaagctttcaaaactcatgatctcgctttcgcaagccagcctcggaatgtagccgccgagtatctcttttacaagagcactgacatggtgttttcgccttacggtgcttattggaggtacattcgaaaagtctgtgtactagaggtttttagtggcaaaagggtccaatctttcaagttagttagagatgaggaagtggctcgtttggttagcggctttcggggccttaccccgccaccgttaacatgagcaagatgcttggattgtatgccaatgatgttctttgtagggctgcgtttggaagggacttttctgagggaggagagtatgatagggaagggtttcaggaaatgcttgaagagta

SEQ ID NO: 214111 - DNA, 518 bp, Cannabis indica
tgtttcaagcagcccccttttttctcattgacctttacaatctcattaaagtcgcctccacaaatccaggctccatgtatcatatctctgagacgctccaagagttgccaagagaattttctatctcccggatccggacttctataaaacccaagtaaatctccacataaatcccagaccattttccacaatagcatctatgtgagacacagtaaaggacttaatactcaattcataaggatctttccataagagcgctaaaccaccacttttacctttggccgccaccacaaaacaactatcaaaccccagtacaattctaattctctccatagccgctttattaagtcgagtttcagataagaaaatcatcccgggatgatgatctttcacatgggaacaaagagtcttcaatgtccaggggttcccaagcccctgaacattccaaaacatggcattcattgttctcggcgacccagctccgtcggattcgctgctttcaagttcacgccagagac

SEQ ID NO: 214112 - DNA, 1129 bp, Cannabis indica
ctgtaaatactgaaaataaaaaagagctctccatcttccacacccacggacagaaccaccacagtaccactagaacaactaaaaaataactattaaatccgacgagatgaagcggaaacattaaaacatcaatacttgggctgtcatgatttttttaatgttgtttttggattgttccactgttatttcatatgtttcacaaatgttagtttcaaattacacagttaaaccaaccgctgaatatttgtttgaggtaaccagaatgaaaaatcatggacattaatagtcttacctcccattgaaatggtaaaatctagaagacaaaaaataaaaggatgaaagttggctgagaaaaaaaataacataacaaatgcagcaaatgtggggagctaggacacaacaagagaacatatagaagaagacatcaaaaattaaaagaaacagaacaattaaaaacaatagtggaacaacagaggaaaacttgacacatattggagcatatgatactgaaaaaaaataacttacatacaaatttcattattttcttattactattaaaaatagagcagtacaataatatttaggaaaatgtgattaagaaatgaaagaaaacaacaataaaacaaccttaaaacaataataaaacaataacaaaataaaccagcaacaaaaaatggtaagttaccgaaagaaagtggacctagaagtacggtagagatggagccaatgctttaagaccaaaataactgaagaacatgaacttagtgagagtttttgaaagatttctacaagaagctcatcacagagtaagctctccatctctttctctcacacacacacaaccacactcttatctttcccattcttctttctcttcttcctccttcagatactctttttttttttttggttacctactacaaaaggagagggttagcttttatttggataatattgtagacttgggattaaaagaaaaaaaaatgaagaagatgatgaacaggggtaaagagctcaaatacattgaaaaataaagggaaacttacaaaaatactgcttttttagcaaatgttttcaaaaatactgggacacggcaaactttacatttttactgcccaaacccattttt

SEQ ID NO: 214113 - DNA, 918 bp, Cannabis indica
ctcatttggttgcattagttgaataatttcacttaggagttgtttaagctttgaattaagatcccactactataaaaataattttttgcttcagtttttaaatgacataaatgatttgcatcagttgggacaactaacataataaccgcagacgcaaaaagtcttattttttgcttcactttgtaattgacattaatttttttttttttgctttcatttaataactgattccaaaagtattacacattttgcgtttgttattaaatgaagcaaaattgtttgcttcatttaataactgatgcaaactaaaataaaaaaaaaataaaaataagatctgatcgaagatggtttcagatttgagacggttcaatgcaccacatcgaactcatcatcccagaacccaatcgcgtgccaccacctcgaaactggaaaaaataccagatttagtgtgttgagagatttgcgagagagagagagagagagagagagagagagattgaaaataccttgtttgtgtgacggctccgccatggtctggtgcgtactgtaacaacaacgccaccaccccaaacttgacgaaaaaaaaaagaaatcaaaccaacattttcaaaataaatgaggaatgagagagagagagagagagagaaagagacccctcaatttttctcgtggaaatgaagatggtggcagggtgcgcatcgagagaagagggccggagagggggtggttcgaaaccaccgagagaaagaggaggggccgatgttaatggaggtttttgatttttgaagagaaagagaagggttgaggaggggtggcgttaatggaggttttcgaagagagagagagagagagagagagagagagagagagagagagagagagagagagagagagagagagagagagagagagagagag

SEQ ID NO: 214114 - DNA, 566 bp, Cannabis indica
acacggggtgagaaattagcggggaatgctctcccgttcccatccctattaagatttttatctccacccccgcttattctccattaaaaatgggatggaaatcccctaatggggacaaggatagggcggggaatcccttaatgaaaaaataaaattttattataaaaatttaaatatacaaaaatattaaaatacataaaaattaaaatattacacattaattattattcaataaattaattattttccaaaacacaacttaaaattcatataaaggatactaatatactaaaaaaattcaaacatatataaattacaaattataaaatattattagaaatataaaataaaatattaaacaggtcctatcgaggtgaaaagtgtgattcccgttcctgttaacatttgaggacaaaaaataatcttcgtcttcaccccgtttcccatttagacgaagaaaagaatctccgccccattaggagcgggtcccaatctcatgaagggaaatgtgggtaccgtaaccctaggatcataatttggcgccaatagcggcggaccaatagcgg

SEQ ID NO: 214115 - DNA, 971 bp, Cannabis indica
aacactatcgttctagaaagaaaggacaacaaaataataaagtagcaaattttgcctattctagttaaatctgattttagtaagagatttgcagtgaaaatcagtagaaatttactacgtagtttttttttttttggtgaaaattcttatgcaaccaaattatcaaatatgtatctttaataaggattatggagaataggagattacaaagtcataaaagaaaaagatcttaacacttgaaagtgaaaacccacatgtgatgtcgtcagattgtagtcaagccttgtgtgatcgagtaattaccacaactagaagaaccataatggagagcatgaaagaggtcctcagtttctccttgaaaagatcagccatttctgatgctgttgtcttttccttctcttgaaacaagtcgttcattatctttgtaattttttcaattacttgcatgatttttcctctggtgctatcaaatatcaatttcactatatttgtggcttcattacattcctccttaggcctctcatcccaattcttttcgccaccatcctcagctgcacataaattttattattggattattattattagggaaagttaataaaaaagtaagaatgggcatcccatccaattgaacatatttatcctaattaagtatgattttaaatcaactaaaaactaatttcataagatatcttctactcaatagtaagatctttttgttcaaaaaggaaaagtagtaagatctataattctaagcaagacctctacaatcaaaaataaaaatgatatgttatctcttttggactgtttatattctagcgtggaagaaggggtatggtaatactaataaacaatcactaactttttttaatatttatatatatatatatatatatatatatttatatattttttaatttttaaattataatatatgtaattggattgacttggttgttagttggtatttg

SEQ ID NO: 214116 - DNA, 1016 bp, Cannabis indica
ttcttgagaatgccagccttcagcgggagccagtatacaaggagcctctaagaaacaaaaggaaagaatagacaagcgtctatccaaataaacatcaagaccaacatcaggtaatatattgagtttgggtaggcgacatagcacgaaaagcctcggctatttcaactgcttctatcccaaggactgataaatcgaagtcaggcaatttggacaagttcgtgggtgaggagtttatagtcaaaggttgaagggactccttccgaggaatagatgtcatgctccgcagaattggcgtcgtagttcattgccatgttctcgaaggctttcgtcgcaggtaccatggaggtcgatattttgaggaagcaaaacacccttcttcatgaaaatgtgaaaaaactgaagttggaagcgacttcgggagagaaagacgttcgaggatctcaagaaagccaaggagcaggcagaggaaaagaccaagcaagcagaggacaaagccagactctcagagtcgcgagttaaggaactgactcgtcatcgtgaggagtacgggaagagacagtacgaccacgctgtttctgactatatatacacgaccttgtccaaattgcctgacttcgatttctcagtccttgggacagaagtagttaaaatagccaaggcttttcgtgctatgtcgcctacccaaactcaaggatgcggaggaaaccttttccctttggaggctgagaacgcggatactgaggaagtcgttgatggtgctgcaagcaaggtcgtagatgattccatcactccagctccttaatttatctaagtcctttttattattgttgaacttttattccttttgttagcggtacatgggtactcacgctttgtacttcaaataaactttaactactttattttcaaatgatatatcctttcatggatatgtacttttgcatgtttactaagcggtacaggtgtactcgcataatctaaactgctcttttgatattttaccttattgtttctat

SEQ ID NO: 214117 - DNA, 583 bp, Cannabis indica
gtttctttagtgagtgagttaaatggaataattttgtatttccaaaccattagattagtgagataagtattttcttaaatttaatatgagccatcgaatcatagacacacaaatcgtcactttccttataaataccccagaaagaaattgtttggcactttaagccatttcctcaactttcaaacttttagagagagaaaaaaacccttcaaacgtagaacattctttctggtgagtgtccaatatcggctccgagtttgtcaataaattgctgcaatttcaccaaaaaatattttcgaccaccgctctgttcattgcctctcaagaatcgcaatcatccaattttcaaaaaaacttcaacaagttttcaaagaacctctgagatatttaggcaaaaaattcattagctaactagaaaccaacaaccctagtttttcagcgtcacacgtaagttcttagttctttcaaacttttgccactttttgtttacattaataggtttcagggtaatgggtttatgtcaatatgccatgattttaggggtttcactgggaatttatgatttgattagagttgtgtgctc

SEQ ID NO: 214118 - DNA, 542 bp, Cannabis indica
gtttaaatatttaggtattattaaagtttaaattaaatatttatatgatgagataataaatttaaatttaaactatattaaagagtaatattttttgttttatcaaaaagaaaaactttattaattaaaatataaaaatacaaacaaataaggtcaaaaccttattacaaactacccttccctactaccaagaccgatcctgaaatttagtgagtttaatttaaggacaaaataaatatttatgggctttaggcgcaagcatagtccagggcgaccaaccctgctgcctatcctaacattacataatacatactcagggccggtcctaggcataggcgggctaggccccgtgcctagggcccactcattttaggggtccaaataaaaaaaataaccttttaaaaaaatacaatatatagttttagtaatttttaaaaatatcatttatctttatattaagggtctattttttttttttttgccttatatataactgctcactttattaataatatttgtcttataataagttaacacacact

SEQ ID NO: 214119 - DNA, 1025 bp, Cannabis indica
catgttttgtgcccggcaatattttacatgttttatatgtcatatgtagaatccatcctagtttttttagtatagtgggacaatatagttagacattgagaatgtcgaaaatagttgagattttagagttgacaaaaatacccctaagtgactttttatgacttatagtttgggaagggcaaaatggtcattttgcctattagagttttgtcttttgtgggtttatattatgtttaataatcagatttttcttaattgatattaagctgatatctatttgataaaacaacatatttttcattaaaatcattttttacaaaaatagaaagttggaaaataaactctctctcaaaactctctcttgtttgaaccctatagaaccagctagggttctagtttctttctcaattctagcaatttctagcagctctaagtgaatccaagccaaggtaagtctttaagcaactgtttctttagtttcttgggttttaagaaagtgaaattatgcatagtttgattttgttttttgaagtttagttatgttgttttatgttgatttgagcatgttttgatggttgttaatagggttaagcaagtttggagttttagaaaactcaaacttggagctttaatggtgattttagatcctgagcttgggtagttgttttattgcttggaaaatgtctattggggtataatatgcaggtctagaaggtttggtaaagtttggaatcgaattggttaggttttggaatttttagggatttttggggtaaaccggctagccagttttacagggcctgtaaaactggttacccagatttgctgctaggttccccaaaaaattcaggttgtcgattcgtgctagtttcaggtttttggttggctaattccctgctagtttaggatattaccatattaagttgcagtaaataggtttttggtttaaaacttaagtcccacttgtgatttagcgtgtcacttattcgtattgtatcgatgcgatttaggagcctgtaattcgc

SEQ ID NO: 214120 - DNA, 570 bp, Cannabis indica
gtttccgtacatcacggattacaattcgtgaaagtactaataacagaacaaaatcatatctcatatatatatatttacaaaataatttattgagccgaataaaaccaatccgttataagttagctataatttattttatagaaaaaaaaaaggtgtgtgatcgtgtaaataatgtatgatgtttatattagacttagttctataataaagttctgataattagataaataatagtgattctatatatatatatagtaaaaaaaaaaaacatttgcacatacaatattgttataaataactaacccatttgaaaaaaaaaactacagtactcataatatactactgcaaaaggtacaccaaccatacaatttttcttttttttatatgtttacatttattttcgtgtattttggtagataagatatttacaatatataattttgtgctatacatataaggcagagacgtggtcaaactcttatgttcttgtctttactaagactataattaaggaagcagcgaggaaaaccacataacattttccaggctttaatgacttatttgtttata

SEQ ID NO: 214121 - DNA, 715 bp, Cannabis indica
ctgtttaaaaagattcttgcgcagaagtgagaatttgatccctacaagaaaaaaaccatagaagtttgatgtaaaaaatctagttgcagaggtggaaagtgatccttctatgttctatccacatgtgccgtgctgttaaggatggggccatgggggccaccaaagcccaaacccaaaggcattgaatttttttttttttttttttaaggtgtagaaatgtcaatgatcgagaacgaggcaacaaattttgagaaaaaaaaaaaattgaaattgtccattaaagatgggcagaattgagaaaattcttttaatttgtttctatcccataattcattaattgtggtcaaaataatcctactaatgacctgattctcaggagagaaggcattataattggatggtcatatttgaaaacatgaagcctcaatgactccagctcattggcagccaaaacttgcacatgtccactataagaattccagcttgttttttttttttttttttaaataacttcccattttgcttcttttggagaaagttatgtctataatggggcatgtaaactttaccaaaaaagatgtacactcaattaaggaaaaaataaaaaacaaagattaattgattgaattattatttgtacagttatccatcaccatcattattgactcgttttatatacgaccaagttttgatataacgtataaatgaagaaaca

SEQ ID NO: 214122 - DNA, 800 bp, Cannabis indica
accattcactctaagtgcatgtagaattaatttatgaataactttaatagctatactgctaaacatgaattaaggatgtcttgggaactataccaatgcttctccttgaataacatcagtagtacaacttcaatgtgaatagccagcaacctagtgttattatcaattctattgcaaccactggaatagcctttaaaacttacctaattaaataaaaaccaaataataaagtaataattcaccaagtaagaagtattaactaaaaactaaaaagaaagaaaatttaatatatatatatatatatatatatatatttatataagtatctcaaaatatagtaaaaaaactcttatgtacaataaccaaacataaataaaacatataacataacactttacccaacaacagctataacttttttttttttttttttttttcttgaattggtggtcatcacttttgtttttattgttgggatgttctttaattttttctaattatagtatcaataggcattattttatatgattttgagaaatttgaaatgatttatagtattaaaaataagtttaaaattatttggaggtgtataaaataaaataatcacacgtacaattaattatttgaattatatttttagtatcttaaattattcaaaatttcttgaaaagataccagataactactataactataatatatataaaaaaaagtttgaatttttaatacactaaaaatgaaaaatactcttaccataaaaataaaagtgataccttacttaagaatttctaataaattat

SEQ ID NO: 214123 - DNA, 1532 bp, Cannabis indica
ctatctatagctgtattatagttgtcatgagattttttttttattgttttaagttgatttatagttatcgtggggttaatttcacgttattttttagttgttttttttttccaatttttgctgaacaaagtgtatttttgtaattttaaaactttacaagattatttttgcaattaaaaattttagaccgtaaattaaattataaataaaacataaaagaagggtatttttaaatattcccctattttttttccttattttacatttgtccattggaacacatttataaatagtgggtcaaatatagcacaaacttatttttgtgccaaacttaacacaaattttagatctttctattagagatgggagatgcaaaatctatatatagcacaaaaaatagttttgtgatatttttgtattaatttttacaattgtgctgcaatacataattgtaaattttgatgtaaaatttaatatgtcacatttaatgttcatctaataatttatggaaaagataaagtaataataagggtaaataccattttggaccttgtgttttgtaaaagttaccaattggatcatctgttttattaaatgacaaaacgaaccctatattttccaaaatagtaaaaatgagaccacgaggccaattttcaacaattttattttttaatataaccaactttaagacaatttctaacacgaacagatacataaaatgtaaccagttttttcataacatctctatatcagattattattaagttttattttgacaaaaaatcagttcagggtcctatttgtataattttagaaaatacatggtccactttgtcatttaacaaaatagagggtccaaattagtatcttttgtaaaacacaagttccaaaatagtatttaccataataataataatgtaataataaatataaaatttataataacatcattcatattgggcactagtggtgtccagaacattctaggtggcatccacgattggttagtgatattgtctaaaaactatttttttttatatgagacttgatacttaattacactaatagtgatatgacaactaggagagtattgagcactaatagtgtatcttatttatgtaagtcatttaatacaaatgatcatgctaactaaaattaaataataaaatattaaaaaaaaatggtataatgataaatattataaaagtatagcatttattgtgatgtaaattttgtattatgctatatcgtgatccaaatttaaatcactttttgttatgtgacgaaatttgctcaacaatttatcatagtagctattggagtagatttttcataaaataaattatattttatatttgtatcacttatttctattttattgaagctctaaagtccacattttcccacattaattaaaattaatttattattgaacttatgatttaacaagaaaggattaatgtggggggcatgaatgattcatcctatttcgtgagatgtgagttagctcatactttttttttttttacctt

SEQ ID NO: 214124 - DNA, 627 bp, Cannabis indica
tattcaaatatatttttttttggtctttgaaatttaatttttgattgtaagagattattggggtctatgagaaatgtttctttaaactttgtaagtttaacagtttgttaaacgtaactttgttaaatgtttcttgtttgaaaagcttgttgttatgttgattgtttgttgaagaagggtgataatctttctaaattattatttattattttgagtgatttgctcttaattaattgaagttgatttgattatttttttttttttaaaaaaaaaactaatgttaggaattcaaaaacgtatagtcaaattaattaattatcattttttttcaaaaaaaagaacaaaaaaaaaaaaaaaaaaaacgtaaaattttatttttgaaaaacaaaacacaatttttatagaaactaatataatattttaccaaaaaaattaaatatataatttttttataacgaaaaagggatcacgcgatgcggaccacatgtcaactataggggccttatgtttcaacttttcttaattgggtcatcggtattcactttaacagttccgtacacagatgataccactttcagagaatgccagtaaaagcaattcctatcactacactacacaacacgtggt

SEQ ID NO: 214125 - DNA, 726 bp, Cannabis indica
gagtaccttaaacatcatgagttacatttaaaaaaaaaaatactttcgtatcttaaacaataaaataacataatattgtctaaaaatatatataaaaaattcttttaatattagtcgtctttttttttagagacggaataatatatttttctcacatatcaaaatagttattttattatttataaatgtgtaaaattttgaaattttaatagaaaagtaattaattgatatcttattcatatcaaaagcaactaaatgattatttttttcgaaactctcaaaaaaagaaaatttctaaaaacgagattatttattatttaatatattggcattaaatgtaaatgtaaaaatttattatataatatatttttaattaacatcaattatgataggatttatatttatatgtattcttttatgtaaatttatatatatatatatgtattgaaatacaattataaattttgaattttttatactaaatataatataatatttgtgtcatcaaagcaacaaccatttaaaatttaagagagaatatgtttattggtcatataataatagtatataatttgtgttaaataatcggataaaatcttgatataagatcatatctgcatatttcactagtgaagacaatatattaggtgcaataataaaattacactacaaaaaatcttaattacttgtagtcacaaatttgtagtcataacaaaacttgtgact

SEQ ID NO: 214126 - DNA, 1203 bp, Cannabis indica
atatgaggaaaatagtataaaataactggttacccttaatatttcttttccatatttttttaaattttcccatataagaattttttagaaaggaaaaaaaaattacactttgtaaacttgttcatttatctcataaaaataaaaattctcctatataaaaactaaaataattataaagtgggaaatttttttataaatttagaatgcgtttggtaatattattttaatcatttctttatttttatttttttaatcattgttcttagttggcgaatttggcatagatacgacaccattgttcatgatgacaagcttctatttgataatatggttagtttttaggctctcaactatctttggaggtatcaaaatgctcaagttagtgggtcagccttcctctagtttgggaatgagcactacgcctacacccaactgggatctaactttgggtgatgtcaatttctttgtgaacgttgagtttcgtgattaaacatttgaagatgggaatgggggttgtagcatcgaatctcaatggacatgtattcttctctaacacttttcctataattggtacctttgagcctcacattgtgaaggtcgtggtcttgtttcgtgaactctctacttgccttcagttggggtcaagactgttacaactttctttgattgttttcgccttgttcttgtcacaaatggtgaagtatatttgttataatgagattgggtatttttgcttagtgtatattttttcaagtctggaaattcttttatagtatattcttatctcattgtaaaaagtccaagtatattaccgttcattctttagcaaagcgggttcttattatagatgagtcatgtctttagtggtcgggtcttcttatgaatttaaatgtctcattgtaacaagtctaagtattttacaactcattctctaacaaatgaactcttgttatagatagtcacatatttagtggttgaatctctttgtaaatttaattgtttaatcttaaactctttttatactttaagaattttttcgaactttgtgctttttaatagaatatattcattttttaaaatatatatataccaagatatatagtagttagttagtgttagtttaatcctgtagttgtcatttgtaactaagttatacttatggcaactaactatacttatgtatattgtaaagtccttttttgg

SEQ ID NO: 214127 - DNA, 1835 bp, Cannabis indica
ctaattctgaaaaatttgagagcctccaagtttgatgacttccgccctatttccttatgtaattttgtgtataaggtcattgctagattttggccaatcgccttcggccaaatttggctgggattatatctccgttccaatcggcgtttggccttaatcgttaaattgctgaaaatggcattcttgctcatgaagtaatggattctttcaaaaagaaaaagggggttagtggctttgtgggtctcaagctcgacatgtctaaggcttatgatcgccttgaatggaacttcctggataaagttctcgaagcttttggttatggtgttaagtttcgaaccttgatatccaaatgcatcggatctatctgtttttctatcttgttgaatggtggtcctctaaaacagttccgaccatccccgtggtattcgtcaaggggatccgttatcaccctatctctttgtcctcggtagtgaaattctttcccgacttatctctcgtgaggaactctctgggaagatccatggttatcaatgcaacagtcggtgcccttctattactcatctcatgtatgcggatgatacattccttttttgcaaggctgagtctctcgaggttttcaaggtcaaggaatgtctggatctttattgtagttggtctggacaacaacttaattctaataagtcagctttagtttttcccaacagcaccaaggaggatgcgagaactagaatcactaatctattggggtttcgattgctctccagagatgataagtttttgggttgccccttcctcttctcaaagagtaaatctcgggattttaactatgtcctggaaaatatcaaggctcggttatctggctggcggagtaagttgttatctcaggcgggttcgaactactttgatcaaatctgttatatcctctatacccgtttacacgatgtcaacctttttactgccaaagtccatttgtgaggctatggatagcgtggtgaggaaattttggttggttgggagttcggataagacccacttcctaactcgtacaaattgggactctctttgtaaccctagaagttatggaggtctaggtttcaagaaattcagaaccttcaattttgccttggtctctaaattgggttggatcatggcttcaaatccttctcgaccttggtgtaaaatgtttcttgcaaagtatggttctcataatacttctttttggaatctttctttaccccgaaaatgcaactagcctggctaaaggaatcatgggatgtcgcgactttattcgtaaggaaagctgttggattgtgggtaatggctccttgattgatctttggtctgccccttggattccatggcttgactgggactcctactgtcctgccttcaatccaagatgccaggtccttaaagtctctattctcagtgagcttcttgatgattcagggaactttgacttagatgtggccgctcggtggttcaatccgaccttgatttgccgactagggaagtgataaaattgcctggggggaatcataccagctgatatggaaaagtaatgaatctgaggccttttcggttaaaggtgcttagaactctttcatcaaatgtaccttaaatgctcctaagagtttgtggactcagatttggaatgctcctatccatgagagatccaaattcttcatttggaaggttgccagggatcttctcccctgtggtaatcgcctatcatccatatttcagaataatatgaggtgtattttttgtgatgatgaggaagattcggtaattcatctcctctcaaatgtcctgtggccgcaagtgctggtcag

SEQ ID NO: 214128 - DNA, 740 bp, Cannabis indica
agaacgtcttcagccattttttcttgcacaccgagctttgttttcttcttaggatgaggtctcccacgcttcgttaatggaggagcaaaatcagaatcttcctcctcaataataggacgttttcccttagctttatagctagtgatttcaaacccattttggatttttttttttctgaacaggggaaggagatgaggatgaacgagtcacaaccattttaaatagagattgaaacaaaatgaaagagggaaaacagtatgggattagtttagtggtagttgaaaaaaatttgaagaacaaaaatgagagggaaaaaattattgaggaatcgtggggagatggttcaacaatggaggttacttgatctgaattaaaaaaaaaaactgaatagaaataaaaaatcaaatgaaaacaaaagaaaagaaagaaagggaagtgattgagagttgattgatggttgataggtgcatggatttgatgtgcaaatggtatatgtgtaataaaattaagagagaatgtaaaaatgttgatgtaactgtgttgttgtatatatgtaataaaattggtattttatatttttggtgtaaaaattttttgtttaaactctatttacggcgtgttaaattttttatatttcttaaaattttacaggatattttaaataactataacacatatgaccattagaaaaaatttaactaaaatgttattttggatatcaaaacaaataaaaatacatc

SEQ ID NO: 214129 - DNA, 409 bp, Cannabis indica
aaaaaaataacaaaaaattaacattcaagcaacattaaaacaacaataaaaaataacatacaaataacaaaaattaataacaaattaacaagagtacaacataaaaatatatcaaattaaataccgtattttctctataaataaaattataaaaattataaaaatatttaaaaatctgtaccgtatttttgtaattttgttgttgttgttgtttttatatatttgtgaaataatcactttaaactaactaattacttgttgtaggtctaactaattaacgacccttaagcccatttattgcctataaatagggttaggccaacatttgcaaagagatctaaactatgtccaaacactgttataaaatctggaacttgagcattgtaattctttctacctaaataccact

SEQ ID NO: 214130 - DNA, 567 bp, Cannabis indica
atggaatgattccaagacaattggggacaaatctgcatcaactcgaagttttaaatctttcggtgaacaaattggagggaccaattcctcgtggcccacaattcaatacattcaaagaagattcatatagtgggaattcgggcttatgtggatttccacttaaatcatgcaacgaggacaaaacatcatcaccaacctctcaacaagaagaggaggaggagcatgcgaatggattatttgattggaaaattgtgttgatgggatatggaagtggaatggttattggaatttcattgggatacatgctcctttccgataaaatcattgatgggctggtcgaaacggtgaaaggagaacaatggagtcgtttggtaaaaagatcaaagcggaatgctcgtcaagatcgtagaattggaagaagacattagtttacattttgtgtattttgttgaaatatctgtaataacttttgtgtattcttaataattatgttgttgtttacaaaaaagtatgttttctattctacgcagtgatttattattatgtaagtttttgtttaaatagatt

SEQ ID NO: 214131 - DNA, 632 bp, Cannabis indica
atatttaatatttaattacactaataaaatacggtcacggttgttaagcattgtgctaacatttttctttatatttttatatgctgactacaaaattaactatttgggtcaatcgagtgtcttgaaagataggggagctgactaattgttcatttattttattattatcattaatttttaatattcagttaaaaaaaaataattttttaaaagaaaattaattattttttaaaaaatattaaaagatcaatgaagagctgccacgtagattcctgataaaacttgtacaaaatattattattgcagattaatgatgccaaactaaaactatgttccaattgagaaaaaaaatccttttaatggtattaattaatagtttatataccatttatttttttaaaaagcatttcttatttagaattagtggtgcctagcatttctttacatatcgccttgttattgactagctatactctctaaaaattattacattaaattatatgtaacttgatatttaattaaacctataacaatattaccaggtaaataagtgttagcacccctactaacttttagtatttctcttcttgaaacgacacccaatatttcttttattaaactaaactctgaaa

SEQ ID NO: 214132 - DNA, 729 bp, Cannabis indica
tattctccattaattcagtctcggtatttctgtgtcacgtactgttactcttgctacgtcatcatttgtcaaaatttgggtaaacatatggttagaacatctctctctcttctttctctctctaaaaatataaagctcttaccttagttaattttcttatattctcttgagcaataaaaatttaaagtagacgtatttttattgctgccttgacacgcaaagtgaactattataaatctcgcgtctctcatttattctacttaacttctattttctctcgccaatctagcaagcgagtattaagtagttttatgcatcaagaaaaattcttatagatgtcgaaatagactaaaagtatatcgaacaaccctattataaggagtgtaccataaaattatccaatttattataggatcatgaccgagtatgaacccactccatttcaacggtgtaaataggttacgttcttacattggctttctattatagtaaagacacatatgtgagtgactagctctctctataaatttatatatatatttatatatatgtatatatatatatatataaattagctagctacaacaatctacgtacaatgaattgacctgcaccaaaaagatatcaggtttatctttatcttttcctcataaaatacatatacataaatacaaatacattaatatatctctattctctatacgcgcataacatatatatatatatata

SEQ ID NO: 214133 - DNA, 1493 bp, Cannabis indica
atatgaaaaaaattagtaaatgattttattaataattatttaaacttgacaaatattgaaaaatacaaaaatatattttgtatttacttttaaaaaaaaattataactaattgggcgagattaaatttatcaatcacccgcataaaaactaaataatattaaatcaaagcaaaataatagtgattgaaaaatacaaaaatatattttgtatttacttttaaaaaaattataactaattgagcaagattaaatttatcaatcacccacataaaaactaaattaatatagttttaattatttaaataaataattataagaaaataaattttatatgaaaaaaaaagtaaatgattttattaataattatttaaacttgacaaatattgaaaaatacaaaaatatattttgtatttattgtaaaaaaattataactaattgggcaagattaaatttatcaatcacccacataaaaactaaataatattaactttgaaacaaatcaaagcaaaataatagtgattgaaaaatacaaaaatatattttgtatttacattaaaaaattataactaattgggcaagattaaatttatcaattaccaagataaataaaaacaaaagaatagtgatatatataatgtaaaagtataccacccacaatgatttttaaaccatgtgggacttttttaacttgactctcatattaccaaaagtataaaaaaaaaatattgaaaaaatatgaaaaaaaagagaaaaaaaaaagaaaaatacaaagaaaactacacatagagtgcgacatcatctctttttaaaccttcctttatatatatgtatatatttatatatatatatatattgatatgcgaaatggatcttttatgtaattttgtatttaaaatatacatactctacaagtccatgttattttattatgttctttagttacacatataatttggcagaattttctctaagttgaaaataggccttttacaatgtgatcactaccattaataggagtgggatagcacttatttttgagctaatgtgtacaacgatcatgaaatatggacattcctcacgttatatattttatctaattggcaagaaatagcatgtaaacatctcccttttgaataagataactatctttttttacttggtctttgtgtctgtgacatatggttgtcgaggcacttgattgttttgctgatggattcttggaaaatacatctatccttggaggtaaggctcaaataacataatccttcgaagatatactcatattattcctgagatgatgaacatgattaagcctaaacaattaagcatctcaacgtgaataatgtcgataccaagaatattcctaaaattccttgacaaacttcgcatccttaggaatatgttcagtcccttgtctttaaagttagtactatgagtttactttgtagagagcatgcatgaggcttcatatttttgtaggaggactatcatgc

SEQ ID NO: 214134 - DNA, 718 bp, Cannabis indica
ccgaccaatttccatctctattcttgattttgtaagtgttctaattaacatgttactgtagtaataaaaattgatactactaaagtccttggacatagaattacagtaccttatcttagtgggagaattttaaaattctagcccattattatttggatggcactagtgatagcctactatgttatgatcaagataggtactttagaataaaattaagaaagtaaatttaaccattcatatggatagaaatgacttatcagaattataaggataagataggaagttgtgcaatgtttattcgaatgactcaagcacaattcatagtccttatgaaatgttttatgttatatctaatgattacttaatcttaagcaagtattttacattaatgtttatactagaatgttatgttgatgacttagtctataaggaatttaatgtttcagattaagacatgatgtcacatcaagaggtccctaagcaccaatagtaagaggttaaatgcacacttgtgtatgaatttaaccagacttctactattgagtgggagccttcaaagatgtaaataaacaaggaacattgggagacaatcaagaaagaatctctgaaagagacctatatgttagatgataggagtgtaaattagaatccttatatctaaattaactaacatagtttacaacttgtcaaacaaatagagagttcttgagacttcttc

SEQ ID NO: 214135 - DNA, 866 bp, Cannabis indica
tccaggtcatttcacacttaattattcacatccctatctaccttctcagttctcacccagaattatatagtattctaatgtatgtatatatttattatatatagttgagtgcctacgttaatatatatatgtaacaaaagcgacgtcatctttttttcttttgcattaatttggtaaaacaatctatctatctatacatatttatataattgtattaaggtaggtgatatatcattttgtatgaactttgttttattttttctattttctctagttttcttatttatttatttaaagtttctaataaaaaaacaaaaattgtatattaattataatttattattttttgattttaagttataaaactaacgaatgtatattattttattattaatttttataaaatgacaataaaagttacaattttttatttttctttgtcattttacttgtcactccattttcataaatctatgtatatgtacatgtatttgttgtagtaatattttgatttgtgtttgggtatattttttttttaattgattgatgtaatggccaaataggtcatatatatatatatatatatttacacatacgagaagtttaaatactaagttttatttttagtcaattctttatttgtcttttaattataatttgtatctattctatataaagtgtctatataactaaattcttggtttatgagaaattcatgggtgattttttatttatatttaataaataataaaatattatttatacataataaaataataaaataaaaataaaacaaatacccatttaaactgatatttgatattgaactgatattatttatatatatacaatattatatattgttc

SEQ ID NO: 214136 - DNA, 632 bp, Cannabis indica
agaacaactctcaagggaacaaacctaatcaacctaaaagaaaccgacccttttgtactcactgcaacatccttggacacactgttgagaagtgttataaaatccatggataccctcctggttttcacaaaaatgacaaagggaaagaggcatctgcaaaccaggttcagactactgttgaacctgcaactgggaacgatggacaggctatactgccacaactaacagcagcccaatatcaacaattattgaatcttttggctggacagcaatcaactaatactaattctgaggttggcaacaatacaggtaacccaggtatagtgctttcgagtatgtccaatttacatctaaatgaatcttggatactcgattctggggctactcgacatatatgttatgataaaaacctttttcaaagtatatgttatgttggtccaactaggttgattctacctaataacgaaagccttactgttagtcatagtggaactattgctctttcgaataatctaatcttgaataatgttttatatgttcccaattttagatataatataatctcagtaagctgccttactaatgacagtaatcttgatatattattctcttctaatcagtttgttatacag

SEQ ID NO: 214137 - DNA, 967 bp, Cannabis indica
tatgaataattaaatcttctaacatacacaattattatgtgagtgagacactttgatttaatatggtataagaaaattagaatttatgttgtttattgagttgtaaaagtggttaaagttttgctaaaacaagcttagagctatgtgggcttaacattaacatgtgtatctatagatcaatttaattattaaatcaaaataaatatttgttatttattaaaatacatacatttattttttttttttgttttagcaagtactccatgtaagtaagatttcaaatttgtattaaatttggtacacaaaaataaatttttgttatatttaatttactatatatgattttactccaatgcataagaaaaaaataaattaattatattgatggatatttaatattttattgagaatatacaaaaattattattttttattcttttattatttaaataatgataatatagtaaataaataatgtaaagtgaagtaaaagtcaatgaatcattatatttaaataaaaaaaataatggtttattgtgaacaaaatttggcacattttatttcttgtgttaaatttgacacaatttttagtatgtaccaaatttagcacactcagtagtagtttttgttaagtgtaatatagcaataatttttttttttttggtagaaatgctcttattttaatatgatatatttaattttttttttttgaataactattctaattattttaaaaaaagcattgtaggagactatgtaacactgctgataactgatataaactaaagcatattttctcaaatacttaaaaatagtaaaaagttacaaaaatacgaattgacagtttcatttttagttttacgaattttaactttttttttttatttattttatataaaaatacaaacaattattttttttgcagcaacatgaaaatagtatgaaaatactagtaaaaggatggtac

SEQ ID NO: 214138 - DNA, 682 bp, Cannabis indica
atacccaacatttttataattgttattctcaatagttatacattgttgtgatttactatttttttaaaaaaatcatttagtattgcccacggttctccaccattagcatatgtttttcccaacggttttcttcccactactacaaacttaccttttagtgccacactttagtgactcgcatttttttgtaggtcactaaagaattagagatgagctttactgatattcacaaaaggactctaaaaatgcactgttaatgtcttagaatcagagtcactaaaaatatgaagtgtcactaaagtgttatttccataatttttatttttttataaaaaatactggcctatagtgacactcttggcgtgaatgggtaaacgtgtcactactcgcatgacgcgtcaccatatcctaaacttaattatttttaatttttattttttaaaatacaattggctccattattttatgtaatgattattaattctttacgttttatttttctttttattttttttaaagggattgatttcaaaagtttaaaagtatgatttaagaaaaaggtaataagatcgatttgaaaaaaatattaaagtcaaaaagaatagggttccaaaatcaaaacacttttcttcacactttctctgtgaccaaacacatcccctctttcgttcaggaaaaaaaa

SEQ ID NO: 214139 - DNA, 606 bp, Cannabis indica
ttatgcttgttttctttaattttcttatttggatgaacaaattaaatttcatttttttaaaaaaaaattgtgtgcttggtgatattacattcttgactaattttaattttgtgctttaaaagaacatggaattataaaaggtaaatttcgagcaattaaattggtttatgtatgctaaatttgatacgtggaaagttgtttggaaaattctagaacttgcttgcttgctatatgaggcaaaataataagagcttttttcaattttagccaaaaaaagtaacaatattacaaaaatacttccagctggccaaataaacaaatatacaacccaaataaaaaaattacacaaatatcacttacacacaccttcaacccaggatccatgttttctggacaactatcacgcaaccatctcgcaactacgcagcaacccaacgcaaccgaaacaaaaattcaaccagaaagagaaccaccattaattccggtgacttcaccattggctattttggtaattaatcaaaacatttgctatttcgaattcataaaaaaagggtagaaaaaccactacgaaattaaaattgatctggaaattcagtttaatttgca

SEQ ID NO: 214140 - DNA, 885 bp, Cannabis indica
attgggcaaattattattaaattatataaataataataagtgggtcatgacatgcaacactactagttgcttgcattgtagatggtatctctattttttttttttttgaaacggcgtagatatattaaacaacgaaaattagactttagtcatcgtatcaaaagttatcttggcatctccaatgttaattttgtgaaaaattacacgacacatttcttttaattgatatctttaatttttttttttttgaaaataatcttattaaggaatagcctcagccattacaatgttttttaaaaagaaatgagcactccgctcattaaacaaacaacctgacaaagaacaagacgcccgagcaagagaatggacagccttgttagcagatcgatacacaaaggaaataaaaacattctgtaaagaggacaaaatcaaacgacaatcctccaccaataagccaaagtaagaaggcatatgaactgaactatttattgcttgaacaaccattagcgaatccgtctctatgaacacatcctcccacccttttctcttaatccagcttaatgcttccttcataccaataacttcagcaatttcgggcaacaccactccaatttttgaatccgagattgcttctaaaagctgacccgtatgagaataattatataaataataataagtgggtcataacaatttttgaaaataaccttgcttattttattataatagaattagcacttgttttttaattttgtttctacaagtgtataccaataaaaatttattgcttatttgaaatttttacagtgtttgaaaaagtttttttctatttttatctctcttcaatagacaataagtgtatatgtcagcttcttttttaattttttt

SEQ ID NO: 214141 - DNA, 1089 bp, Cannabis indica
ttaagatttttatttagggtgtgagaaatagagaggaaataggtgggcaagtggtaggggtgtgcagaaagtcatcaaatccaattacaaccgaccgatccaatagaaccgggtatccaatcataattggatcggatcggatgtaaattttgaaaatccaatcggatcagatcggttgttggatgtgacattcgatccaatggagaaccgaccaaaccgatccaattattatccaatggtcatctaattatatatatatttatatatttttaaaatatatttataattttgtatatttattatattttatttaaaaatatatattaattgatttaatacacatttaacacaagagattaaaaaaaaaccttagacctaaaatattataatttttatgtttctaaacgctaataaaattatcaatgcgtattgaatagattttatttttagcagttttattataaaattatgaaaattaggttggattaaactaatgtttattatttatgttggattataaagttttaaattatgtttatatatatatttttctttttaatgaaattagcttaaatggtagctaaaataaattggatggatccaatctaatcaaataaaaaatcagtcaatgcattcaatagttggaactgatccaatctaatacatccattggatcggatcggatgactcaattcaattagattggatcggatgataaaattcaatatccaataaataattggattggatcggttaggttcaaatccattggatgtgatccaatgaacatctctagcaagtggaaaatagaaaaaaagtaagtaggcacgtggaaaatgtggcaagaagtagatgactattttttaatggacccttataggtttaaaactgtcgcctataagggtctttttaaaccgttgcctataagggtctattaaaaatcacattttataaaagaaaaaacatcgtctattttgcttactacgattttaaactgtcggaaatattaaattttttccgataattttaaatggttatttaattttttttagcgatggtctctgaaaaaaaattatttttaagactgtc

SEQ ID NO: 214142 - DNA, 921 bp, Cannabis indica
atcaaaagggacaagcattcaagccacactatcaaatcttcatagtttctactttctaatagaaactcaacatcaaaagtactaaacataacaaaatcaacaccatagaaatttgctgccacataccaatgaggttcacttttctcataacaaagatagaaagcagcttgaaaagagtcctatttgtttagtgattgagaaaatcatatgttgttgtcacaataaaaattgtcaaaaagcaaataaaccccccaaaaaataataaataaacactttatgctgcttcattttaagagtgcattcctcttttgtacactatttaccaaaataaacaaaggaaagaaatgtcataatgttttccatctttgagtaccaatcaatcaatcaatcttatcacttctaaagaaactttaaagaagtaaatatttttttaaaaataataattaaaaaaacctattttgagtttaatggtccaattactaattgtaaatatttctcttcctgatgaagaagagggggattaaccagagatcttcattaactacatataatataacacaaaattaaatatgaattaataataataaataaataaaattcaataagaatcaaacttcataatacaataccatgaaaacccatcaaagaaaacttaagacatcacaatctataatttctacatatatatttttatctttatgaaaataagaacagagcagaataaatattaaataataatgataattaaaaaaagtatattaatatgaaactaccatgaaaaccaatcaacaaaaactgaaagtagaaccagaggaatgttgttaaaaattgatcttgaatttttcagctactgatgattctgcttctgggttttggtgaacttgttggcaataaattcaagcatcattttcttgaccaact

SEQ ID NO: 214143 - DNA, 997 bp, Cannabis indica
aaaaaaaattatatttaaacaagcacatagtttagtatagattcacttattgaagctaagatcaccaatcgtcatgcctaaatataagttcatatgatttgctctactattatctactaataagcaaagtgttgcctttgattttttcccaaatacgtggacacagataaaggtgacacgtggacctggaagaaccatcactcatgagaatatactaagtcttagacaaaaaaggaacacctcagggaaggtgcctcccagaggagagcataaggcacatctttactctcggggaggctagaaccatgctaaggtagtttcaggaggtatagagattacttgaacaatcacttcgcatttaatgtcgcatggaggaagacgtattgaaacctccataaacgacatgacagatggtgtaagctcccttttacggcgatcacactacaatcgatgagtctagtgacggctacattatgaggaatcacatcagtcaagaagggataaaagattatatccacctaactcctaagatacctatggtatagtgcatgtatttcctattttgtatctgctggggatatgagcccctatgaagctaacacagaaagacaagtgatccattcctagggattcccctaggaaaactctataaataccccacaaacagattgaaaaggggtcgaacaatttggttttaaggaatcaaagagaaaaaataggagagaaatccaccaagaacattctctgtaataaatattctcattaatacaaaagactcgtggactaaggctcattaatgccccaaccacgtaaaaatctcctgcattaaactttctacagctcttcttatacattatttaattggttgccaaaaacctcggtcaacacaaagtttataagaaagaaaaaaataataaataacaaaaagttataagaaaaataaataataacacaaaaaagattactataatatatatgctcgtataatttttttaca

SEQ ID NO: 214144 - DNA, 561 bp, Cannabis indica
aaaataaatatatatatatacatggaacactttttaataagtactacccattgatgggtactaaataaatttaactataaatattaattttaaaaatattaagcctattagatttttgatctaatggtgaataataaaagagaaatttaaatttctacatatatatttattcattatgagtacatgaataaaaactatattgtcaattacttttttttttatatatattatatatattgtgtttgttatttaattttttttggttaatatatttgttagttacttgtttacacatattatttttttcctaaagaaattttaaatattactttatatgttgtacatatttatgtgtgttttatgtatatatgttgatattgtcatataattttttttattatttattttttgtagataaaatggctcgtttaagtttagcaagaaagcaaaagttaattattgtggtgcataatttaattgtgattttaaaagttattttaactatatgtactattgtgagtgtttatgcatggataagttttagaagacgcctcaatcaac

SEQ ID NO: 214145 - DNA, 537 bp, Cannabis indica
ggtgcttattagtaatttgcaaagaatgtgaaagtctataaatatatagttgtgtagctattattagatatgaaatgagataatataacttttttcaattagaagattaatgtacattttactattaataacatacattattataacacaactatgttttacttactaaatatactattttaattattaattatactattttaattattaattaaaataaaaagctaaaatattaaataaagctaacactacgtggcttgacacgtaacaatcacctagtaaacttacatcgaagaatctttcaaaaaaaaaattacttattttttaattttttttcgcaaggtagcaaaaaaaaatctaataaatatatttagggttgatcctgaactttgaggggtcttgtgcaaaatataatatattaatacaatattgtacatagaatggtatttttgaaaattttgagttttcctttaaagaatacctgagtgtaaattgggctaatcttaggccctcctatgctggatttcaccagttcta

SEQ ID NO: 214146 - DNA, 421 bp, Cannabis indica
gtcggacgggttggggtcggactggggttgctctttcgggttggggttggggtcggaggggttggggtcgtggtcgacgggggtgagggtggtgatcggcgttggggttgacgtgggtgggtgagggtggttcgggtgagggtgggcggttggggtgagatagagggagagagagatgatgcagagagagagaatattgtggagggggttatttttggggtttagaaaaaaaggattagttttttaggttttaattttggtttagggaaatttttttgattttctaagtatagaaaatcaaatttcccttaagtattaaactcattgtcattgttaagtccttccacgtactcttcagaaccacctagtacttatgcgagtaccttttattaaattaatataagaattttttttattttta

SEQ ID NO: 214147 - DNA, 1126 bp, Cannabis indica
atcaccgccattccggagtcatcgtcgcctccagggacagtgaaaatagcagcaaaagccaccgttgcaaagaggacagccacaactgtcactgagtttgtggcgttgttgattcctgccctatgcagtttgcgaagctctttggcgattccggtcacgttttggtttgtttttcgggtttgttctagctggatgtgtacgtcctttttgatctgtgtcactgtttttcttagctcgtctcgtggttggttgagctcattggcttttactccgccatatcgagctagggtctcttttattagtgatgtttcttcgcatagtgtaaggccttcggctatgtcgaaggcagttttgtgctctcttgttagggcgtttacgtttgtatctggaagggataacaactcactcactatctgcaaagccatatagatatattgaatcgttattaattgattagctgatatataaatatcaaaattaatatttatactcttaaaataggaactgtttggaaatgtgacacactgatgtcaatatttatattatatttatttgaaagaggaatagttataataatgtctaatgtgagcttgaattatgtctaatgtctatttggaaatgtgtttttgatgtgttttcggaattataaaaaacttatgtttatatgctcacattagacataattataacttctctttataatttcaaaaaaaaatatatcaatacttattttcacattagacatacttctacctctttatcatccaaaatagtcttttgtagtgttatttttaaaagtagagccccgcacctactcctactatacttgaacacttcagagtaattagttattcccctttttaaactgcatgttaatctcttttttttttatggaactaaaagttcatatgcatgttcaattaattacacatacttatccaaaactatcttaattgaaagtcataacgtacctcagttcttctttttactggtggcaacatgtaatgctgtattgccaaacttatcagggagcataacaatagctgcatctgcaatcaagaagtgacttgaccacttcacaactaactcctttcactgccatatgcaatgcagtttgtcccttttt

SEQ ID NO: 214148 - DNA, 863 bp, Cannabis indica
ttgctgagctgaaacaaattaagaaggaattgagcaagttatttggtcacctggtaagttcgcatgctaatggttcttctctacaactggtgaaagaagcactaatttccaataccatccttcacaattttgacgaggtaagtgtcacctctaccactggtggtaaaatttttgaagaatccactctaccaagtgcatatgagggttactatactgatgtggtacccacattattcatagaggagaatgataccaccactattcggaatgaagctctttctcattctaccattcttctcctaattctggatgaaaagaaatgctatcatactgatgtgatagacaaagtcgttgaggaaaataaaaaattatttttacttagtcatttacactatttcctctacgacttagacaatggccattttcttattcttgaaaatgtaactaatacttctattttgagacacaagataaaaggaaattcatttttgatactgtagagttaagaatattgagttggtaagccaacctgaggagacttgtctctaattcgccaagactaatcagattctaccttttctttttttttttttatttattttcgttatgctttaatttttgttttattagtttattccttcctttatttttaattttcctaagaatcaatatcataacattttgtattggcttactctcataatgttctcattttaagcatttcatatatatatttttgaatgaggaggacattgtctgattttggttggggtggttagcatatttaagcatgtgtcttaatttttgtcatattaatactttcatggttaaatttttcagaaattattcatttattcttgtaa

SEQ ID NO: 214149 - DNA, 547 bp, Cannabis indica
gatcagtacttcaatttcttaaaggtctaaatatcaggctgtgcgtgatcagattcttcttcttgatccatcgccccctccctaaataaagttttttctatggtaatcaaccaagacagacaaagatctttaggccatcgaatgactttccccaatggttgcctctagttcctctactcctcaagaacctgctcctgcagcaaatgcagcatccaaaaataaaaggccacgaccacattgtaccaattgccaaaaaccaggtcataacaaagataaatgttacttcctaatcgggttccctcctggctatggcaatcgaaaatcaaattttaccaacaccataaatctgatgttggaaccacatccaacaacaatccacaagcatcccaagttacctcctgtacacctgatttttccaactcacagctcagaccaacacagtgccaacaactcatttcaatgttagcacaacaatttcagccaacatatgcctctacatctagtaaaaaagctgtggtgaacaatttttcaagtataaccgatcctt

SEQ ID NO: 214150 - DNA, 945 bp, Cannabis indica
aatgatgtagtgcttgttgggttggggtttcaaagcttctaagtctgacacttctttgtttgttttaaaaactgccagaacatggtcattctactagtatatgtagatgacattctcgtaatcgaactaaattctcgattaattcacaagcttattaatgatttgaacaactcctctatattgaaggacttggggcaggtacactattttcttagtgtgaaaattcatagggactcgagtggcatgtgtctctcccaaagtaaatacatcgctgctttgcttgtcaaaattcatttggaaggtgctagaagttgttctagtcctaccagcggtcctcagaagctttcactcaaataggctctcgttttgaagacaaaacttcgtatcaaagtaccttaggtgccttacaatatttgaccctcactaggccagttgttgctttcgttataaataaattttcttagtttattcatgcacatacatttgtttattggaaagcatttaaacacttgctacgatacttgcagggtataatatctgaaggtctcttctcaagctagttctcgaatgtcacttgaagcttattcggatgccaattgggctaggtgtcttgatgataggcgttcaactagtggttatgctatgttttttgatccaaatcttatttcctagtctgctaagaagaaacaagttgtttctcactcgtctactgaatcagaatttcgatcgttgcttactgaacttcaagttacccttgctgatgttcctataatctaggtcgataaccaaggagttggtgccttagccaccaaccctttcttccatgctcggtgcaagcatatcaagattgatcgacattttgttcgtgatcaaattctgactaatgcactttcactacgttttgtgccatcaatcgaccaagtagttgatgttcttaccaagtgc

SEQ ID NO: 214151 - DNA, 671 bp, Cannabis indica
agatctttcttatattagtgcttagtgctttgttaaatttttttaaataaaaaaaaaacgtgatagctaggtgatatgtgatagatttagagttattaataaaaaaaaaaaaaattaatattttagagttctattaggtttttttagaggtatttcttatattagagctttgttaatttttttaaaaaaaaacatgataggtgataggtgatatatgatagatttagatctattattaatattttataatcattagttaattatatttaaaaaattactatgattttttagtttcaaatatgaatttcaatttatattttcttattattattttattttttcttcatttattatcattaactaaatttaacatttcttttaaattttttaattaatgttaaatttgaatttccattagattagatattttctcattttttatttaacatttctaatttattgttattaattaaatttatggttaattttaaagtattattaatttagtttttctttttttttttttaaaaaaaaaagtttagtatgtaataagagtaaaaggagtagacaaaattaagtatgttgttatattatttcattagcaaataagaaaataattaataaatatcatcaactaaaaaatagttagttgtacgataccataccatgca

SEQ ID NO: 214152 - DNA, 403 bp, Cannabis indica
aataaggttctgctgtcagttgatcaagtctgaggtcaacattttggtgctttcactgagagtattatttatcatttcgactaatcatcatggctgtaactaggagaacgactacctccacttccttgggccttccttaagaccccatgatggttgatcctaatgtccaagttcctccctcccaccacgacaggcctcactaatcaggcacatactgtcaacttggtgaatcttccagatccacccaatactactaatcccattaatcctactaacacggtgaatcctagtgatccacctttgacgcccagagcagatccaccgacagaacctcgaacaaaaggtcttgtcaacacggaacaacctatacggagcgaaactaggtttggtccccgatattatg

SEQ ID NO: 214153 - DNA, 622 bp, Cannabis indica
tttggtttggggaagttgacataaatcaccttcggtacttatttttttctttttttttttattgagtaatttgcggcataaatatctaagttttatgtcgtgcagcagataaatatctaagtcgtatttttggcggtaaaaataccttcggttacactcttggaacttccgtatgtacctctctgttaactaccaaatcagtacctatgtggcagtctctaataggtccatgtcatttaatttttattttttttctaacaatttaaaaaataaaaaaaagttaaatcattaaaaaataaacatatattttcccttttctcttccactatctctctctttgctctcgacaaaagtaaagttcaaaaattccaatcaagagacaacccattacagcattaaaggttaagaaaagttagctcttaacattttctcaaaaaaatcagaagggaaaaaattgagttagaccaatatataataaatatatgtatatatatataattgtttataaaataaataccaatggagatgaagctaacaagaatgctgcttttccaaccccagaatctccgatcaacaagatcttaaacgacaagatcgtagctatggctctgacctgaagaag

SEQ ID NO: 214154 - DNA, 997 bp, Cannabis indica
ccgcgaacacccctaatttaaacattgttttcaacatgtaaaattattcttaatttcttaaatttttgtatggtgttttaaataattacaatttgcactataaaatttctcttttttttttttgaataaatcatgcaattctattaatagggtctacaatccattcaggacatctcccccgttagaggcacgaccaggattagaattaaaaaaataagtcaaataatcaatcgcctaattcccaaatcgtttgacaaaaaactaaaaataaaatcaaatgaaaaaaattacagtatcacagttaaccctaagaacacatatattcagtttcatctatcgctcagaagacataacaatagaaattgttgcagcatgttcattcaatctcgtagcttgagcacttatgcaaggtatgtaactgcactactaacaacctattcagtcgtagagaacttgttattctcaaccactaacagggatttaatggtgaaccatccaagaacaaagaaaaacctacaacgaaacaaaacaaaataaaatcatatcacacaaacaagactaaaacactcaaaactatatcacatagacaagactaaaacactcaaaagtaagtcatagatataagactaatcacagtagcaaaaatcgaattgcaatagcaaaacataaccccgactaagctgcatctatgactagggaaggccagcgggcctaaactaaaaaaaaaaaaaaatcttatgtagctataaatttaagaacgaaaaatcctaatacaaacttagtattgttaattaataataataataataagggtaatttgcgactaaactatctgaacattaaggtttggtacgattaacctctttactaatttttttggggctaaactctccatactttggttctgttttggtctcaacttttccttcaactctcgtctgttaagtgcaaatgtgaactgccactgtgtatactaatatatatgtgacaagttttt

SEQ ID NO: 214155 - DNA, 588 bp, Cannabis indica
aattaagtaataaatttacccaaatacttatattaaatatagcctagttgaaatttaaactatctccatgtttataagaacaataatatatacatataaaaaataatagaagacagtaaagacaaataatttgttaatttatttaattggaaaatgggaatgtcatgtgagaaaattaaaatcccttgccgtccaaatgtgctctattagacatgggcacatgatagaaacgttaaccctataattcacatgatttgtcaactccacaaaatttcatgcttttacccactttctatatatagctacttattatataataaataaataaacatatatttatatacatatttattatgggttggtgggtcagtgggtcctcattcaagatatcaataatccaaattaattttgaattcttcatttcatgatcaagaattatacatacacatactaataatgtcatattctaattactctttatgaatatatcactaataatgactaaatattattcatgtgatagtatcatgaccaaatagatttacgttagatatatacaataatgaaaatgatctcaacctcatatat

SEQ ID NO: 214156 - DNA, 944 bp, Cannabis indica
aataaatgcattcagatgacttgccttgagaaatacagttgatagaaatactcgaacttgccatcacatagattatggggagacaaaagctaccgactgatgagaccaacgaggtgaacaagtccatctcgggataaacataatacattatgaaattgtttggaaggatagataatgagttttgcagcccattgacccacatacccgtgagcatgtaaccagaataaggacaactttaatattattcatctcgctcttgacgcgttgaagtaagcgtctcgaatatacttcacttagtatttaaggaagagtgcaagctgtactatgattatacacttagatattacatggagatgtttaagaaaaatattaattgaatgacgaaaacaacaaagcacagtcaacatagccatttataaataacaacaaagagtagttatgcggttatttattataatctcatgtgcctatatatgaaacgtggagaatgtctaagcttcatgaacgattgcaaaagattagaccctaaggaaattggatcaatatctaactttctttggcaacacagaatggatactcactggtagaatatgttgaatccatatatgatgatcgtgaaatttcagaccactcaaaattaatttgttcatatcaaaccaatcagagacatttgaggagtacccttcaggtactttcacccgagagatagaaccacacaaagattatttatctggtttagttagagcatgacaagcttgtggtaagaacgtttgtcgaccaacaacttatgggtgtaaattggcccgaatcgcttactctttcaaatctagacgggatttgattccatattcgctaggcccaggaatattgaacaaggtattaagcaagttgtctgacacatttttctcgatgttcatcacgtccagattatgacgtatcaacaa

SEQ ID NO: 214157 - DNA, 1150 bp, Cannabis indica
aatatattgtaagaaatatatatataaacaaataactcaaaataactcataaaaaattaaaaaataaagaatcgacattactttaaacttaaattaatttttataaaactaatggtttttttcaattttaaccaaaaaaagtaataatattacaaaaatattttcagctggccaaataaataaatatacaacctatataaaaaaaaattacacaaactacaacttacacacaccttcaatccaggatccatgcttcctaggcaactatcgcgcaaccaccgtgcaactacgcaaaaaaccaaagcaaaccaaacaaaaattcaaccagaaagagaactaccattaattctggtaacttcacctgagaagacaaccagaatcaatcaaaacagggactgtttcaaattataaaaaaaaaaaaatgtagaaaaactactacgaaactaaaaaccggaaatccagtttaatttgcataaaactaatatcctgacttcaatttttagatccatgaaaggcatatctcaaaagttgaagtggagttcctaaacaatccaactcaagtataattaaaaaaaaaattacatcaatactatagtaaaatgtttattctggtatatttttgttgttttctaaatttttaatggtgaatttgttcatattaaatcatagagagtcatgtagataaagttacgtacgtgaaaacattatttgatttttaatgtttcataacaattgcattacagttgcattacaattgtataaacattttgctaacagttatttcgtctgattgaaaccttcatctgatgcaaccttcgactaaccacccagcaaccacccaaaaactttcgtctgatgcaactttcggccaaccacctagcaaccaccctgcaaccatcgtctgatgcaaccaccgcgcaaccacgcagcaaccacactgcaaccattgtctgattgtgtaagtaatagtgtaagtggtattttggtaattaaaatcatataaaagatataaatattgtctttaccttatagatatatttttgtaaataaaatatcaatttatatttttaatgtaataattcctaaaactaatatagttataaatatagtgtaatatttaagtgttccatacatataaatatatatatta

SEQ ID NO: 214158 - DNA, 799 bp, Cannabis indica
attttttttataatattaattatagtttaaagtaaagaaagtaacaatgaaaatttttgtttcaataataggtactaaatacaaattttattgatagaagtttttttaattaaaaaacttaaaatactaagaaaataagtatgttttttatgagatttgaactaatgacctttaatatgtgtgtaaaatagtttaacaattatactaaaccttgtattatgttcattaagagctcgtgttatattgtattgtatagtatttgtattagattgtattgcattaatattatgtaaagcaatactatgttcactattgacttgtattaataacttgagtaaaattatatttttaccataaactcgaccctaactctgacccccattcaggtccgaggtcttaagccaggtatggggccgaagtttggggtcggaaccaagtccagggttcgagtctagggtctattgtttgaggtcaaggtccagggtttcaggtctgggtccagggttcgagtttgagtttaggcccaaagaccgaggtcccgatccaggtctggatctaggaccatcgggaccatgtccggagtttgaggtcggggtcagtagccaggtccaggtgtctaaggttcaagactaggtatgaaactaaaattcccaaccccaaacccccatttccatggtaaaaatatgcatcaccgtgtcactcagctaagatgaattaaatcatcatggataattttgtcacaatcaagattaaggagtgaaaaaactaaagagactcaaccccagcaaatcgatgcagg

SEQ ID NO: 214159 - DNA, 798 bp, Cannabis indica
cttcattgtaatcttgcacagaaatatcatctctccttccttgcaaccttttcaattgtttcttgtattctttgattcgatggttaagagtgccagtaatgtctttgccccacaccttaagcttctcagcacacagcttaagcttacccgtgaggtttaaatgattcccattctcccaacaatctttaacaatttcggcacacaaaggctcctttaaccaagtgttctcaaatctaaaccgatggttaggagtgaaaatatgaggaaccactggttcaaggaacaaagccgcatgatcggagcacgagtaatcaagattcaaaagagtagcttgagggaatacctgaagccaagccgaggtggctaaggccctgtctagccgaatactcttatgttaaatatggtggacatgacaaaaaatgggtttaaaattaatttttttgagttgtatctaacgtgtagaaatgaatttgggcaattcgtgggtttgggcttatttaacaaaattttaataaactattattatttttttgggttcttacaaaaatattaattgttttatcatttttacaattttactgtcacatatttttttttacggttttactatatcaagttttcaaatatattgtgttaactttttaaaattacaaaatattgtgtttcaataaaataaaaaaaataactaagaaaataactttaaaatattttaccaaacaatatgaaaacaattataaaacaacaaaaagataaccaacagaaaaataacaactcctcaatatgcaaaataatatcaac

SEQ ID NO: 214160 - DNA, 629 bp, Cannabis indica
tcattgcccttacaaccttcacggttagaattccaacaggcctctttgatgccctgcaacaatcgcatcaattattcacatcagataaatcatttgccacaaacaaaatatcaggataattcagaaacctactttgctgggtcaacaattggcacatcaagggttttgggccacaggtacatgtttgcaacttgatccttaatgagttcctgcagagaaaaccgcaatcattgatcacatcactaactagtgaagcaaaacttcctataacatctaagaaacataatgactgaagcaaacaccatacctatatccaaactactcatggatcaaaaaggaaaaatgtgaggaaagaaaacagtggacaaatcaatgagaatacaatttttaggcacaaacaagttaaaagtatggcacctggacaaatctgtaaaggccgggtattgacatcagatcagcccctgcaagctttaacccaaaatcaacatgcggctgataaaaatgacagaaaaagctgttagaagaagtatcttggcctttaatggtgctccaagaactaaatcaatccaattaaaaaatttaatgattaaaggtatttaaaattgcgaacttgtgagtcttgaattatg

SEQ ID NO: 214161 - DNA, 787 bp, Cannabis indica
aagaatagtgatgatgttgagttaaaaaaattcataaaattaagaattctttagaatagtctcacatagaaatcccttaagaaattatatcatcatgtatatagtatgagatttaattgatgtgtaatcagattatgagaaaacctaaaaaaaaactaaattggatgaaaaaaattccaatctctacattaagtcagattatgataattacaaatccttcttttcaaaacaaaggtgactcctctctattctaagtagccaataattacatgttctacaattccacattactactgtcatcttccctttgccaaagccctcataggcttctattatcattaaatttttaaagaaacagtaatgaagaatattttttacaaaatcctatactatagatatcaggcgacactacaatggaattttaactttgatcagtatttcaaaaagtgcagctattgaagttgtattggtagggaccaaatgaaacagtataactgaattcaacaactgaattcaaattcaaatacatgtgtgtaagtgggatataaatcttaaatatatgaattgcaaatataaagttttgtacatcaaatcctctctgaactcacctattattcttctctctattttttttgccattaatcaaaacattatcaattccaaaatgaaactttagacaatcatatttggcagcttaaaatttgtgaaataataataggaagaacactcctgttctacccctccttttactagcacctcccggggctaaattttcagccttagccat

SEQ ID NO: 214162 - DNA, 764 bp, Cannabis indica
ataattgcaatgtattcatttcagtatatccaaaccaaaaacaaaaaaacacaagtcaaacttggatatttaaataagaattatcagataaagggtgaccttagtttcaggatgatcaggtgctacgccggagcggactaatccaaaaggtgtgggcaagcggtcaacaatatcaacctgtgcttcttggtgtgctttcagcatctaatacccatatcagaaaattccaaaattaacacttttccttggtaaccaaacaggtatccacacaaagtgagacaagtataaataaagagagaagttaccttctcagccgtgtagaaaccagctggtccacttccaacaatacatacacgtagagggtgtgaagaaacagtggagaaggctctggaaagccatgaacttgctcgataaatcaccattctcaaggaaaaattcgacagttttcactttacatgggagatgctagggcttgcgattccaattcctgtctccgaattggaaaattattcttggattttggagggaggggaattagaatgcaacggacacaaaaacaaaattcaataggaatgagtgttactacaacatataagagcactcacagttataataggtaagagctaatgcttttaaactcgtagctattatcactcattcaaattataatatatttttctctatatttagccttgaaatagtggaggggtaaaatatattttataccttttttcttttttttctcttttattaaattaattaat

SEQ ID NO: 214163 - DNA, 881 bp, Cannabis indica
aggatattaagagtctctagcggactttctatccacacttatctggatagtaaagtcagtcgtacgtcattcaaataatgcaaagacacttgagattcgaacaaaaataagcgagcaaatgacacaacctcatgatgaggtgattcgagattagtgagcaaaaaataaccatctgaaatttttttgatgacaatgtctcacataaatcaaatgtaaaaatattaagtcatatgtaaaaatacggacgactctactcatcactaattagttttgagatagaaccccttatcacaaggtataggtaaacattttaaaaaaagaaaagtttaaaattgaaataaattattaagttctgtacaatttcatttatgaataatattatgtgtccagactaacttgtggtgcaaattaaaacttctaagcattcaaagcaagggaaggcagacccaaactaataattcaaatggagtatggccctccaatcagacatctctctccattattattattgttatcatgaatcagctttgaaccataaactctataattctttctttcaatcacaagaacaagataaaggttaattagcctatgaaataaatacataaaatcaaaaaggacttcacattattttggtttgaaactggcaactttaagtttgggtaagatcaataatgaggaaggagagcatagtaagtatatgaatgatatgaagggacataaagtaggaaggaaaaacaaagagcacttagaaagcactatatattatcccccttactacttttgtaagataacatatatatttcattgaattttatacaaaaagaagggggaaagataaatattaattttgtggtatagaatgattccaaaatagtggg

SEQ ID NO: 214164 - DNA, 866 bp, Cannabis indica
ctacaatccaatcaggacatcttcttcgttgaaaacatgaccaggattagaattagaaaaacaagcaaaatactcagtcacctaattctcaaatcgtttggcaaaaaactaaaaaataaaatcagataaaaaagattgcagcatcacagttagccttaagaatacttatattcagtttcatctaccgctcagaagacacaacagtagaaaatgtcgcagcaagttcattcaacctaatagcttgagcactcaactattgtgtaaggtacataattgcactactaacgaccccttcagttctagaatttgttattcccattaactaacaacgatttgatggcgagccatcgaagaacaaagaagaaccaacaacaaagtaaaatcatgtcatacagacaagattaaaacactcaaaatcatgtcacagagacaaaaataaaatactcaaaattatgtcaaagagacaagactaattacagtagcaaaaattgaattacaatagcaaaacacaaccccgaccaagctgcacctatgcccaaggttggcggacctggccaaagaaaaaagacaacctcttgtaactataaatttaaaaacaagaaactttattctttttttaatttagttaaatgtataaaaatattaaactatataaaaattaaaatattacacattatttattattcaatatagtatttattattcaaaacacaactttaaaatttataaaaaagaatactacaatactaaaaaatacaaacataaattaaaaattataatatattattaaaaagataaaaaaaataattaaacatgtccccattaaggcatggtgtcattccaattcccgcctcgtttaacattca

SEQ ID NO: 214165 - DNA, 1180 bp, Cannabis indica
cttagaaaaagaaaaaaaaaaactcataatataagctcttcctttttcttgagaaaattaatattaaacttccttaacaatgtgtttatgaggttaaaaagaaagttcttactagttcctatcattatttacacataatgatgtaaattagaaaatcagaatcataaatacagtatcccaaatatcttaactttggaacgactataattgtataaagttgtatcaatgaggcataagcatattctccattgaacttgaactcaaatatcatctgtatttgaacaacatttgaatctcatcaagactttttaaaatgcaataaatccagcaaattattgtaagtctttgtggtcatcaaaccatctttctgtctaaactcctcagcaagtttcaaagcttcatcacctttcccatctcgacacaacccttccaacaaagtcttataagtcaaaaaatcaggagacatagaacaacccaacatgtcaaaaacaacctcagttgcttcatcaaatcttctatccatagccaaactgcatataacaatcatgaaagtacttccactaggaaccaaccctttatccttcatttccttataaaatccaaaaccttgactaacccttcccttctcacataaccctttggtaatatagccataagtataagcatttggctcacatttatacaaccccactctcatgaaataccctaatggcttcatccaattcaagacattttgaataagccttgatgatcatgttcaacacaaaagcatcaggaatcacaccagaagctttcatttgcttcgtcaatgatctaacagctcttaagtaaacataacagacatttaacttgttgaaatcttctaagtaatgagttaaacaacatattgtaagtttcaagatttggcttacaatcttctgagtttatcattttcttatacacatcaaaagcacgattgaacaagaactttctattgcagcaaaatctaatcattgaattgtaaagaggcacactcatttcacaagctcctgccattacctcatccaccaaggtctctgcattgctgaatcgcttcccttcgattagaatcttgatcatggtaaggtaagtgaggtggttgtgcttgtaaccgcgctgttgggcagtccagcggaagatgtcgaaggcgagatctgggtcc

SEQ ID NO: 214166 - DNA, 1026 bp, Cannabis indica
ccatagcaaagtagtgacaaggaagaaaccaccactaagaaatggataaaatgttgttggcaacagcagcagagcagagtactacatagtaaaacgttctctccaatgctcactcaatataaataatctcaatttttcgattttatcgctacatacataccctttccttatcttctacatctacccacttacttaagtattattaaacagtcaactcatgcatgacccaattgctataataactttgcaataacaccatctaactcctgcctaattttcattattactaggcttaaatttgacaatcaaaataatggaaattccaagttttccttgtatctccacaacaagttttccttgaaaaactaactttagatcctcaaatttaaaggagaaaatataaaatatgcttgaaaaatataaatctatatatgaacccaatttaaaccactcagaaaagctaaagcttctagctgaaaaattgcaattccttttgaaaaaataaaaccagaattagtaacataaacaaacataaaaacaatatttttttttttaaaaaaaaaaaagacaaaaatagctaaaatgaatgagaatgatggttttaaactaatatatatattatatacatataaaatatgtatatatatatatatattttataacataaataaacttgcaaatgtgtaatttattagtagtagtataattcctttgaatgagaagttctaaagctaaatcttgtggaaaactagttgtcatctcgaaaggagtttcggaagactagcttattcatttagaagaagtctttaagaaaattaatcgtcctttaaaaataagttctgaaagacctttcaaaaaaaaaattcttggatagtttgtttcaattagctttgtgcttatctaacacgtccttttagaatacgcctcgtcagcttgtaacttacgtccaagaagcaggaatcagcatagtttatattcggagaactctttgccaaagttgatttgaaaatctcacttaaaaaaact

SEQ ID NO: 214167 - DNA, 635 bp, Cannabis indica
aacaaaaatacaattaaagtaaataatgcccataaatctattaccagaatgcaagagctttcacaaacaaaaaaactgcaatagaaattttaattagaatcaaataaatagctcaaagtaataaatcgcgcaaaataaaaatacaattaagaaattagaaattaagcttactatatatactttcaaaggaatagaccttaaagtagaagccaaagaatttgaaaatgtgtggaaaattttcacccaaacattatcgatgaaccctaatcaaaaacacaaattacaacgaaaaccatttccaatattacaaaaacaaaagattcttttttaaaaaaaatatttgtaattatatgaaataattagctttcttatgacaaaattacaatgatatatattattatttttttgtcatttttaattggagtttttacagcacatacttaaatttttaacatttttatttttttactgtgaggcgaaattatttttaaaaatactgtggtttttttttcaaaatattgtgttaattttccacggttattttttagttgttctactcttgttttaattgttctattttttttttgttttacgattgtaaaaaattccgtgtgacactaattaaaattgtaaac

SEQ ID NO: 214168 - DNA, 590 bp, Cannabis indica
agcagagaattcacttggatgcaacgacttacgagcaatgggaatagtactgtctaatggaccatgtaagggtctggtgagcttcccaaagtacacttgcttgtgtccgtctcttacactctatttccttccttgacacaaatgcctttttttgctctctcgtagaagtcttcaatgcaatcatatttccttttcaagaaattcctccataatctactcccagggtgtattccaacagctatgataaacttatgttcattgttggacatccttcctactttggcaacttcagcattaaagtgttgggtgtatctctttaagcattctttctccccttgctttatattggtgatactcgttacaggcacaatgtaatcactcgccgcttgatgctattgaaggaattcctcccaaaattatttctaggatgtaattgctcctagtccaaccctcttgaaccacttttatgtgatccatttaagtgtaaccacaaagcattagcaccttgccttgcatgatacatttttcatcttcattagctcattaaaagctcttataggtactttggatcacttgtaccatcatatggc

SEQ ID NO: 214169 - DNA, 688 bp, Cannabis indica
aaaaagaagtcatacgtgtacacatgtagattttttgtaatgttttgttaattaataggaaggaccgttaattggaaagaatcagagaagatctatcaaacgacttcgcattggatcagtttctcctcaacaaataagtgcttggatcagtttcgcattagaaacagatgttcaatagattcatcctctgtcccacaaagggggcatttaacatccgcaataggacatattttatagatcttagagcgaactaggattgccttggacaataagcaccaccaaaggatcttcagcctttctgagattttactatttcatggcttattccaaagtgaaggagcgacctcacaatgaggcgtcctatcaaaagcttgggcaagataagccaatttgctcgtgaactaaccattactttccaaagtccaaatctatctatcactgccctggccagacggagtacccctttcaagattgtagatacagtctcctagttaaacagactatttaacttaggaatattccaaccactattatcagatagaagctcggcagctttgttcccccaaaagtggagaacccttagacgagggcaaaatcttttctatgggcaatgcaagggtcttcctaaataaaacttaatcctttccatcccactaatttacaggcccctttcgttaagatagatttt

SEQ ID NO: 214170 - DNA, 796 bp, Cannabis indica
ctcctctttggcattctcatcctatagtttgcatcaactatgatgcctccctttcccaaactagtgttggttttggtcttgacattgctcctcataactatgttggtcatgtgcttcgtgttgaagttatctactgccctgagcgcactacagtggagattgttgaagctgttattgttcgtaaggttgttcagctggtgaccaagcttgattttaccaagtttgagcaccattctgattgtaaaactattaagtaggctctcatgcaacaagaggattgttacaaaagactattaaactaaaagattttttcagcaatttccattttgttccttttgttcatcacacttctaactgttaggtctatattttttttatgcattttcagagtctattttaatgtgtatttttaacaatttattgttttattattcgaatttatgcttggtatttatttttaagtgttttcaggtgaaaaattgagagttctttgtttttgtttattttggtatctttcgagtcattttatgatgaaaatgatcaaatattgaaaaagagaatttcgacatataaagtaatgtttaggtacgattcctggtgcttaaaaatttaaaattcgtaattttcaactccaaaagtcgcggcccaaagtcaagagttaggctttctacaagaaaaataaagaaatggtaaaagtaaaaaaaactaacaatgaaagtcgcgacatagcagagaatgtcgcgacattcactgatttgctggtagaaaataaaaaaaaggaaaaaaaaacgtaacg

SEQ ID NO: 214171 - DNA, 562 bp, Cannabis indica
tcacttttttttttttggtagaaaccaattaatttttgacaactctcaataacttattcattaaaaaataaagtatttttttttaaaaaataataataaaagttaaagattttactttactcatagattggtaataaattaactttttttttttatttattattattctcctttttcttctttggttagtcttcttcttcttcttccattctcctcacttttaattgttaataaaaataaaaaataaaaaatgtttttgaagaacaaaagatgataataaaaatgtttgaaactgtactttattgaaagtatacaaagatcaatattttaacaactcacaaagtttgatcatcaatcatcaaagactgaacttttaaaaagcaaaatgtactaaatattagtttgcttcaaatgagagcaaccttcttcttctccttcttttctatatattttcaattaaataagaaaaaaaatttagaatatatattatcaaatatttatatttattagggagctcatgccccttacactatataaacacttttttatttttttttatttt

SEQ ID NO: 214172 - DNA, 1005 bp, Cannabis indica
gtttaaatttctcgcgcttatctatctagtaattccggattaggggattatggtttctttattggttagcgtagcgtgcctaattgttagggcgttacactaagtgttctaacaattaacatgtctcgcttacttttcttcatacgtatcgaggttagtgcctcgttttgtacttttgacgttaaatggtttctcgtcaatgcgcgagacaatagtttgtatatccttgtcttgcttaagactttacagttagcaagatgtaaatatactctaccagctttgcatttaattagttattcccttttaatatcgtttaatataattactattatatttgttgattcgtattctctcgagttgacacgtgtccttttctaaagtgccagtcaaattttgggtataacaataatcattttgcacaaagtattgggctttaatgagtccattgactttgatgaaacatctttcatgtactttatctcaattttgataactagcccaaaatgtacatttaagttcctacaaaaataaataatattgagaataatatttttaacttgggaaactaaataaaattgataaagtattacaaaaattaactaaaattaatctaaaaatactaaaactaatatgtatacaaaattaagtaaaactaattaaaaagtcactaaaataaactaaaaatgcttgagaacaaaactaatttaatggacaaaaagagctaaataactctattttcatagagttatcatttatggtgtcaataacctccccaaaagaataatatgggtcatcctcccaaacataatcctgatcctcaaactgttaagaggaacattaagagaaacaagcagaaggcaagagaagtaagttcaagtcaaccagccccaaatgcatagtagctattggactttcattttgtcatgattttgaattcagcgaattttttgatataaaaggaccttaaaagtggatgtattaaaccatatttttaatgaatctttg

SEQ ID NO: 214173 - DNA, 533 bp, Cannabis indica
gcgccattaatgttatctggtaatattatgaattcaattgtattcttatgtgcgaatttgagagtcttgatctcttaaattatgggagaattttcaaataaaactgattttggtatccaacctctttcatattattattgtatttacactacgtacatcttcattttatttttttttctatctttatttgtaaataaatcccgatgcacaatattacataaaataatattaatttaaaattatcttattaaaatcacaaaacaaaatcataaattgtggaacagaaaaaatagctaggagggtagagagccacttaaattctttttcgttgttttcagtcaacatttacatatagagagccatcatatattttagttaaaatattaaaaccagatctaatatatttctactcatagtgatttttttccagcacagacgatcatgattatttttattttagtttgggaaatggaacggatagtgatgattcgtaaatcaaatcaaagaacatattacaacatgattaatgactt

SEQ ID NO: 214174 - DNA, 1224 bp, Cannabis indica
atatattaattataaatttttacatttaattaattaaaattattattgttatatttaatagtattaatatataatatattaaattattattataatttttataatatataaaatctagaattaaaagattatatattattaatttttttaaaaaaaaaaaaaactatataatggtctttttgtggattactaaatctataaaataatgataaagaattataaaataacaaaaaaaaaaaagataaagtgacgctttttgtgtgttgttgttacttagtaagtgagtgtgttagaattttgggtataagatgaatgaggttctatctccaaaaccaattggcaatgtgaggagtagctcattcttcttatatattctattatctttccacatattagcaatgtgggactctctaacagagtgtaaaagggtttagtgacacacatgaagggtcactaaaaactgtttttccaatcatcctcattagtaacgtgtaatgaagtgtcattatagagttttaaagtcacttaacataggttactaaaacttgtttttctagtagtgcttgcacaattatcacaatttttttttttacacagaaacagtaaaacactagcttgctagactcaacttcttcacataataaaattctctctaaaaatttgaaaaaaaaaaataaaaataataaacaagagagatgatcagaaaccaatgacataagaatgtctatatacaccctagagacgttttagatagtagaaaagagaaaggagacaatcaagaagtaagtgtaaaatattccttaaaatgatcgttcataacatgttctaataaatagtaaattcgttaaagtaaatttaatgaacctaaatattttttaaacgaagttttttgaaaataaataaaaatttcatttactacaacgatatccacacagttctagacagtacaagaaattaaaatatggctaattagtaattttttaccttaaactttaacatgtagtaaatcgtgtccctgaacttttttgaccgttaaaaattcccccgaactattgagattgttaaatttatggacttttgtctaattttattcaattttattgtttcagtgattgtttatgtactaaactatgctccccatattttgatatctaccaaatcatacccctcaaactttgatatatatttactaaatcatgcgctttgaactttcatctatgttag

SEQ ID NO: 214175 - DNA, 420 bp, Cannabis indica
  modified_base (302)..(302): a, c, t, g, unknown or other
gaaaaagaaaaatgcaaaagattacgttttgaggtggtaaaatctcgacataacaatgcttcttttgcctgaccactccatccctgccaggacattcatcatttcaatatcaacgattaaaaaaaaaaaaaaaaaaatcattccatggtttgatttctccataacattcaaaactaaaactttcaaacatacagaaattggaaatagacagtcatacatgttcttgtgctcttgaattacgaaacgagtcggcaaacgaccgcaaacggatcttcgttactgtaaaaaaaaaaaaaaaaccncacacacacagtataagttacttctgacgacgaggatcaagtacacggatgtaatagtaagtcgatacggcatacttacaaagttctgtacatgatgatactgtaacttccttcagta

SEQ ID NO: 214176 - DNA, 596 bp, Cannabis indica
caagtacaaagaacatgccctgtgtgtaatatggatgatgaaaccgagtttcatgctctggtttcatgtccttttgctgctcagtgttggcaggtggtgcttctggtttttctgctgcaaatatcactgactttacaacctggtttgatcggatttgtgcttctttcagcagtgaaaaacggggtgagattgccatgatttgttggtctttatggggggcgaggaacgatctggtttggcaaggtaaaagacgcacggtggcaagtgttgtgtctgcagtttcttagtattttgtgcaatggaagaatgctcaagataagtcgaacattgctcattatccctcaaatattacaggtgatggggcggtttcttgggttaagcctattgagaatgtactcaaaatctcagttgatgcagcaacttttgaccacagttcatcatatggtttcgggttggtggcaagggatcaccacgggtacttggtggaggccaaaacagtctaccgtaggggtacaatggcaccagacatggctaaagctttagccattaaagaggcgtcaagttggatcaaggaacatgaatgacataaagttgaa

SEQ ID NO: 214177 - DNA, 775 bp, Cannabis indica
aggacgacatcatacttattaatttgaatttggtattttattacattttagtataatttttccaataatatgtatcagaaaatgaatccaaacaaaaccttgcgtctcagttcatatcaaagactcccataaataaattaacaatcttatttgatgagaaaattgtgaagatattatactgttttttttttctttttaaaatatagggtgattctaatccccttaaaagggatgtactgatgcacccttaacttgtttcggtatccagaaaaaagtttttagtctaattttttttcatattcatgtacgttatagctatttaagatatcctacaaaattttgaaaaattcggaataatttacaatatagaaaacaatgttcaaacagtctattttacacgcgtataaaataaaatagtcacgcgtgcaacacactgtttgaacataattttcggcgtgttaaactttttcaaatttcttaaaattttgcaggatgtcttaaataactataacgtacatgaccatgagaaaaaatttgactaaaaaattatttcagatgctaaaatagataggggtgcatcaatatatccattttaagggggtgcattgtagaattttcctaaaatatatagcaataaaaaaaattataaaaatatgatatttgtactatatatttagtaacttttacaagattgtaacattaaaaaaaaaatattgtaattactatgattttgccattatattttacactttttttttctttcgggtttgttaat

SEQ ID NO: 214178 - DNA, 493 bp, Cannabis indica
ttaattgatctgtcacaattagattagtttaatacactataggtcaccttttttaactgaagatattgattctttgaaatacggtatttatacttttaataacttttcctcgaaaaaaatacctttacatttcaaaaaagcttctctctaactttctcactctctcactctacggtattgaacccgacctagaacccccactgtcaaacccagacgcagaaccccacgtcacaagcccccacttgtcgtcttctctcacgatctctctctctctaagtctcatcgtctccgtcccgaaaccccaaaacttatgagctctatgataagtctaaaagttaagaattattttacctacatttataagttaaagtttgtttagttattaagtttttaatttatttttgttatttattagctttattttaagtttataaggtttatgtgttttttaatttatttattgtaatatgttatgtattatttatttataaat

SEQ ID NO: 214179 - DNA, 821 bp, Cannabis indica
tccatacatccgatactggtaaactttgccattgccctagaaaggacataacacttatccaaggtgtaagtatacctatcgctgattatcatgccagtctaaatccagtgaactgacaaatcagggaattaaacttttgaacatatataatcatgattatattccactgtgctgacaacactataatcatgaacaaatacatatgttctagacctaatagaatttataatcatgaaataaatcatgtgaaccatgcaacataaaatgatttctgatctttattaattagtaaatctgattatattgaaatgagttttatttagggcacaaaacccaacaggtagttaccgattgtcaagtcctcgcataaaaataagcaagaaagctaatgatcgattgaccttgatggatttggtgtggaagatcatagactctttatcccactttcctaatacctcggttcattttatcccaagggaaaggaacaagttaacacataatttggcccaggctgcattaggaactgataaagagtgtctttggaacaattgtgctccatctcctccttagaccttataaccggggtgttgtttgctttttctttgttataggtcttgttagtttttttaaaaaaaaaaactaaataacataactcaaaaaaaaaaaccaaataacatatataaattaactacatagaatatatctaagggctatgacctctatatgtcataccatacggtccgtacctctgcccttagtacacttattttagacgtgcactagagaagcacgctcctataatatattgctatataaaatta

SEQ ID NO: 214180 - DNA, 652 bp, Cannabis indica
taggaccattgctattgggcaccccatggtgtttagcgccacttaagaactactatttaaaagttattatatatgagatctgatacttaattacactaataacaatatgacaccgaagaaggtactatgcactctactggtgccatttatcattcctcatcatgacagccaagtgaagaaccaacttattacactttctctctcaattacactaatgcattaataattaattaaaaaaattaatgacaaatttatttattcgattaaaaaatgtagatattaaacttaatccttttaaaaaaaaaaaaaaaacttaatccttttaaaaaaaaaatatacaaaaaatttaattaatgatcaatttattatttcagttaaaaaaacaatgtagaatagattttaattatgtgaataattagtcttaaaataagacaataaacactcctaataattttgtaacgtaatctattataaaaaaaatgtaaaatgcaagattaattagtaaaaagataaaaacatactttaaagttatagtataataatatattaataaataacaaaacaaaatattatattcaaatcaaatgttgtaccaaatgtcaattaggcacagagaatttagcaataattaagaattgtcttaaaaaatatg

SEQ ID NO: 214181 - DNA, 796 bp, Cannabis indica
ttacatgtcaagggcataagaagataaccatgattaaagaccacctggtcatcacacaattcatgatcaaaagaaataggattaaacaatagtaatgttcaaaaaatgagtgtgtatatgctaagagtacgaacatgaagtccctggggctgaaaatacgtaagtgttcaaaaattaaaaggcccataggccatacagaacatgaaaacactgtttatagtataaaacgataatgctaaaaactaataagatgaatctacatgtgtctaggtgcttgtggggttgaatcgaaagctacaaagtttggatccttagagtgtgggctggacagccacctgatcaaaatcctgtctgaccccatcctcaaaaaatgggctagccatttcctcatcatagtgccccgaagatgacccttttggctggatggtggtcaagtctacttcaaattagctctgaaacaacacttttcctttggccaatgtactctccaggaaagtcatgtcacccatgtaagaacgattagcattggagttgtacagcttcaactcataaaggtcggtcagagctatgctaaattgttgacccttgctggccattcctaggtacgggagcttgccgtggctagaaaggcctacacctggtcgttgtgcttggccggccaggcctacattggatagagtctggccggcaagttttccgtttcgtggccatttaaacgtaaaaagggtagggtttggccgacttgcaatgctcctatggctggcaaaacctagagaagcaaggtctggcacccatg

SEQ ID NO: 214182 - DNA, 773 bp, Cannabis indica
ctgttccattcatgtcatcaacttgtttccatggtggagtaggggaagtgattttgtgcaataatactttagtagtttatttatctatctcatttttatttttttgaaagagtgatgtgagaagatgaaaatcaaggttaggattattggaaagtaatgaactttttcatgtatcactcactcttcaaactttgacatatctaggttggagatcttgagaggccccttgtctcagatgttgcagatcagacaccaaatccaagtaacgaattgccaagagattatgacctagagggagcatgttaccagaacgaaggacatttccgctctcctcgaacatatggacttgttcacaagtcaagggtgaccactacagctcccaatttggttcaaggtatcgatgcttgaaataatggtcatgctaattttattttgattccttttcttcctttcttttttattccaaactaatattttgcttgtctcaggtgatagcttggttctagatgtaatttctgaccattctgaagatgtttcgattggccagactcttaaacgtccaattttgaaacatcagttgttggctgaaaagagccctgttaaagagagtttagagcatgaaatttttccagaacatgtctcaaaggatgttactgatcaaagtaattgacttctctctttattgcattaggatgttaatgttctaatcatttcagctggttgtttgcctgaaaatatgtgtaatatctgtctgtttaatgtgcagttagctg

SEQ ID NO: 214183 - DNA, 502 bp, Cannabis indica
ttaattatatattttatttattacttgggaagaaaaccaaaaccaaaagaaaaacagaacaaaaaaaaagaagttacaaataagacttttatgtctctctgtcttatgacttaattaacagaattaattaattaattaattaattaagcagtagctccaacaggaacagctcccttaagccttgaagatccatatagagtttcctcaaacctaataatctcatttttggaaccataagcaacttgagttctatcatcaagattgttaatcactttgtcaagcacagattgatgcccatcactactgtgacctccagccttttcaaccaagaaccctaatggtgctacctcaaacaatagcctcaatttggctttggctgttggagatatcacatttgtgaaaatacccttctccttcacaataatctataacataattgattgtgtcaataacaaattcaaaatatacattgttaattatagtagccataatatcaattttt

SEQ ID NO: 214184 - DNA, 809 bp, Cannabis indica
acttgtaataaatatacatatttttttaataatttttaaaagtagtaaaaaggtaaaacgacatatgtaacaatttgttcaccaatccaagtacataaactttcatacaaaaatacaatcaaagtttactaatcatccatatcctctttggtgaaggtttttgaaaccatattgttccatataaataataatggtacgtatgccaataataatactaaattgattgttgtgtcaaactagaataatagaggaaaaaatggatgcatgcattgagaatattcatcatgccaataaaaaatcatagcaattgagtgaatgatcaaaactgagtttcatattaaaatgaagattaaggatccaaatgatcgagagcaaagattatttctaaacaatcttaataatcttaatgtaagactctatttaataataacctcgataattagttatacattttataaatctgatattaaaaaaatatagaataattatatcttcataatatatatatatatatatatataatttataaatttattatataaattatatttattcaatatgtctttttttctttcttatattggttcattcacttttgaaaggccattaacaagtagtgatcaaagggtgagctagacaattgtctattattgttactttgagagatccaatgatgacaatttattaattagattacaagacctcaaaagctggactctcactcatagcactgagaatttggatcacaaaaactagtagaatttaatttgtgttattaaaatgaatataaagtgaaatagctcaattct

SEQ ID NO: 214185 - DNA, 927 bp, Cannabis indica
taattttttgcagctggagtgcctaatataagcatggttcagggtgtgcacagtgagaaggtaagaagatatattattcaatagttttttttttcttttgacatgcattgaatagctattctagatggattaaaaagaggataatctttggtctttaagcttcaattgatttctttatacaaatgtactttctaatgtattcaacaaacaagtacactcacaactaccgtattttgacatttatttataatctttagattgcaaatcatcttgacaatgcagtgtcaagcctatcaatgaatcctttgaaggttttagtccaagtgaataccagtggagaaccatgtgagtaaagattataatttctccatatttgtattttttgaaatgttgatgacttaggactctgtcaagattagctccataattccatacagcccaagaattgtagcagatggagtaaatccacaaaatctgaggttcgggtcccaactgggcatttgcatagtaattgctataattccttagtctctaaatattttaaggtttagcaagaatgttagtttcaagaaagaaagagagattagtgccattgaactgcatctttttgccataacataaagtgcaactcagcacctggaactttgagtttgaagaaatattaaatgatgcctagtctaagtttggtatcattttgtagcatctacaaaatattggtcattatatttctatggctttttgaatattaagtctataaaaggttagggtgactgtcgcaaagaaagccatgtatgtggttgatgccaccttttcctttttgaccacagctatggaaatctcataaaaattcatgaagccacattgatgtccattgaaacaattaagaaacagtctattgcaaccatcaaaatctcaaatttttgtgga

SEQ ID NO: 214186 - DNA, 549 bp, Cannabis indica
aatgcccaactttgccttcctcacgccttcttgaaaagttgtgttttgcttctttagaagatcgaagtcttcgagacccacgatagaagcccgggagtacacgatcatgaattgcaaggccatttcgaccaagcaagacattatgtcctcgaaaggagctccctcaactttttcaacaaagtcatcactcataaacttttcctgcagggtcacgagctttggtcgcaggatccatcacgaccttgttccctttatcttgggaaatctttcggtgattcttcgatgagtcaaccatcagagtgttggtggcacaacagaaggagttgtagcattaaccttttgtttgtagttgaggggtagagcttgctttaaaaaagtcatatatgtgaaaaggtatgaataagtaaaaatttaagaaactaaggaaagcagaaagacattattagtaatcgttaagtcgcatcacctgacacttgtctcagtctgcttcgagagatgtctatctattctttcttttatttcatagaaggttccttatatatcggttct

SEQ ID NO: 214187 - DNA, 1246 bp, Cannabis indica
aaaacatatttaaatccttcctccagagccaatgagacagctgaacaacaagccgccgcttctccgcataaagcatccacaaaatctaactgagctgtatgaatgtgaatcacagtcccttgatggtttctggcaaccaccgctatgcacatattttccaagccaaccctgacatcacaatttaatttgatccactccagaggaggaggcctccaggtcccctccaatgatgggggtggggaaggccagacaatatcatgaagctctgcataagaagtacaaatcaggtcaatacatttcaatatattagggcgaatgttgtcatgtaaaagctcattacggatcctccagatagtttcaacaaccaacgaggcatacaaaaaaacttcctccactcgaatccccctatgattaagattccagatgaatttgacccagtcccaaactcgaatccctgcttcacatataggatatatgccccatggtgaggaacgccaaaaatgcattgccacatcacaggacaagaaaaggtgttccatagattcctcccctaaaccgcataaagggcaattggtatcctcaatgtggaaccttcttccaagtacagctctagtagggagcgcattagagagaatgcaccaccaaaggatcttatgcctctccagaattttgctattccataacttgttccagagcgcaggagcaaccgtacaatgttgagctctctccaaggcttgggacagataagccgatttacaagtaaattgtccttttttctccagagtccaaacccatctatccatccccagacccgacggtttgccacctttgacgattgcagacacggtttccttctcaaaaagattagttagtttttggatgtcccagtctccattgtcgagcaaaaggtcagccacacagttatcattggttaagatcccacttctaggtttcgggataaaacctttaaggtgaggaatccaaggatccctccaaattttagtcgtccttccattagtcacagttttacaagccccttttaataaaatagattttgctttcactacgtttttccagaaccaagaatccgagtccttgtagcaacaactgagaaaatccttccccttaagatatttggcttccaatattttgcaacataaggaatgagatctatttaacaaattccatccccacttggccaagaacgccagattcatctcccccgttttccgaaagcctaaaccac

SEQ ID NO: 214188 - DNA, 772 bp, Cannabis indica
accgagcataaaatatgaaaaacctaatatttcacatataacgtacataatacacttaaaatttaaatatatctccataaatgtgataataataattaaaagcctatttctaacaataaaccttaattatctactaatttccattataaagttcggtcattacagtaaatcctaaggctttttaagtctcatcataataatattgacttctggactaaggctagttaacgccccaaccatgtaaaaactctattgtttcttttttattttcgaacaattcctttagcttttatacatattttatcggtttctaaaaatctcagtaaacacatgtatatccattggttaaattcaggtttatctaatattttaaacctagtattaattggatcagatcagatccatccaatattttagatccagtatctattggattgaactgaatccatccaatccaaaataaaggtaaaatttaatattaattttcatatatacatatatttttctacgtataacaacataaaatctaattactcattcaaactaaatgaaaatataattagttcgattggatattggatgtattggattttcaaacactccatccaacatatgatctgatccaattgaatattcaaaaataaaaaccaatccgatctgatcatagttgtatatccaatgtttggcggtcggttgtaattggatcgatcggttgtcattggattagatcgatttatacacaccactactagcaaccgtttattaaagattt

SEQ ID NO: 214189 - DNA, 873 bp, Cannabis indica
aaatctctataagaacataattcataattaatattgtaatttcataagtaagccttagttattagctaacttcaaattaaagttaagcggtctttacatagactatgtctttatttatgaattttcacttagcaacggcttaattgtgaagaaaattggttttagggtttatttgttaattatgagactttattaattataattaataaataaataattttgacatttaaaggattgaaattagaaaggataaataccattttagaccctgtgttttgcaaaagttatcgattcgaccctctattttgttaaatgataaaatagaccctgtactttccaaaatggtaaaaccctgagcttaatttttgacaactctttttttaacataaacaatttgaagaaaattcctaatacgaatagatacagaaaatgtaaacagttttgtcataacacctttagatcagattattattaaattttatttggacaaaaaatcagttcagggctctatttgtactattttggaaaatacgtggtccattttgtcatttaacaaaacagatggtccaattggtaacttttgtaaaaaacaaggtccaaaataataattatccaattacaaaatatagcattagtgaaagaaaagataaattgttaaattaaatagtaaaatcgtaactactgaagctcacatctgatggccggccacttgaggagaaatttagctatttatttatattttttaattgtatataattgaaacctaaacctagaggaattgctataaatatactgatagctcttaacctaaaatgagacaatgataacataagtctctcagtcaaatttttcaaattaagaaagagccatctc

SEQ ID NO: 214190 - DNA, 568 bp, Cannabis indica
cgctcaagcacacagtcccccatcaatcaacagagacaaagaaagacttttttcttttttttagcagatttgtatgatcaagcagagttcttactgaagcaaccacatttacagcagtacggctccttgttgccaaataaagcgttataggcacgccaaattgaccagctaacaatcgcggcttcatccatgtctttctgccttccacggctgaacataaccagtaaccactagtgttgcccacgtctaccatagttttatgccagtacgcacgagcaaaatcataccccaccaaagcatggtagatcgttttatctgaagcgttacacaaaggacatatataattaacaggaacatgcctgttcttcagctaaaaataagtaggaagcaaacccgaaactgccctccataaaaattactgacttttggtgaccttcaaattccacaactcattccgaaaattcgaaccaccatcttaggccaggcccctttcatttcttgtaaaatctcattccatattttagtacatataaatataagaattgttataacaccacacaaataattt

SEQ ID NO: 214191 - DNA, 657 bp, Cannabis indica
ttttattatttttttattttactgtactaactttttaaaaataatgtgttaagtttcaaaattataaaaatattgtgttccagtaaaataaaaaaataattcaaaaataaccttagaacaacttaacaaacaacatgaaaataactataaaaaaacaaaaatatatataactacaaagaaataggaaaataacaaaatattgatctaattgcaataaacaaaataatatcatctcctccatatatatttgtactatgaatttttttttacttagttttgacaatttgatttatatttttgtactattacattgtttttttttttttttcatgaaatttgttgttacaactttgttctttcatttttttttttgagttagtgatagttaaaaataactataaattgaaaaacaaaataaaataataaaacaaatgcacatatatacaataaaaatattgtctgaaatgaactaataatatacacgataaaaaatgcacataaactaagcagtaactgtacaaaacaatacataaaaataacaagaaaaaataactataaaacaccaaaacaacaatataaaaataactataaaataacaaaaagacaactataaattaatagaaataacaagacaacaatcttgttaaaatatgcaaa

SEQ ID NO: 214192 - DNA, 1762 bp, Cannabis indica
gtttattttgtgtaccatatatgtacctcattccttcattacattccttcaaagtttggttattaactctcaactttatgaccacattaggaaatttgcctataattcaatcaagacaaaagtgtatcattatgctgcatgaagacctatttgttgtcttcattgaacatatatatatatatatataatttttttctacctcaaatttctctttaattaatatataaaaaagctcatcttttttcttcttttcttctaaggtggcttggaaagtcataaagatttgtactttataataagaaaattagtaatatatgatgataataatgatgttttgggttatgcttgttcatgtatctggaaactctagcttgtgaatatagaacaaacttagattaaatatgattagtgaaaaacatataaaaagtgcatattatgttaccctttaaggtcaatgagaataaatatgtataatttttacttttttttaatgttgccgaccacaagagaaagatgaaaaaaattgaattacatgtgtaaggctcaaagggtttttggtgaatagcacgtggaatacatttgagagacaagttgtaaaggtgtttaaagaagactagtggtttagataagccaaaggcataagcttggaggaacacaatcctattcatgcaaaaaaaaaactttaataatcatatataaatataacttttctctctttcttttagtaaacatttttaatgcctttatccaatccacaattgacaacattatgctcaagctcactaaaacttgatcatgatcacctatttttttcaactcatttcaataaaactcttaaaataatagaagtggaagcacatgaaaaaaacttttctcatgtttgatgcccaataattcatttactaatttagactagagcatctataatatgtacttagaatggttcaaatattgatcaatattttatcccaaatttattattatataaataaatataatatatataaatgtatatgacccaaaaactccatcctcctttccttactcttctcttccaataagcatagtacttataggacccataattgttttaatacaaaaaaaaaaagaaaaaaaaatccaaccaaagagggacaaactatccttgtcagcaaaaattatagtaatctaacacacattgttctgtcctcaaatcattggtccgtgagtttcacgcgttgatagtttatgatgaaaatgatagagcaatagaagagaaggagattccataacacattatgttttaattaaggattaaaaatgttaattaccgcacttaagttgcatgctaatctatgctttcatttcatttaattttttccaagatacttaaatgcaaagacaaaaaaaaatacaactttaattagcttttaaaggatcaagaaggttccattttttctatgctaacctctaataaacatatgacatctctctaatgacacaacaaatatcaaagctttttttcaagtactaaaacataaagatttattatacaaaatgtagagtatagactaatcattatcattgattgaggccactatatatctcaaaggaaaaaagaaaagggttttgaggccataataatgtgccatttggttccaaataaagttacatattcttgaagttgattttaaaatgaagagaagggatatatacaattatatgagataataatcacttaatcatgttttagtgtccaactggattaagcttcttggtgcac

SEQ ID NO: 214193 - DNA, 630 bp, Cannabis indica
atgtctactattgtattaggtgtccaattttattatttattaagtatacaatttcaaatttcccaattttaaatacggaatgctttgtgcatgtcagcctgaatgaatgttggagacaaaaaacattacataatacgccaaaactttgaaaaaaaaattacaaaaatacgttaacatagaaaaatttttatttttatggtttgaactaagggtgtttataaaatagtcgattcaatccaatccacaaagtgtggatatccatacgttcgaattaaattgaattgaatttaaaaatctaaaatccgcacttgtacaaattaaatgttatttcacatacaaaaataatcgatccaatcaaatttacttatttatatttatttaaaaaaattataaatatattagtatattttaaaataattaaaaaacctaataatgttgtacacataatttttaaaacttaatatatcaaatgaatagtgcagattaaatcggataaatatctcttgtttaaactttttatatacaaaaatgcaataaactagttgatattgttttttaattattttatcatttatttatagttaatttataattgacataaaattgattatattattatcttttttttat

SEQ ID NO: 214194 - DNA, 328 bp, Cannabis indica
gaactaagtcaaagatgtttttttgcaaaattgtgattggaaataaatggcaatctttttttttagctaattgaaaaatgtgacaatgctgattgtaaaaaaaaatagagttagatggaagtggtgattggttgaaattccttcaactcatcccaaagggatttcattttggtgaagaaggaggaaaccgattgttcaccttgttgtaatcgggtaagttgtgtttgtagctaaaagattcgagggccatttccttcattgaatctttcagcaagatcattccacatatcggtggctaaatcaaagtacatgatactttgggcgattt

SEQ ID NO: 214195 - DNA, 767 bp, Cannabis indica
tttttttttattttagtttagttattttctacttaattttaaaaatgttatatgtgtttccagacgagtgatacgtggcaataaaagagaaatacagcctcgagcggtcactaattagatcaggttaaggagaaggcttgcgaatccaagaacagatcaacgcccaaaagctatgtgaagatttcgtcctacagcaccttgccatctagaaattcgaaagtcttactatccctccagaatccacagaaaactaggcttaaggtatgtccaagagacactcggaaggctactcaaagggcctatcacagacattgactacccaaaaaaagtcgtacgtctacagtctaccaccaagagagactcggattgactcaacgacgattatacctttgtctaatataagatcaaatcttgtcccctatgtcagactatggtagtgtgtacgtcccacctcttaatacctttttgcttgacgatttgtctaggcattttttttttcaaggagaaattttttggcgacacgtgtccaataccaattgtgatcccctattgcccaactgcttctacgcacgggcaaaaactttattgggggcccaacaatcagattattaaatgcattttaccctaatagtgggcttttttgctaaaagcccaaagtgggtcatgagcatgtccatacctgaaaatttagccctataaatactacctttgatttatatacaaaggggtagatcaaaaaaggagatagccgaagctctacgaaattt

SEQ ID NO: 214196 - DNA, 713 bp, Cannabis indica
cacccttcaaaaatgagtctctcacatcgttgttatttttggatatctacaccttatagtttgggctacttacaaggaaaaaaaaaggggtaaattgaaaagtatctctttcatttattaattaattaaatttacttctaatttatacttaattaaaacatacctctttttatatgtactgtacttaaaatactctaagataagtcacatagagagtattttaaaatgttaagagcaaaattagtacaatattttaataaagaggtaaaaatgatggactttaaaaaataagataaaaataaaagacaacaatataaaagaggtacagaatctaatttcctcgaaaaaaaaagtagttttgatatgcatataaagttgattgtactaaatatgatattaaaaaataataaaaaaaaaatcttaaaactatgagataaatctactataaaaaaactaaaaaatttaatgtaaattttacttttatataaccaaaactaattttttgatgaagagttagtttcttgatgaattaatttttcgtataaaaaacaggttttcatagataaaaaggaatatcattaaaaaaaataattaggctaattagcaatttttttactccgaactttgacatatattaaattatgtctcctgaactttgttagattttaaggactttttataaaaatcttctttaattattataaaacacatat

SEQ ID NO: 214197 - DNA, 739 bp, Cannabis indica
  modified_base (499)..(499): a, c, t, g, unknown or other
  modified_base (520)..(520): a, c, t, g, unknown or other
  modified_base (528)..(528): a, c, t, g, unknown or other
aaaaaaaaaaaattatttggatagtatttatgtatttatttattggctaattagcaattttttccttcgaactttgacatatactaaattatgcctcctaaacttttttggccgttaaaaattccctttgaattattaagattgttaaatttaaggacttttatccaattttagtaaaaaaattctaacatagatgaaagttcaaggagcatgatttaatatatataaaagtttgaggggcatgatttagtagatatcaaagtctagggagcatgatttagtatctgaaacagtaaaattgaatgaaattagacaaaagtctttaaatttaacaatctcaatagtttaaggggaatttttaacggccaaaaaaattcagagggcatgatttggtatatgtcaaagttcaggggaaaaattactaattagtcttatttatttactaggcggcaactacatgcaaggcacgttgtattttctttttagttttttttttttnttttttgctaattttttttanctaaaatntttaatgtaataatagaaatattatttaaatttattgaaaaaattgaagataagatgtttaacccattttaaaaaatattacataggtataagttttttattataatttttaaaatattaattatatgtaaatttataatttaagataaaaatttagcaattttcttcttgttttgtttattcaataaaatatatattaaaattcttatat

SEQ ID NO: 214198 - DNA, 543 bp, Cannabis indica
attattcataatttatatagatgtgtagaactcagtgaaaacactaataatatatgtttgcttaactattatttatgtggaactcacctaaaatcactctaattttttatgtatgtgttgcatatttattaacaataataatgcatatttgcttattatctatttaattttactaatataaaattgtaatcatttttatgaattaaaatatagaaataattttagatttcattgcaagcattaatttgacaaataagaatttaataaaatctaaattatctaacataaattaatattttttatgcaccattaaaaaagtcttatagaagtaattttatttactatccagagatttgggattcaaatttaactcgtgagtatgggactttgcgattagccaaccctaatagaacagggattccctgcctaaatgtgaaatgaggtggggacaaagataattttctgttctcgaatattaaactacgcggggatggggatagcacccctgccctaacgaggaccagtttaattttttatttactt

SEQ ID NO: 214199 - DNA, 655 bp, Cannabis indica
ctaggctttgggtgcttattttaaagcttctagaatgtcgttttgatactttcaaggttcaaaaacttgtggacaagttttccaaccccgtttttaaccatttcaaagagaatgcttggagcataattgaaatttaagtgatcaaaactagcgtactaggttgattgtcaacctgggcgctgggcccagtagtaggtcaatttgggtgctaggctcaattttgaagcccttttaattgtcattttctccccaagtttacttgtatcttaattacttcttatgatagaaaaaatgctcagaacacttttttcgaaaactggttgaaaatagcccaagttgacaatatgttaacctaggcgttgggtccatttaaaggctactcggaagttccatttagtccttaaaaaaaagttgaatattgatctttgatgaaaacatagaatatgttaggaagactttttagaaaaactccttagaactaatcccaggttgacaaaatatcaacttgggcattgggcgagcaccaggtgtcaacctaggggctggtcccttgttttgacacctatgttaggctatttcttcctcgagagcacttgttttcatttttgatgaagacgaagaagttgcgtgagtcaaatttttgatcttgtaagga

SEQ ID NO: 214200 - DNA, 606 bp, Cannabis indica
cttgttttctcaactctggaccctttttccagggggagtggagattggtacttgtgattaactttggattaaatgttagcttgttatttcagttttatgttgtgtttctcagggggagttttgtttaatatggctaattttgttttgcaagtacttctttgttaaaaattatttttattatataaagtgccaaagggtgagattgtaaagtccttttttggcaatttagatgccaaaatattttttttattttgtggtgagatttctttgcattcataaccgattttctcacctttattatttggttttattgtttttttctatcttaggaaagaatcatttttcagctagacttttccttgtatggaaacttcttgtaagagaagaaattctcttatggaaagtttattttttaaggaaactttgactattattattttccttaatgagttcaattgtgtcctgataagatcagatcaaacacactttttatggcaggtatcaagacccaatacatgatcgaacacgtttttggcaagtttccttttctggtcaaatttgctgcaatagaatctgatctgaagctgcaaattagggttttattta

SEQ ID NO: 214201 - DNA, 903 bp, Cannabis indica
gcatattcatattgtgggcaaacagtttctaatgttaaataaaataataaagggaaatttataaaaatactgtataagtgtttataaaaatactgtcacatggaaatttttttaaaaatattgagtttttataaaataccagtagaacacaaaacagaacaactcaaaacaacagtagaacaactaaaaaacaccagtagaacaccagtgaaaacttaacacaatatactgcagtatgaaacttataaaaaatacagtataaaaataaaaaataccgcctaacagtatttttgtaaaaaaatagcaaaagttagtataccatgtaaatttcccataaataaattcaaatacaagattggtatatatataatttaaatcacaaaataatagtagataataattagggatatgttgaggaaaaccttttttatttttttattcattaatcaaaaatattcttatattaaatttcattaaaatgtacccacttttatgagtggattgcctaatatactctcaccctccacttaaatctagcacataatttacattaacttaaggggtataatgtaaacatcgtctataaaagtggatatattttaaagaatatgaaaataaaggtgaaaattcaaacaagtaaagtaaagtgggtatacaatgtaattttctctaattaattaagtatatctgattgattcaaagtttttctctctagatctctaaattataaacagttttatttattttattgtcaaaaatatacaattgtgatgagacagtatgtatttataaagttagggaggagactcacctatataactctagttatactgaactattcattaaaggctccaattaactagaaaaatttacatgctttaactaaattttacacacataaat

SEQ ID NO: 214202 - DNA, 679 bp, Cannabis indica
aattattcaatgataatttagggtttaaacctaaactactcatactttttaatatgcatttgttaacgtgaaaaaatctatcatgacaagtattaaaagaacataacaagtaaacaaaaatattcactttattaacttcaatatttaatttaaacattccttcagtagcatatatatttcccacaaaattttcattcttaattaaagtaaattgcccctatagtctgtgtgaaccccgccttgttgaggagataggccgagaccagattctttctcatatctagagtatgcatggcttctttgagaatcatggcttttccagaggtaaactttaatttcacatcactagtaccagcaacaatagtagtgtgagagtcgcctaacaatactttcttatcctcggtctcagccgtgtatgttttgaacatagcacgatcaaagaaaacatggtcagaagtgccattttctacccaccacccttctgatccaccaattaggttgatctctgaattcatagttgtataaggcagctcttcaatcaagttagcctacggagcagaacaagacctattccgacacttgcatgccatatgacccgatttgttacaaagaaagcacaaaaatggtgtcaggtcattcttattagcgggttgctattgtttgttttggttccttggaa

SEQ ID NO: 214203 - DNA, 698 bp, Cannabis indica
cagaagttgatctgattgcctatactttgtgacaactagcttactagagatagaaccagaagagaaatttatacaccaacaatgtttgcagaagttggtctgattgcctatactttgtcaatagatcattcatgtgacataccaaaaccattgagtatagaagaggatttaaaaagaaagtacaagaaggagtggtctcgggctgtggatgatgaattaagcttgcttagaaagaacaagacacaggccttggttccaagacctaaggacaagaaggtggtttcatacaaacagattctaaagattaaagaaggtgtgatagaggttgagtgagtaagatttaaggcaagattagttgccaaaggtaacactcaggtggaaggaatagattacaatgaggtgttctcacctgtagtgaagtataagaccattaaacttattttgtcaatggcaactcagcaaggtttagaagtggagcaacttaatgtcaaaactgcatttctaaatggctatctagaagaagagatatacatggagcaatcacttggatttcaggtagaacaagatggaaaaaagatggtttgtaagttggaaaagtccctatacagccttaagcaatcaccacgacaatggaacaaaagatttgacaactatgttcatgagattggtttcactaggtccaagtttgatcactgttt

SEQ ID NO: 214204 - DNA, 867 bp, Cannabis indica
cccatatattattacatacactttaaaaaacataacacaagcaaaagaaggtacgtaatacatacatacataccctttattacaaaaaaactaaaaagaagaaaggtaaatttcccttgatgatgcatatacatacattgttttgattctatatatatgactagtgattaattaaggaaaaagctctattagtgacttcaaactaaacaagggtgtaattttatagcgagtgaaaccagcttggaagatgagtgtttcccactctttttggcttctctctttcccagttgcgaaaagaatcattactaacaaatcgaatgaaagcttagcttccaatacttcattctcatcttcatcgctatttatcacaatatctattatcattacctttcctcctttattgtaacaaatagcttcttttacattttttcagtattctcacacattcctcatcactacaaccacgtaaaacagactacacacatatatataaatacatcagtattgtatcaacaaaaaaaaaaaaaaaaaaaacttataattagccttttaatcgcaacataatatttttgtaattaaatgtgaataaaaatttacttgtaactaaaacataatatttagatacacattataaaaaattttatatttagtcacgataaaatttgtaactaaaaataaaaaagttgtcactagtttaattttaattacaacaagtattgtgactaaaaacacatttagtcataataaattatgatttttgtaactgttacttttaatcatcacaatataggaataataatttataattagttacattttttacttttagttataaattttgttgtgattaaagtaagatttttttac

SEQ ID NO: 214205 - DNA, 566 bp, Cannabis indica
tttatcttacaatgatcaaacacttcacgctgcttctccacattattcagccccctaacattccaacctaaaagattgagactatccatttgacaagtttctaatatcagtagccaacatcccctctgcatcctctaatgcttcatattcattactggtagttgcttcttgttgcggccttatgacatacttagtacctttccttttaggagtcacccactgctcattattaggctgtatatccatatttttcaatgcccctacaccatcaggaaagtctcccctatcccctttactatcaccagtaggtatagtaatattagtagcagatatatcagaattattagcatcagtaacattcttttcagattccttgacactatccattggtttctcattgttactaacttcctgtttagcagtattgctcttattcccttgctgttttttcttccatataatcggtttccctttgttgcagttggaaatggagtgtccaagcatatcgcaagccgtacacttggtaggcaaccactcatattcaacagattgttccattaattgct

SEQ ID NO: 214206 - DNA, 1143 bp, Cannabis indica
caacttatttccccaccaaagctcatcctgagtggtgtcatccttaacaacgcgtttatctcttggggaccgaccggtcttggctcccgagagagtagccaaggcaccattcgacgtaataaaggatcctttttcatactttaattgcctgctcatatagctctgcaccacatacaacctcattttattattattactttctaccaaataaaaccctcaccatatagtaactgatctccatattacgtacgtatgcaaatataggttaattaattctataaagatcacatttacgtactttctcataaaacaaagtgattgagccggtaatcataaatcaatgctagttggattttttctttaaactactttttataaaaaaagaaagtatttagaaattagtcaaaaccaaccatcagtatttttttttcttttttttggtcgaaaaagccatcaggttaattgaatgactaaagatttttcaaaatttttaataataataataaagaaacttaagaaatatctttttaataataattacttattactacacatattaaaaaaaaattcatttaagatcaatgtaaatctaaacaaaatttggaagtagccctaaaaaactattaacatacatgttttaaaacttatcttatatacggtatcagataagagtaaatactatttttattttttgacagcaaagagtaaataccattgaaacaacaggcttacccaaaataaaaatatggtttttttttggagttatatttgagtccaatattaaaaaacgacaattattaaaaattacacttatctagaatatattttattttttaaaattaaaaaaatataggaaggattaaaaaaattaaaaaaaactaagtataaattaaacatatgatttttttatataaaataaaattattaaataatgtgtttttatactggggtacaaatttatatggtgcaaatttaaaaataaggtttggatacactcaaaaaaaaaaaaggtttggataattaccagcgggagaaaggttgtagaggacatgtgtgaatttcaaggaactgtcactaacgcttatggtgggtgtgaaaaagtggtgttgtgacacgtgtgacaccttcggagtctcagacttc

SEQ ID NO: 214207 - DNA, 552 bp, Cannabis indica
tttcttccgtttattttctagtttttatgcacaggaatgttttaaaaaaataataataataacaactttgcttccattaaagtccacaaatttcagcttgttaattttatttttttaacaaaatctaatcttcaaactgaatatgacagttgctgccggcgacaggcatcggaaaaaatcgaagaaagagtgcagctgcaaagaacagtcactaccggagagactgacgagaggtggaaccgtggaaggaataagccagaaggagaggaaagaatggcggttctgacaaatgggagaacgggtaaagttaaatattagaggttttctttctgagtaaaaaacaaagttttatattattaactagacatcgaacagaatggtgtacaggaaaatgtatataaatgacctgagcagggaatttcccaccaaaagcttttggctcaagttttgtgccaccagaagatgatgccctataaatcccatattcaaaattcatacacaatatctaaaatcttagaagttagaactaaaaagtataaacctaattacgac

SEQ ID NO: 214208 - DNA, 839 bp, Cannabis indica
tgaaggagtggcttattgtgttgaacctaaatttaattggaaattttaccgtattatattaaattgtattatattggaattattacatagaaaatataattgacactttattaaaaaaaaatacctccataaggtaggacaacatttataccttttatgtgattttaattaccaaaatactacttacacaatcagacgatggttgctgggtggttagccgaaggttgcatcagacgaaggtttcaatctgacgaaaatttctgggtggttgttgggtggttagccgaaagttacatcagacgaaataactgttagcaaaatatttatgcaactataatgcaactgttgtgaaacattaaaaatcagaacaatatttccacgtacgtaactctatctacatgtctctttatgatttaatatgaacaaattcaccattagaaatttggaaaacaacaaaaatacaccaggataaatattttactatggtattgatataatttttttggattatacttgagttggattgtttgggaattccagttcaactttttgagatctgccttttcatggatctaaaaattgaaatcaagacattagttttatgcaaattaaactagacttccagttaaattttagtttcatagtagttttctacactttttttatgaattcaaaatagttcctgttttgattgattctggtcttctcaggtaaagtcgaaattaatggtggttctctttctgattgaattttcgtttcgattgcgttgggttgctgtgtgattgcgcaataattgcgcgatagctgcgaaaaaaatttgtaatattaatttttttttt

SEQ ID NO: 214209 - DNA, 720 bp, Cannabis indica
tattagtgacaataaaaattaaagatcaaaaggttgtagttaaaaaataattgtgactaattataattatgaagatattagttgtgatataaaagtgatttttaatgacaccttcagttcgcaatattttttccttttataaaacttgttttactctgttgaataatatgaaagataattcattttttcaccatgtttaaatattaatggaatttgttttattattattttacaaaaaccaagaattttagttatatagacacactttatatagaatagatattttttatttattgattgaagttaattttgaggatttggagttggtagtgggaagatatatattcaatttaattttcgacgaatatttttctgattattattaggttttctttgttcatttttccttaaaatactcattttttttttttaaaaaaagttagcttattatctcaagaaataatcacaaacaatcatttatttatggtaccatatataattttttgttgacgcaaaaatttagatacagatatctgactacacccactcgctagattgtcgataatgtattataaattaagtataaataagagagacacatctgtttataatagttcattcactgtatcgcaacagtaataaagttccgtctacttcgaattttatttctcacgagatagtttacagaaaaatggtcaagtctggatactctaatttcta

SEQ ID NO: 214210 - DNA, 765 bp, Cannabis indica
actattttcatcctcataatgtatgtgctccattgctctttgaattgctttttctcttattttattgaatggccatgtattaataataggctcggcaagatagtacacaccatcccataagagacgctgtacttttccgtgaggatagtagttatcctcctgtattcgaccataaatgcaaattaaatccatgtttatcttattcgtaaactgcaaaattttgattggatatttctagaaaaataacataacaccaatattggataattttcaaaaatactatttttttaatatttattcacaattttacagtttaaaatttttattaacaaaatatatttttaaagttttaaaattataaaaatatactttactcaataaaaagtaaagaacaactgaaaaataattaaaaattaatctcacaataattatacattaattataaataaattataaaacaactaaaaatatttagaaaaacaacttgaggataaaacaatcaaaaacaaaacggtttattatttttaataaaaaaatataattataaataaaaaatttcaaaatataaaaataaaaaaaaattccgagtatttttatatatatattttaaaaattttaatcaatattatgtaaataattacaaagataaatatataaaaaaaaaaaaaaaatcaaagtgcactaaaatcaaaaaaaaaaatattgttatattaccttagcacatacatgacgcattttgctccatttgattttttggtaaggaag

SEQ ID NO: 214211 - DNA, 777 bp, Cannabis indica
ctaatggttcaaacatcaacaaggcctcctctatttcaggtttttgggataaggggacaactcattctttggtcaagtcagttggagatgacagtggagttaaaaagatgtgtgatgtacccttaccgtattttcctacgatgatggaggagactacttcaggcaaggggaaggacaaaggcattgggacgactgatcaataccagaaggggaaagcgatgatgttagttgatacaacagataattttccaatggtgactgatacacagatagggaatcaacttaatgtggatggattgagacaaatagtgtgcaagaagggcaaagtaatcacaagcgcagtggatcttggagggaagagatgtttatggacagtaatacatacttggatacacagggtcttcttcataattcgatacagatggggatcgtccaagaagttgctatgactggttcccaaattttttttgatgtgctaataagttatgatagaagcaatagtattccaagaaagggtgaagggatgacaaaaagaagaagggttacttcgaaacagctcaagaataaagggggtcctatatcagaagttttaaacatgaatatggaggctgagaaaggttggggcagtgaaccagggggaatttcagctttgtctaattttatccttgacacttcaatggcagtggcgaacccacaggttctgggtcaccgagcgccatgaacgccttattctagaatgtctaaagacttgggtacccttggacattaaacactctc

SEQ ID NO: 214212 - DNA, 542 bp, Cannabis indica
ttatttatttatttttgagtttagcgtaatttatatatgaggatgtaatgtattaattagcataggggagaagaaaccgccaaccacgacgaagacggcaaaagtcatcatctatgaattttatttcatacccaatttgccctttaatagtgaataaatggtccatttgctataatgttgtattttatattatattttttcaagaaaattctacaatacacacccttaaaataggtgtactgatcagtatctatgaaaattttttagtctaatttttttcaaagtcgtgtatgttatagttatttaagacatcctacaaaattttaagaaatttagaaaaatttaacacgttaaaaacagtgttcaaagactctgttgcacgcgtgatttttttattttatacgcatgtgaaaaagaaggatgacgtcatacagttgagtagacccgagtgatcatagcagtcgatctgggaagagaccctaaccctgcgcccaggttgacttcagaagcttcggggtggaagttcagatttcaataacttg

SEQ ID NO: 214213 - DNA, 690 bp, Cannabis indica
acaaaaaataaaataacaacattgcattatcattttctctacttaaggaataattatatatatatatatatatatgcatgagaagatgagatgaaaatgagggagaatacaaaagttggtgacccttagttaattatttgcttttttttcttggttgattttgcttgtgggctttacatatgttaggctcaatttattcttagactttgtattgagttagtattttctgatgcatttttttagagaatgttttctaatgcatttgatgtctttttttacaggtcattctcgtaaaaaaaaaaaaatctaatctaatgagcatcgcaaaagaaaaaaaaatggagaatgctagcttttttgttgcttatcattcttcaccggttacatcaacttaataatgatcaatctataatcttcaaataacaagacctttagactgtgagtacaacttatttttgttaatctactttagtgttcgactaatcttattgtcgttcaatctaaggcagcgctgatagcttgtagtgaacagcccccttatgaaaccaaccgaaaacagcctttggtacttaattaaggtttggaacccttgcttgtagtgaacaacccccttatgaaaccaaccgaaagcagcctttggtacttaattaaagtttggaacccttgcttgtagtgaacaacccccttatg

SEQ ID NO: 214214 - DNA, 557 bp, Cannabis indica
cttaacatttaatggttaagtacatgcagagttcctgaaatataatttatatattattaccgccaaaaattaaacataggtatttatttacaaccgagagttaaacttaagtatttatatcacaaattactctaactcttatttaataaccactatatattcagggtcggccctaggcatagacggactagacctgcgcttagggtccactcattttaggggctcaaataaaaaaaaaataccttttataaaatatatatattttttttataatttttaaaaatactatttatctttatagtaagggcccaaaattttatttttgcctataatccattctaactcagggtcggccctatatatgtatacatatatattttttaaaaaaagtaataaatatatcaactactatttactaaacaaaaaaaaagaactttgatttattaaaatagaagctcctacctaaaaattaaggactgagatgcaaaatgacctaatttgaaaattaagttagtaaatatctttttagaaaacaaaattaagaaaatagccaaata

SEQ ID NO: 214215 - DNA, 540 bp, Cannabis indica
cgctcataagatctctcttctccttcttcttcatttgtgcgacgcccactgaaaactatagctcaggccatcactgaaatttctcgctaacaagatctctcttcctctttttcttcgctcgtgcgacgctcactaaagacctgaagctcaagccatcaccggagttaatggttcatatctctctcagagaggagagaagtgaacaaagttgagttcgaagctctgaatcgctatttctctcgctctctccatcatatctctctctctcgcatctctatgatcatcatagttctgttttttttttcacgtggttagatcttgggttatattttgtatattttttaaatctttaatatgtcattgaatttttttggtcagatttgcttaatgagatgaatatttttgcttaaaatattatactgcaagattgaatgatgtgctgtcattttttttattttggtattgtttaaatcaaatcatgagcaaaatattctttatttttattattattgggaatgttatttgatttcatgaagatat

SEQ ID NO: 214216 - DNA, 681 bp, Cannabis indica
ggcttcgtcctcaaatatcgaggtggggatgaagctgttgcttctttctatctcatcagcgaaggcacctcctctagaatcgagcctctggctatccgacaaatcactcatctaaaagatagaagatcttttcagtatggtgaaagtgaaaatttaaacaaagtgccttcacccgtataaagttcagaacacaagaaaaataaaagaactgacctaacatctcaagaaatggctgggcgtatcgcagtaacataagggccatgtcgctacatgaaaattaagttactgcaatgcacccaccattttgagtatacagtcacttctagcgataagtaaatcacaaagttaaaactaactatgtgcctcaagaggctgggtgtcctagtatcctaaggggcatgcagttctcgcatgaactttgagttaatatgacacacccaccatttcgaagaacctaattagtcccaataagcgactagaaagtacgaaaaaatgaagactaactgcatgtctcaaatgacaggttgtatcatagtgacccaaggagcacacggagattgcatgagcattaagttactgtgacacactcaccatttcaaagactcccgtagttttcataacaaaagtacatacaccctaaaagtctaaaaaaccctatgaattagtaaattctagcaaaaa

SEQ ID NO: 214217 - DNA, 604 bp, Cannabis indica
attttctatatattttaattattgttttctatgttataaatttatatgcattttataaaaataatttttaatatttttaaattatatttttatcacttgtaaaagaaaaaattgtagtttataagaaacttaggttgatattgttcgttaataataaaaatatataatattttttaaaataaaataaaaaattagaaatttaaatattatttattttaaatatttttcttaaaaaaatatttttattttttgtaatatataataaataattaaataaatttttaataaaaaataatttattatagaatatttgaatcaaaataactttttctaaaagttgggctgtaccagctaactttaagttatatctttttcataaatttttcaataaattttttttaactgcttaccaaacaccattttgtcacatcttttttgaaaatcaacttttaacttttccaaaaattatgctaaacgggtcataagtgtaaccaaacatggatagggaagtttcctttacgtgcatcagtagttattagtgcaaatttgccacccccctctttaacttcttgagtaatgaaagttctttttttttaaaaaaaaa

SEQ ID NO: 214218 - DNA, 615 bp, Cannabis indica
cataccctatacttcaaattctaaatataatctatcataattattgttcatcttcaaaaaaaaatactaaaattataataactctctcaatatttattgaaacatactaaaaaaaatctaacaatatttttttaggagagataaagttttatttttatgatttttctagtaattataagaatgtatatgatttttcaaatttttgaattatcttaaatttaggtctgttttgtaaagttaaaaatctattatcttaaatcagctgtatatctttataaaaaaaaaaaccaattaattgtactgaggaataaaaatatttttttaaactattctaagatgagagaaaataaaataggtatagtagcctaatatgctattaaatacattagtttatctgatccaaaagaatacaatgtactcttttttttagaaaaagagtacattgtattttttttcttagcatttttctagaaccaaataatattgttactgattaagaggtagccaatgcatttctacctcttctctccatatctgtttgaatgtaagcccaatgcccttatttattcacctggaatgcggaaattcttcctagactcttggaagagagcctga

SEQ ID NO: 214219 - DNA, 1148 bp, Cannabis indica
caaaaacgacaccgttacatggcaactcccgacctaacaacgaagcaaacggcgggagacgatcacggctgtgaaaggacaatctcagccctgcatcccgacatcattcgggcccatattctggcccgtctcgacggcccgtccctggcttcggccgctagcgcgtcgtctcaactccacgcgctttccgttgacgagtccctatggcaagacatatgcacttccatgtggccctccgtagcggatccccgcctccaacaacttatcgtttccaacttcccttctggccaccgttctttcttctccgactcattcccaacaatcgacgaggttccgccacgtgtattcaatcacaatctcagccgtccatccggattaatctccgccgtcgatattttctaccagggaaaactcgtcctctccaaaatcgaagagaccgaaaccttatcagagtggttcctctgctcaccgtttctggtcgaattaatcgacccaaaagatccgatcccgacagatatacgacgcgccgccgtgcccggtgacgacgacggcgcgtggctgaaacacttggaagataatgtaacgctgagctggatacttatcgacccaaaccttaagagggctgcgaatgtttcgagccggagacctgtatcggttaatcgacactggctgaccggagaaattcagctccgattctcgacggttatgacgggggcgagagaggtggtgcagtgtgggttggtggtcacgtgcgggggtgatactgataaggaaagagggaagatgcacgtgagggaggtggggttgcacgtggaggatatggaaggtaggcacctgaaggggagtgagagcttggttatattgggaaacgccattgaaggaggaggtagaagaaaggtacggaagagtagggaggggaaagagagatatgaggaatatttgggtttgaggagagagagtagagagagaaagcttagtcgagagaaagctcttgacttggtctgcatcgttactggcctttctatttttatcttttttttggtcttttattcttttcagataaaaaaaaaaaggaaaacagttattacggttagttactctgtgtacaatgtacataacattacataagttacattaggaaaagaaaa

SEQ ID NO: 214220 - DNA, 852 bp, Cannabis indica
cgttacttctcaatctgacaaacgtggaggtatagttatcctaattggttaattgatggattttgtgatactttatctgattgtgaattgattgatttggagttgtgtggctatccctttacttgggagcgtggaagaggtagtccggagtggattgaagtgagaattgatagagctttagtgagtcaatcttggctgaatttattcccttccgcaaagttatggaatcttgaaactacaacctcagatcattgcccaattcatctagttcccactaatcctttgggaattgtcaaagccaaaatttttcgttttgaaaattcttggcttaaagaacctctttgttacaagatcattgaggatgtttggagtgctaacttgggtagtcatgttttggagaaaatcaaaaggtgcagcgatgttttacttacttggggcaaagactactctggaaactttcaagaaagattgtccaaatgtaaaacggagttgagaaaatggaagaagggccgtgacccattggcggtgcagaaatacaaagaagcagaggttgattttaataatgtgcttttgcaaaaggaaattttttggaaacaacggagtaagcaactttggttgcgagaaggtgatcgtaattccaaatattttcatgccatggcctcgtctcggcggcgtaataactccattcagaagcttcggtctacttctgggaattgggagacttgggatggtggcctcccgactatgataactagttactttgcagatttatttactccgggagttgttgagggagttgatcacgttgcttcggcttcaggaagggtgactgaggttcaaaattccatgtta

SEQ ID NO: 214221 - DNA, 616 bp, Cannabis indica
cgccccccatatgtgacattgtacgacactgttgagacacaacacatgatcagagcaacaaaatgagaaccaaaccccatacggagtaacatggcttctaagaagttccacccaactctatcatacgccttactcatgtccaatttaagagccataaacccttctttgcccattcttttcctcttcaagtaatgcatgatttcaaatgacaccataatattatctgatatcaaccgccccggcaagaaagcactttgtgtgttggaaataacattaggtaaggcttctttcaatctattggctagaactttagaaatgatcttatacagaacattacacaatgagattggcctaagatcactcatatgttcaggaagttttttcttagggattaaaacaatatttgtcttatttaaatcactagaaataactccattagagaaaaaagatcgtaccatggccacaatatcatcgccaacaatatgccagaacttttgataaaaccccggggtcattccgtctggtccaggagacttttcggggtgcatttggaacaaagcttttttgatctcttcagttgtaacgtcacttgtgagctgggcattttgtacatcag

SEQ ID NO: 214222 - DNA, 711 bp, Cannabis indica
ggatagacttcaagcagtccttccgatcagggaaggaaggttaaagacacatcgtacccctagtgatctttcctgcacaaacgtgcatgaaaaagtcatgttgaatttttttgtaacaatcttcggcttccaggaaggaaggctgaagttctataaaaattcaagcttagacttcacttgaaaagaatcacgaggggtaagatagatttcaagcaatcctttcaattaaggaaggagggttgaaaacgtttcgtaccctcaactgatctttcttgcacaaacgtgcatgcgagagtcatgttgaatttttatgtaacaagcttcaacttttgggaaggaaggctgaagttgtatagaaattcaagcttagactttgcttcaaaagatcaaagggtggaagagtcgctgggagtgaagtgacttcaagcaacccccccccccctccgagaaaaatggttgaagatgtgcgacattcccaatgatctttcacgcctggagaataggttttgaggtttaggaggtgcatgggttcacctgcaaggtgcatgcttacaccttcagatcttctgagcaatctgtttcttttggcgaggcgcatggcattagagggtctctgaagaaaagactcagacttccaacaagaaacgcatgtctcaagggctccctaattggtttataatgtctcgagtttcttccctctgaggtaacgtc

SEQ ID NO: 214223 - DNA, 738 bp, Cannabis indica
gttggtgtggtatatcattgtagtatagtaattttctttcatcttttaccactaacaaaaggaagaaaaaatattaaagaatttccttcatctttcaattaatgccatattgagcatttttatataccacttgaatggaattaatagataaatatatttgtgtaacacaatttttttatatgtaactgatggttagatttattgttatattacatgtactctttttattcaattgttacaaattaattaatatatttccatacagatttcatttcctaagttgggggatttgactaggaagggattgaacatagaaaagttatggccagaccaacttatggtaccatcatcaagttgttcttacttgcaaaacttaacaagcttagaagtggaagggtgccataatttaaagtatctcttatcttcctctgttgctcaaaagttcgtaaacctcaagaaaataaaagtcaaaaagtgtgaggcaatggaagacatagtaagagtagtggatcaacttggagaagaagaaagtactcatgatcagatggaaaggattgatttgctccctaacttagaatctgttaagctttgtggcctttcagccctccaaagattttgtagtagtgaagcaaattcatcattatgtattatggtatttccactcctatcaaatctagtaatagaaaattgtctagcacaagcttgcttgtatcaaaacaacctttcttcaatgaaaag

SEQ ID NO: 214224 - DNA, 668 bp, Cannabis indica
attaaatctattaaatataggactaatatcttaagagaatatctctattttcatggaatgttagacttgtcctgtaattgtaggtgagcttgttaagagctatctgcacgttctggctagccaaccttgctgagggctgtcgagcctggccgaacagccttgatgaaggctatccagcttggccagccaggactttgttagcaggtatgtggatttgtctttgcttgtgtccaccgtgtatccatgggatcttgcaggttgaaagcagcaggcactaacctaccaggttaaaggctgtaggcactaaccttgtaggttgaaaggttacaggtactaacctgacaggttgaaggctgtacgcactaatctggcaggttgaaggctgaacgcactaacctggcaagttgtagattacacgcaccaacctggcaggttgaaggactgcgaacactgacatggcaggttgaaggttgtacacactaacctagcaggttgaaggctgaacgcactaacctagcaggttgcaggctgtacacactaaccgggtaggttgaagggttggaggcactaacctggcatgttgaagattttacagactaacatggcaggttgaattgctacgggcactaatttggcaggttgaaagctatatgcactaaccaggcagg

SEQ ID NO: 214225 - DNA, 563 bp, Cannabis indica
aaatgtaaatttttttaagatttctggagaaaaattgaaacgactacaaaacagacaaacacgaacaacaatcaccaagctatcaacattggcactatcaatgttccaatttttggagggggaatgaccaccattaatgctattataggagaagtagagcataccaacgtgactccccttagcttgtttcctcaattctcaggccatgctggagaaacctcaatatcaacggctacagtgggatagtttccaagaataacacctgtcttagcctctgatggcatcatccaactaacaatcatgtaatacatgactatgcaggagcagatgtaggcattacaggcaaaaatcaccagaagagatcaaatttgagcccgacatccaccatgagtcacaagccaatgtcgcactgataatttggtaactaatgatactaggtgtcgtaatgaacgtactaatgtgactcgtaatttcagggaacactcaggtgagaacaacccagatgggatcgacttgaattaccatttgtgaccctgcatgtgtagaggccattttgtcctaac

SEQ ID NO: 214226 - DNA, 839 bp, Cannabis indica
aacaagtcatacgtcatcaaacttctcaattacatagtctaatatcaggttgaccaatttaacattgtaaataataataataataataataataataataataataaataaagatataaatacttaaagttttaagtttgtaagcagtataaaaaaaaaattagtaatataaataccaatagtttataaattgtaattttattctattttcatcattatatgctgtattattgtcttaaacaaaacacatataatatcttaagtctaactcattgtgtctaaaaaatatatacaatattagttactttcaaattttcttttaataaatttaatacaaaatttatactgaccataataataataataataatccacaaaacatggataatggataatgatgcaagagtaaagactaccttaagctcaaaaagtattttctaaaagtaaaacattaacgaatgtctctaaacaattatcgagttaacccgatttacttatggggcaaaataaagagaatgattacattgatgaacacataagtttaacaggtgttatccaaaaaaaaaaatctaaacactaaatccatataattacaattaagcttgtagacacatcacccccccaaaacaaaaaaccaaatcataaggtcgactcttcatctacctgaaaaagaaaaagaaatgcaataaccaagaggtaatttaaacttcaaagcaatacaaggaaacaattttaatacaaggaaaaaaaaaaaaaaaaaaaagaacaaataaaataaacttctcagaaataagtaggctgcttatactgattttcatagaacagtgttttaaattttt

SEQ ID NO: 214227 - DNA, 729 bp, Cannabis indica
gcatgtttcactaggtctagataaggagagctcaattgacatgttttaactgaggattcaagatgagtagttgtaaagataagtgcttcgtctagtattttctctccatgaactctcatttgtgcagcttcatacaagttcaacattcctcgaatgtcactcgaaattgattctttaaatttttcattttcattcttgtacttgtcgaatatgtctgtgttaattaatccacccaagccaccaaacaaatttataatcagcaataataataataataaacatataagaaaagaatagagcattgttataagactacatcagtgataatattactgtgaggtgatgctcagggtcgaacttgaattgaaatggaccataagacaaaaaaaaaaaaaaaaaaaatacaacccttactatataaagataaatgatattttaaaaattattaaagaaatatatatttttttaaaggataaatagcagcgtaagtacttaaagttttgagtttgtaataggcataaattcaataatttttttagtgacataagtatctaatgtttaactgtaatttttctctattttcattagtacaaactccgttttaaatttattaaaagaagatttaaaagtaactgatacaacatatttctgtccagaccaaataatttagaatatgggtcttatatgtgccctatttaagacaataacagagtctatatttatgaaact

SEQ ID NO: 214228 - DNA, 522 bp, Cannabis indica
tttacttcttaggtcaaaaattacgctatgcctacaactactaacttattaaattacaactcaaacaaaaacttattggtgtttttaggataaataacaaaataagtatttaaagttttaaatttatataagttagataagtttaatattttttttaatagtataagtatttaatatttgtaaaattataatttttttttttaattctgtcagtacagcttttattattgtcttaaacatgacacatataaaacatagattctagattattgactctatagaaatatgtagtatcatgtactcacgaaattgaaaaaaaaaaaattaactgtttataaatatttagtacttatatcgctaaaaataaatattatatttatgccgtttataaatttaaacttttgatacttgtacgatattttttcttatttttattatctcatttatatatatacgaaagagggatttgaagaattattagtaattttttgtgtgtgtatatatatacaaggtgattgttac

SEQ ID NO: 214229 - DNA, 1083 bp, Cannabis indica
taaaaatacagattgttattttttaattacgttagtttgcacagcaacaatataatatgttgttttcacgaactattttttttaataataacaaatggacattatacttctcctcgggcaaacacaaactgttgcaacttatttcatactattatttatcatgtatatctctgacaattttaattagttatttaaaaagaaaaatcctaaaattaatcaaaaaaaaaaaaagatcataagaaaatgttttattttattccctttcatttttttttttttttgaggaaattttattccctttcattaatttgcagcattcattaatttatgattacttaatatttagtgagatatttcattctaaacttgcaaatgagatatatagaatttgtaaagcttctttacattttttttttgggtatggaaccttctttacattagatactctaaattgtttttttaaaattttaatagttatgtagatatatagattatacaatattatttattattctaaatatatttgttaattttttagttttagttataatttttattgtagataagtgtaaatttattaatatattgggaaaactttttgtaactaatcacaatatttttttttttaatgtcaaaatagaatatttattaaaactactaataataagacaatattaaaatattaaatctaaagcaccacaaacaataaaaaaatacataaatcaatcataaaaataggacactaaaatttttatgtggaaacctaatgtgagaaaaaccacacggattgtaatacgcttaaatcatctactatcatcaatgtttaataataggattacaaagtcttctctagtataactagagactcacagcaacatcaagaataaacaatcttgaatcaccaatttaatcatcatcatcatctcaaaagatagatacacaaataaaaaaaaaagtttggctctcaccaccgaaaatttgagctaaaatagatgagaatcaacctcttaatcttcaatgcaaagtagcacaatccactttctttctctagctttcttctcttcttttcctctttttttttcc

SEQ ID NO: 214230 - DNA, 813 bp, Cannabis indica
agagaataaaggcaattagcctaagttttcaatttccttcattataattatgaaaataaactagttttcccttttataattgattgatttagggaaactaatttcatgtaattgatccctataaatagtggactcatctcactattcagggatatgaaaatattcagaaagagaacacttaagagagaaacctcattctaagattaaaatactcagagattattgtaagagcattcgaaaaagagtaagtcattcttgttcatcttttcacaagtcaagaaaacaaaaaggagagtaggctattactaaaaataaggggccgaacatctataaaatctattgttttctttactttatactatttactttctgctatttaatttattcttaatcgctttaatttgacttatcgtcgttggctaaaagtgaagtcaacatataataacactcaaaaaaaaataaaaattgacaaaaatttaacaaacaaatatatgtggaaattataaaaaaaaaaaaacaaaaattggtatgcatacataatcagaagttactctgctttatagtctattttttattattttaaaatatatttaatacaaaataaaaggaacgaatgaaaatgtataaaatatagtattgatcctgataaattttacaaaactatggcataaaaaaacccataaaaaagtaaacaaaacaaaaagtccttaacccctaagtattatttaattagataattacataaaacaccaatttttagtaaattttttacatttttacgttttaaagttttatgtttttacatttttacag

SEQ ID NO: 214231 - DNA, 844 bp, Cannabis indica
aatagaatttatatattaaacatataatcatgaaaataatcatgtgaaccatgcaacataaaattatttttgatcatttataaattagtaaatctgattatattaaaatgagttttatttagggcataaaatcccaacaacttcagctttttatccacttgattgaacacctccacacaccagccaaaaatcttagcatttggtgccacatttgtttcaataccaaccctattttaacataattgaaccttctgacatgtcaccaagccatgaaaaattaattcatctctcaagttacaaagaggaagcaacgaggtaacctcgacatgtttagatcgaagttgaaccattgttgaaatgcaactcataccaacacgccagagcaagttcttaacattaggaggtaatttcagcttccacatttttttttctttcaaaaaacagattcttccatctcaacccacctaccatgaatttttgaaggagattatatgtacttttaacagtgtataaaagatatggttctttggatcaaacataatgatcattggcctgagataattgtaattgaatttgcagaatcacgttcttgtctctctccaaaacagatttgtcataagctccacatctcatccttcactatcaacacaataaatatacactttggcagtttctaaactagggtcatcaaaaataacaaagggatcctcactgtcaggtagcgacggctctcccagcatatcaatgggtaatgctcaccaacacatcattaaaatctatttttctaccatttattgtgactcccatatgctatgccatataaatcttggattgttttccagtt

SEQ ID NO: 214232 - DNA, 659 bp, Cannabis indica
caataccactcttgttggtgttttttggtaattttgaagcccattcctcattccatgtatgtgtctttatagtagagattgtattggaaagaagatgattacagtagttattcatttgctactattaatgcactgtgttctgtctttatctcttattttcttttcaacagttttgtctgtatgaggaaacaaaagataagtataattccttttatgttacattaattataagttgagggaggaaattaccttgcacaaacttatggaatataactttaattttttgctttaatcattgtaatagtttatactgtaatacaactgtgttggcaataattggcttgtgttaactttttttttttttttttgtaaaaattaaaggggaaaacatcagatgaattttttaaatttcccaaaactattattccacaaaagagaaacctttctgaacagtccaatctaggaagtcaattaggattaggctagttgttgggttaaaaaaactcaagagtttactacttgaaactaaagcactcccaatagatcatgtataatagctacaaagctaaaaatatatctcaaaactcttgaaaaaaactcttctaataaataagctataatacctgaatattttagctcatgaatagtacatctgtaca

SEQ ID NO: 214233 - DNA, 567 bp, Cannabis indica
tattaaaaaatttgtgacataaaatacttaaatattaaatttattctgattaaatactggaattcgaaaaatagtagcataaatcctcaaatttctaaacttaaaaattttaatagtcttaaatggagaccaagccaaaaaataagaagtagatagatttgagtttggaattgatttatttattgtttaatttttattctgatgtgtgtgttaagttttgagttcaaattttattgtgtgtattttcaatgttttactggggttctactctttgagtttgtttttatgagatctatttatttatttatttttatagattttgagaacttgaaattggatgttgtttctattgattattgggattgagagtttgatttttcatatatatgggaattaaaatttgcctttttgtttcattgattgaaaaatattagtaggaagtttatggaacggtaattttaaatatatgagaatagaattgaaagatagcatttgaagcgagaatcaatgtttattgttaatatccttacaaaaaaaagtttatttttaatctgtaaagataatatg

SEQ ID NO: 214234 - DNA, 640 bp, Cannabis indica
gtatttgattggattagagttataagattgcttcaaggtacaattaatattggtaatttgttaatgtgagctgaagtttggtgaaaacgtgagagactactatattaggggtatatatgtgtctagtactactaagaaaaagggacgttccttgtgattgggaagatatatagctagctagaccaaattaaatatataaatattatttttaatacaaaatataatcatatataatagcttcacaccaaattacacatcatagtaatctatattatataatgtgacattataatctttgttgacttagttgaaaagaggtatagaatccttttcttcttttgttttggttttatgtatgtacatatatatatgtgtatatataaatatgtagcacaattaactgtagtaactagctaggggcctgtttgttggccgaatatattgaccataaaagcaaaatcagggattctgatctacttctcttatcttatatatatatacaatcatttctctgcacaagtctttgattcaagcatatttactccctcctttataggatcatcaatcatcatccctttctcttctagtactctctccatcaacactaattttaaactcctatgtatatatatatatacag

SEQ ID NO: 214235 - DNA, 709 bp, Cannabis indica
tatttttttaaaaaaatttacgatttgggttgctctggtagtttctccaatgatttctatgtgagttgctatgtgaattttgattgcgatcgatttaggttgtttcattaattactataagagtttcaatataaaattacgtaaaaatacaaaaaaaaaaaattgaaatataaaaatgaaaaagcccctataatcaaatgtctaatttttttttttcccaaaacctattataaaatagtaatagtgatattggacttaattattggccgattgggccaaaatgggtaactacaaaaaaaaaataataaaatacaatgacatatatagggatataattttgtcccgtgatgtactttcacagaatgtattccgcggtacattagatgggtctcaaggtacattaaatgagtgtcaaggtacgtttctactttttaaccctaattacccctacatcaatctcaaccgtcagatcaaataactccctcatctgacggatgtcgtacatcacggaatacaatccgtgaaagtacaataacgggacaaaaaaaggacaaaatatatatgtaaataatatttatataagcaccatatatattttgtggtggagggtcatgaccactcttgtagggtcggtaaaatggggtcagacacgataatatgactcgaaactcgtatgagagttaacgaatttgagtttgccttaaatgag

SEQ ID NO: 214236 - DNA, 955 bp, Cannabis indica
ctctgaaggtgtcgcattttcctcgtttgttgttgcagatcctcacgatgtcgattgtctctcgttcaccgggtcttggtgttgcttgaagagggtgaaaggtctgaacagtgttggcttcgatgggtcagattcatcgttgacagtttggttttatatctggtttcagataaagagaaagcatgagagaaaactggttttttcagggtttaggataaacttccaacaaaaaaattgttttcgtgatgatttattagatttagtttattttttgtgttttatttttcttgtgtttcttatttagatctcaaaggattttttttagtgttgatttggattagagagacaatcggtgatggtggctatggtggtgtgatggtggctatgggggtagtgttttggggaagaaatagagagggtgtgaagataaaaaaaggcaaaaaaaaaagaaaaattatcttttattgattttatttttattttaaattaattttatttttaaatagttatttatgtggaccaataatattgtggaatctgtacactatatccatgtggacaatgcccgtacacatggacctatgtacacttagatagtccaacgtggcacttaacacctaaaaatggatggaaagagctaagtattaatagaacatgggtgttaaattttaccatctgatctgatccaatcaatttcagtcatccagtggatccaacatccactggatgttggattggatcagttctatctattagatgtatttcatatatatttattagtttaatttggatttattcaatattttagacctagtattttttggatcggattggatccattcaatattttaggtccagtatgtattggattggactggatccatccaatctaagaaaaaaggagtaaaattttaatgttaattttcatatatacatatagatttgacatataaca

SEQ ID NO: 214237 - DNA, 450 bp, Cannabis indica
tagtaattgtattatttagtaattatattatattttaaagagttttgctattagtgtctaatatcatttataggtggcgttctatgattggttaataatattttttaaaagttatttttttaaaattatatgagattcgatacataataattgattacaatattagaatatttctatttaacatagttaaatgttgctatactttgtcgtcattaacatataaaaataactttatattgcaaagtattacaagatcgaaggtttttatgccagcccattggataagaaatttaatctttcctccccccccccccccccccgtaattttatcatgtgtcatgtatgagaaaacatagtgatgtttttgtgggtgtttagagataaaggagatgtgagatgtctggagacacctcaagctccatcttgcttctttcattttccaattgtgga

SEQ ID NO: 214238 - DNA, 1216 bp, Cannabis indica
agtttgactccgtaaatcactaatttgggtttttccactcactcttggtcctcgtcggttgaagattgacctctgggaacctcgctccccttggggaagaagtggtctactctggcccgccaagggtactcttattggtggctaaccgactagtggctacacaatgggggtgttgctagccagagatctctggccgaccccccatgccgttggttgccgagatatggctactctcgttgtttgacctttggggaaaggtttgtcctccctctaacaggggaagatctatcctagttcttgaggaacttggcagcagtcttccttgaaagtggatctactaaggagatcctggcctcttctattggttctcttattgaaccatcttattaaatcactagcctctcaaatgcagaatctaactctaatttgtgagatcgaaagatgtactcctggtcatccatccatctcaggcattcgcatctctactaagtgaaaacatggcaatcaaaagtatggggttcttcaattaggcatgcacggcatacaacttccctgaatctagccaactcaatgtcttctcctagtccaggtgacactcgccaattgctggctcaataattcatgggcccgtgtctctagcatagaaccagagtcgagatccaaatgttgttccagggggctgtcgcccctgggtccttccttcagtaggaggcaccaatggttggtctactcttagaggcgtgggcctgccacttggatccactggggtgctcgtatcagtttggccagctgtagtggccaaacttgcatcacttgttgtggtgacaggattcaccacatctgcagtgttcatggggattccagttgtgactggaacctaagttcctatatcagcagtttgtgggtcttgagggagacccgaagatgcatacggtgcgataggagttcttcttgtgttcaccgtggcgtttgatcagattaagatatccacgctctcaatgaaagcacaaaacttttgacctcataaagggatcaaccaacagcggggtcgtatggatctgatgcttgccatgtgtttgcataaataagaatgaaaagcaataaacaacaaatttgttacaaaggttcggcccccttgtgatagcgggtaatgacctactccccttttaattttatctataccgagagttaagactatccagataactataggtgg

SEQ ID NO: 214239 - DNA, 534 bp, Cannabis indica
atttaaataatgaatttattattcaaataataattaaaaggtacaaatatgaattcatcacatcaagttttttatcctgcacaattaatctacaagatatagagatatttggggaagtttgttgagattcagcttttttagtggggacatttggttcatgatttagttaaatttatttgtttaattttaatatatgtacttaattcacatttcccaccttaagttagtatttttgatgaacactgataggtggaatatacatttcactcgaatggtacttcatttttttcatgctttaaatattatttagtatttgattattttaataatattttataatttaaatttgtgaaatataaattaattttataaataatgaaaaagtaataagatttagcaaaaaaaaaaataataataaagagctaaatatatggatgtttaaaattttatttattatcatcaattgtaatttatatatattttttttaatttcttaatgtttgtactctcatatgtgtataaataagagatcac

SEQ ID NO: 214240 - DNA, 938 bp, Cannabis indica
ttttattgtctcttaacaatttttattatatattaacagaagcattaacaaaaatataacatttgcataattctctcataaaagataattattcacaataaaaatgtatctattcatttataagatcctctcacaaaagagacaattgttcacaattaaaatacatctaaaaaaaagtaacacagccacaaaaaaaaaaaaaatattaagggaaattactccgtatactattttttaactttttttttttttttttaaatttacggtttgtgtttctaaagtgatttctccgatggtttttatgtgggttgctatacgattttttgttacaattaaagttgcagcgctaattgcaatatgagattctatgtaaaattccataaaaatgcaaaaaaaaaatatatatatattttaaaatgtaaaaataaaaaagccccaaatactaaacatttatataataggtaagacaaaactcgttgtatcatccctcaagatcattcgtagtgatcaggaccggccctgagcataggcctgtaccagggcccacctaactcaggagcccaaaaaaaatttatcccattttaaaattacacatttttttttattaattttaaaaaataccacattttttttttaaatgaaagttccaaaaatatttttttttccctatgacccactaaatttcagggccgaccatggtagtgatgaagtaggcaaacttacaaaatactggaatttgagtaacttttacaaaatactgtcacacggaaatttttcaaaatactgtgttttataaacactagtgaaacacaaagcagtataactcaaaacaacagtagaacactagtaaaacaccagtacgaacaccagtgaaaacttaacaacagtactactgcagtatgaaactataaaaaaacacagtaaaaaagtaaaaaact

SEQ ID NO: 214241 - DNA, 1336 bp, Cannabis indica
gacatgctaagagtgaaggtggaattggcttcaagaacaaagcagctatggttaaatatttgtggctattgctacaaagaagaaaataatatgtggctcaaatgggcacatgatgtgtatttcaaagtggagtacaagtggaaacacaaagctcaccctcaaagtagctggtgtttgaaaaagatagtctctatcaaagatgaggtaaaatcttttattgacactaatatgtttatgaatgagagctatagcattttaaagggatatatgctgttgcataactgtcgtaaaaaagtgtcttggcacaaccatatttggggtagacttaacaccccaaaacatagtttcatcttttggttatctatctaggacatgctgaaaattaaagaaagactccttagattcaatgtgattgaagactcagactttttattttgtcaaattcaggaacaaaaacttggaacatttattctttaattgttcttttcgtcaaaattgtcttcagtaggtgaggaattggcgcgaaaggcagggttcttctacttctctagggaagcttactaaatggatagaaagagcaaatgtctccaaattcaaaaagaaggtatatgcagtagctctagcttctctattatccaacatatggagagctacaaatgggagactttagttagaagaaaatatagatatagaagtcactatacataaagcaaaaaatgatgtaaaaatcaaaattaatattaagcatttgacctaaaaatgtaagccaaatagatatttagtggtataattgtttgtagtagaagaaaaggaattgtattgtatatgatagattatttagatcttcgtttgaagatgctattagattgtaataattttggagtaatgaataccactgttgattcatcaaaaaaaattatttagactatatagatttgtaatagatttaaaaattaatactgggaggaaaatagcaaaaaatgtgcatttttccctattttccaatataacaactgaaaaaaacgtcggtgaaataaacttttttaattaaaaaacttaacctgtactattctgtcgacatttttaagcagtcatgaacttcaaattagcgactaatttgaaccgtcgcctattgtgcgatggtcgtatagggcgacggttatagaaacccgacgagaatactttaaaaacgttgagaaaaactattttatagtactgtcatcttagaatgagtttttgtatttataattgatttgactcctcaataaaattataaattaacttatagtatctacacattattttcataacaatgtaatacctttttgatacacat

SEQ ID NO: 214242 - DNA, 796 bp, Cannabis indica
ttatagatgacattacacaaactaatcgggcaaaattcagccaccatagttggtttctccactttaggaatcaacgcaataatagtctcactcaaacaactcagatccgcaccattattcagaatattcaaacaaacccgcaccacatctctgttgacagagctccaaaacttttggtaaaatagtgccggtaacccatcctccccaggtgctttcttaggattcatatctttgaccacccgaaccacatcctcctccataaacggttccaaaagaaaagcattcgtgtcattagacactttcggtgtcacagctgagagaacctcaccaaccacccttgagttcacctccgaagccataaaaatattctcaaagtattcttcaataagtcgctgaactttcggtgtcaaaatctctttaagtttactttttctgtaaatttgagacattatatattaccgttaaatactaactgaatgaccactgtgtgtacataaaagtaaaactgtaaaaccaacccataataatctagttgatatttaatagtgatattcaactcacaacttaaatttataaaaaaaataaaaaaacaaaaaacttcaaaaatataaaaaaaatttagccacaaataatttaaataagttttgagaggaaagagtcactttacaaatatacatacacacggagacttatcccattaaacaatattatcatcatcatatataacgactttgatatatttatataatataagcctataataatcatattcaattatatttttttttttttattt

SEQ ID NO: 214243 - DNA, 764 bp, Cannabis indica
caatgaccgattaaatacgagattgttcatgttatccatcttcatctgaggagcctttggtttggcaatttaggccaaatcagaagccttggaatgccaatatttgaatacaatgacagtttcccaataacgtatggacaacacttaaaaaactataaattgcaacgccaaatggaaaacctaataacctatagtacccacactcttcttctttctgcataaccttcctaagaccagaatcaatcttacccttcaaagattgaattgtcatatcaaacactccttaccccaaccatattcattgtaacgaccactatcaacaacatctattttctcaattgaaacaactttcccagaggaaccacccaacaagtaatactgaacaaaatataacacaaccaacttgactgcaagataatcattatccttaagattgtcagcaataaaagcagtttggatagcactcctggtaattttttgtagccctttaaacagtgttttacatgtatattatcatcttgtttgaactgaaaaaatgtcagaatcaatatgacaatccaacctagtaattaaagaaaactcctcaacactaaacttaagatattttccttgcaaacaaaaccaaattccaactcatttggttgttgaacctcccttaacaacaaaccatgaatcagtcggtaatgaatactatagtctagcattcgaagaaaatgaccaaacacggttttcgaaaacatttttaattgggtttcagtaagaat

SEQ ID NO: 214244 - DNA, 918 bp, Cannabis indica
  modified_base (879)..(879): a, c, t, g, unknown or other
tttaagatttctttttctgaaatgtttgtaagacgataatatcattgaattaaaacatttgaataacaatgtgtatattatgggtttatatacacaattatgatattcttagcaagtttattttcataaaacatatcgttaaataaataatttacaatttattactgaattcttaaacaaaattcactagaacttaaatgaaactaatatttacgtggctcgtcgcgtaactttcatctagtatatatacatgtgttaatttgatttacttttattattttcttatcttctaatgaatattattttgaattatatattttacaaaaattatagtggaaaaaaagattcaatacaataaacactaataattctctaactaatctaaggacaaagcatatatatatatatatcataatgaataattagagaaatccaatccattggtttattagtaccaaaccaagactacaccaaagttttcaactccttcacaaacaccatatcacaattttactgatgttatatatgtataatagtaaaaaagcagaacaattgattgattgtaattaatatatataaatatatatatatatatatatatatataaatcattattgatcaaagccataattcatgggaatctttctttttgtaaagtaatactaaatatatccactgctactacttttaattacttttgtacttatggctaaagataatctcacactttagtctttaataagtactaagttatttgttactactttttcattttacatatgaaaaaactcttctatattgtcttgtttccctttatattatcttgagaagatatactcagtaatataaattaattaaattagtattatgtactctatnttactaatactttaatgtatcaactgaaagtgtagataa

SEQ ID NO: 214245 - DNA, 611 bp, Cannabis indica
tgtgaaataaactatttaaacacacaattctatgttataaactattctaaatttcttaaaatatcttaaataactacaacatatacgattataaaaaaattacaaagtacatccgtcaacaattttctagcgatgataaggggaaccttacaaaatgtgacatatattgctattagtccaatacaatattaagtaccatgttaatttaataataatataaaaaaccgataaccaaatacaatacgttcatgtaaaaaaaaaccctataataataacaataataattaataatactctattatttcttactttaatatttatttattttatttaaatattattattaaatattagtagtgtccagaattttttataagtgtcgctttataattagttaattttatttcttataaattattttcttaaattatataagaattgattttcaattacaccaacaataatatgagacttcaaaaaaaatattaacactaataatactttttaatatttcttattttattttattttattaatttgtagatttcttttttaaataccacagccgcccagaacagccacccaaattgctttctctctctctctctctc

SEQ ID NO: 214246 - DNA, 854 bp, Cannabis indica
aatacaatctcaatatttgaaatgataagattttctatctcaaatttgtcgtctcttttcccatggattctgctactatttataggaatataagttgacagttattccttttgagattgatgtatttagaactgttaatgaaacgtggacgttccccacatttcattcattcacacatgagataatatctaataactacccaattgttccttatttttatcctttagacggttatgctgactaggaaggttgcatctcgtcaaacatgagttctccttctgtccatcttaataggaaaaacactaagggttggaaatatttcatctcgctatatcccttcatttatattattgatgcgagaagatcatcatgctatgagtaacgcgaggtagttgagcgtcataagttcttctcttctcaggagagggttaatgactcatgaggtccttgactgtctcatcttgtacattttattactctgtctatcccaaggtaaacatgtgtctcatcaatctcaggttaatagttattattcttgtctcgcataagactaagtagtcaacgagttttaacactttctatcaaacttgtacttaattgtaatgagttatttaaaattgcatttattgatgcaatgtcattattatattattttagttggttcaaattctttctgttggacacgtgtcagcttctggtacattgccgaattttaggtataacaattgtcccctaaaaagtgctttttaattaaaaagaactttttaaatgatcacaggggtataataatattaaaccctttggaaaaattgcacactttgagttttggtagttcaaaattttgaggcacatca

SEQ ID NO: 214247 - DNA, 1530 bp, Cannabis indica
accttgttgaccttagaggcctactttgtggaatacaggctttatccgacagattttgaaccttagcccgtgaatgagaagaagaggaagtccagtgctggccgggatgagggagctgagcaagagaaggagctcattcaactaatgtgtgaggctaagttgaagggaggggccagagccaagaagtatgctcaggagcattctgagcaggagaaggagcttattcaacttaagcgtgaggctaagttgaagggaggagctgtggccgaacaacatgctcaagagtattcttagaagaaggatgaggctgaggaagagccggaaagattgctcaaaaagaagaagaaacttccgaccgggtagaggcccattgaacatacaatctagatcagggagcccggtctacctgctcagccctccacccctgtagtaggaaaggggaaagtcgtccttgaggagcaagaagactcgttggatgacgatgccccatcagtacttgttcggggaaatgcccctgccaaagtgtagggtactcgatcttgtttttaacaatcttaattatcatgctttcatatttcttatgcttttttctgattaagttacttttgttctatgcagacatgtctcagaaaatgctcgaagccttaaagaagagagtgggaggaagctcaggcttatgtcctccggccaagaagtccaagggaagtgagacaaccccgtccagagagaaggcgccaactgaagtggtcattgatctctcagaggaacaaaccattgtagaccctcctgtctcaaaaatgactaagtccaaggattcttgaggaggtagcttggacaagtcagagcaggcgaggggcgaattcgagatggtcatgagcgggtccaaatagatcaaggcccctgctccacctcccgtattgcacccagagaccaaaatagccagagaaatgcttactcactatgtgactcggtcaattcctgaggtgaacgagcagttggctggggcagacaacgacctttctctggagttggtgatgggaggagttctgaaggagctttcgagggtgagtcctttctgataacattctttctctgtacagaccggtttgaagatggcttatgcttattcccgagctaatttggatgcctctaagaatgccgctgtttgcaacactatgcgaacggaagtggactcggccaagaaggacaccgaggaggcccgggttcagcttggggctgtccggatagagctgagagaggtcaataagaagcttcttactgttaagaacaaggtggccgaactgacccaggatctacaagccatgccatccactgaatagctcgaagccgacattgcctccttatctaaggaagtgaccaaccttcaagaagaatgggagactttctagacttttccgcaggttggaagaagagaagaaagccaaggaggaggagcttagagctgaggttgagaagtattagacataggcttggcagtataaatctaaagtggagaggcttggagggaaa

SEQ ID NO: 214248 - DNA, 736 bp, Cannabis indica
agacagctttcaacatctcttttctgctttcaacaccatattttcgagttgctaaagcagctggatggttcttggtcttgtcaaatggagtagaaagctcatcttttattctttgtcctacatgaaaggattggaatgcttccacaaagtcattgacagtgatgaatctataagattcttcttctcttgcccaatactgctcttgatcttttctcgatgttacctagtaattatgatcatcaaatgacatttagtagatgataacagtttcaacaacaaaataaaataaaatattacatttacattacctcttgcagaaagtcagcaatagctttcctctcaggacatttaaacccaacagtttcgaaaaactcaagcacatgttcgcgaggaccttggtaaacaatctgacccccagataaaagaatgatatcatcaaaaaggttgtaagtctctggtgccggctggagtaaagagatgacagcagtatcattcaaggtgtgaacaatttgcctcataaaattgatgatttgatatgttgttgagctatctaaaccggtggatatttcatccatgaacaacacccctgttggtccaacaagcatctcacctgatacaaaagcatacattttttttaactcgaacaaacaagaagttatagccaaaattgttacatgttgtaaactgtataggttgataaatgtgcacctgtcgtaactcgttttctttgtcctcc

SEQ ID NO: 214249 - DNA, 765 bp, Cannabis indica
ctatgttaatttttataattaacacaattttactattattttaacacgatcttgtgatgcttgataccataaggtatcttttttagctcattcttttattttagtcttttatgttagttttctatacagacttaatgaaactgtaatctttctttttctctctcccatcttttattcttttctataattctcaaataattatcaattaggagtagtgtgaaagaataaaatcacatgtttgtttctaaattttagtttttattacaacctcaaaataatacatattatatagtttctgtcatgttctccaactttaatggaaattctctctccctcacccatattaggtagagtgaaagggtttgaaattgaatgtgggaagctggtggggataactccataatgaatattataatctgtgtgaacatggccattctgattgacttttgatggggcatgaaatttataaattgttattagacactattaatgctcagtattttttataagtgatggtcgtcgattgattagcgatatttcttaaaaattatttattttttttcattttagggttcgttcggtattgacttctatggcacataaatatataatattttactataaattaaagtttaaatataatattatatgaaaaatatgtatatataattctaatttaatataatacaatgcgacttgtaaacgtaacgagctattagcatttatatattataataatagcatacttaggactcgaacctagga

SEQ ID NO: 214250 - DNA, 687 bp, Cannabis indica
tctctttttataggtaaatgaggcccacaaaaataagggaaaataaaataagatgtttttgaccgttgatgatgatctaacggtgcaaattatctcttgacggtgatggccattttttggagcctgacaagtccaactgcgggttacctagagcttactttcgtaactctcttggggatgaaatgtgacaatgatagctttagaattacgattggagtgtgagacatgacttaatagaccattgaattagcatcaaaactcaagttaaattgtgtcaatcgaatcaatattgagtgtgttattatttttttactgaaggcagttcatgacctaatgtctaggttgatatctagcgttcaggttgacatgccagtacccaagttgacatatggcatcaacctagatgctaggtaagtgtaaaaatgcccaatggatgtactttaagatgcctaagtgatgttttgacatcacttagtcagtttctatattctggaacagctggtcaccagttcttggagatgttgctattctgcggaaatgagagactcaaaactctttatttccgagtgatctaaaaatgagaaatgcaaagttgtgaatttgacttctttgactttattaatctttgtgttggaatttatgccctaaaagcaagtaattattggataatatataaaagaatatatg

SEQ ID NO: 214251 - DNA, 867 bp, Cannabis indica
tgttgctgagtgtaaccttttgcagccaagcgagctttgcacctttcaatagacccatctgagttatatttaatcttgtaaacccatttgttacaaatggtatgtcttgggagtaatgggacaacaattcaagtttcattggcttctagaaaatcgatctcattgtccattgcattgttttacactttagatttgcatgcttgtgcaaaagtggttggttcgatgaaatgtgcagtagcaaggacaactactagaaaagaagctgacaatttgttgtatgataggtagtgtgaaagggggcgatgagtgcttggggagtgaatggccatggtgcagctgtagtcctacaaatatgcaggtttctgaagaggcctgccaaatttagttgaagtaggtgctgttgctggtaagtttgaagcagtatttgtgtctgttgtggggatcattttgtagttagggacaatttgcttagtttgattatgaaaatttatttcttgatgaagaaaaacattatatcaaatttaaacgcatatatagtgatgaatgttaaaatataacaaacttcaattaaaaaatataatatatatatatatattactacgataatatgattttaatcgtgtcaaactcaacccatactaaaattaatacaaaatattgcctcatgcatattttgaattagcattaattagctactcttttatttaattttacaccacttttattatattattaaaagcaatgtagcttccataaatatatatatttatatatatattaaaagcaatgtatagtttttacttcattttacaaaaggaaaattttatattttgaccctaataagatacctcatatcaaaatttatac

SEQ ID NO: 214252 - DNA, 741 bp, Cannabis indica
atatgaaatcctatgatcttttcttataactttggcatttaccaatccctccgaagtcacagctcttcaagatctttactggaatctcaaccttccatcagagctgaggggatggagaaccgagggtggagatccatgtgatgaatcatggggttttagataattatcttaattgagtgaaattgtattgcttatgttgattaggcacagttatatactatcctagagctatgtcgtgcatttgatcgggtatttaaggagcatttggatggagggtaatattttctcaccttttggtttcctcaacaactagctctactgtttcaacacgtcaggtcttcacatatacatttagtatatttattaaaacatcgttttagatttgtagaataatttttgaatactgaactgttccacctagatagatttttctgtttttttcgtttacatatgaatttgaattattcctccaaattttttataagtaagtattattttgttatgactaatatatacctaattatattttactaaccaaatataatagtacaaatattactttaataaaataaattacatgatcatacctttagatacaatttaaattaaataaaagaatattaaactttaaataaaattaatatttacgtgcctcaccacgtaacttctaactagtatatatatatatatatatatttgaaatctttgttgatatagtaaagcaaataatttaaatctaat

SEQ ID NO: 214253 - DNA, 536 bp, Cannabis indica
gtaaaataattttcaacataaatgccttatagaaatatatattcagaattatcagattcatatatatagttggttgtatgtgttaagtattatcttgattttatgcaggaaggttaaacattgctgatcttttttgaggtgagaacttatgataatgtgcatacttgtgatttggatgctgtaagagtaaaatatacaggattgttgttatcatttattagaaactccttacccttttaattttatattgatatgaatgtgaagagttttgtaaatttaaattagtagtcatcctctgttctatgtttctgtgtgtatatgcaggtggacgaaaaaagtttggggtgatctagaccttcgacggggcttcgcatttaacggggatttagagctgggctcgtgttcaatctagactattcatgtttagaaaatgagcaattttttttttagaaatgtattttgtaactgggttttagttataactttcattttatttcttattttctgggtttgaagtgttgatatcaagtgctatt

SEQ ID NO: 214254 - DNA, 506 bp, Cannabis indica
tgacacgtaagagtataactcgtaaacaagaagatcaaatcatctactcaacacttcaactaacgaaaggtccgaatacttaggagggataaaaaatgacgaaccagcaatcctaagggagttggctggccagcctccaaactttgtggggccagccagcctacacctggaaagtgcatggctggtcagagccttcatccgtggataacaagttaagttgcgatttaagcttcaacaactcaaaaataggggaaatatcagctacttctctattttggagggaataattaactcatttaaagtttattatttaattatgtaaataagactttattttcctatattgaagggatattagtggttaatcttcatgttagctctactattaagagcattagcctaaccttaattctctaagtgttaagtctctaagctctcaaactttaagtctaaaactcaactctttcttctcttctttctcatacgccataggcatactctctctc

SEQ ID NO: 214255 - DNA, 958 bp, Cannabis indica
ggtccgcacattttaattaaataaataatataaaaattaataatcaagcgtcacattattaaagtattagatcccattatagtattgaatcaagattctcggttaaacattggcgttccacattgtgttaaacttatcaaaatatttgactcatcaactaatataatttattaaatatgttaactacttttattgattttattagatatttaattttttttataaataacaaaattaattgacctgttaaactttgattggtttaacacagtatagaacatcacttttttaacaggagatcgtgattctatagtattaggcacttttaggtgtctaatagcaatgctctactttaaatttttactattatattctaaaaaaatatcaataatgataggattctttcacaaatacacaaaacaacagaaaaattataaaaatacagttgtacagaattttaaaatatttttacgattttataattttatttacaaaaaatacggtattttgatgtatttttatgttgtcgcttgttaattttttgttgattttttgttatttgtatattattttttgttattatttcgatgttattttcttgttccttttatgtagttttcttgttgtttagtgttgttttaaagaacatcgtaaaaatatatattaaaaaaaaatctttaaatgggaaaatgtaaaaaatttacaaaaaataatgtattatgtaattattccatagtgatatgtggacacataattcatacacaaatataatatacacgcaagtcacttttaataagtgagactcatcctaaataaaaaataattagttaaagtaacttgacacatgtgtatcactgatttgtgtatgcacatatcattactcacaaaatatatctttttttttttgcccaagcttccatttagcttggccctttaaactttttctttacattttggt

SEQ ID NO: 214256 - DNA, 920 bp, Cannabis indica
tgattgcaagtgcagtctccatttttttcttgttctttaaccttagaggtcttcatcgtccctttgtattcataatggaagaggccttcttcgtccccttggttgtcttgacagcaaaggtggtcttccacttcctcttaactgttgttgttatctcgattgttgttcacctgacgtggcatgtctacgtggacgatatcagcgccatgtcgcagtacagttcaccaacaagaaggccaagtcatctactcagcacttcaaccaacggggagtcccggcactcaaacgagatgacgaatgacagaccagccacctcaaggaggctggccagccagattctggacagcacaaggttggtaagcttgcatcctgcaggtgcatgatttgccagaacttggcctggcaggactttggtgtacaacattacacgtggatagcaagctagactgcgaattgggccttaacaacccatgaagatagaggaaaatatctattctcaaggggcattttagtcatttgtattttcataatttaatatgtaaatatctgcttattttatttgataataagggtttaagctcttctatataaagggctttatttaaaccctaaaccctacgtcataactaagttcaaaaccttaagtcttaagctctaagtttgagaactcatctcatcattctctctctcccacgcccattgcttctctccacacttgagatttgccatctttgattcctacactgtaaccttaagagagctatctcagatccccacctatagtgatctgaatagtattatctctcagtatttatacaactaaaaggggagtatgtcattacttgctaactaagggggccgtaacgtctataaaaatcttgtgttcttttacttttaatttcttattgtgtaacacgtgg

SEQ ID NO: 214257 - DNA, 550 bp, Cannabis indica
ttttatcaactatgttggacatagtgtgcgattagaccttatctctatctcggtcgcatattctcataagtttatgtcatgcaagattagctctactagagctatccatcaacacatcatcttttttattagaaattgagtctatatgtgacctttctataaaattgtactcatattttagactaaaaaatctgcactataacagttacatatattacattattgtaatataaaatttattggtgttgtaaaaagtgtctaaaatttagtacatatttaagttgtgtcaaataataatatgagtgaaatttagcatgctataaaatattactttttttgtttattaatttaacactaattaatgctttttacaaggtttttcacatttttttatttagttgatattatatatatttgaaaaaataaaaataaaatgaatttgctgtatttttaattaattagcaagtataattgcaaagattaagccaaataattgcataacattactcattttcttaatcaattttagcacaaaatttaaattattcac

SEQ ID NO: 214258 - DNA, 1314 bp, Cannabis indica
aaaatttggagtcagtaacttcagaattatgattggattgtgaaacataacttaatagagcattgacatagcttcaaaaagcaagtttaattgcgtcaattgggttaatattgagtgagttatgaccattttcctaaaggttgttatgggcccaatgcccaggttgacatgtgacatcaacctggacggtgggtgagtaggaaaacgtgtcgggatgtattttttttatgcctaagtgatacttggacatcactttccctgaatctgtgttttggtgaagctggtcaccagtttttggagatgttgctgttctgggaaaatgggaaactcaaaactcccaaatttttgagtaagtcactttgccgaaaaagtgaaaatatggaattttgaatttgactctttttactttatagctcttagttactataaaaaatagatgaatggtcgagacagaatcaaaatcggataagcaaaacccagtgcactaggccatatgtcaacctgggagctgggtgctctttttggagcttccaggatgtcattttgaaaaatccaaggttcttgaaattagggacaaggtctcctaccccgttttggaccatttcggagagaatgcttggagcaaaatttgcatttgagtgattgaaaccagcacatcaagttgattatcatcctgtgtgttgggctcagttttgaagcccctgtaattgttattttctccccgagtttaattgtatcttcgttgttttttatgacagaaaaaaaatgcccaaaacactttttcagaaaattaattggaaatagcccaagttgacaatatatcaacttgggctctgggcccagtgccaggtgtcaacctgggcgttgggtgctagttctagtttcaggcctcttggaagatctgtttgctccctagaaatagttgtatcttaatctttgatggaaatggagaatataccaggaagactttcagaaaaaaaaacctcaaaattgagccaacttgacaaaatgtcaacctgggcgctagacttgtgccaagtttcaacctgggcgttagtcccttgttttggcctccatgttggtctatttcttccctgaaaatcttatttccccatttttttatgtaagcaaaaaagatacacgagttggattttagtttgatgcttggaagtggcctaggttggcaaattgtcaacctggggtagtgggtgctcaggcacctagtgctaaaaaattaactttctcgtgaatatgattctgatgcctcaaatatgttcgtagtatgtctagttcatgtctcgatagctaatgttt

SEQ ID NO: 214259 - DNA, 637 bp, Cannabis indica
gactaatacaagacagtaaattatgacaatattgtaccaaaaaaaaccaaactgcgaaagcatctgaattgagcccgtgacagcctgcaccaccacaagcgaatccgtctcaatctccacctccgtcctccccttaagcttgatccaactcagcgcttctttcaccccaataacttcagcaatctcaggccccacaacaccaagccgactgcccgagatagcttcaattattttcccatcagccccacgagctacacacccaaaaccgtacttgtgttcctccgcaaagatagcaccatccacgttcaaaatgttattttattgttataaaaatagtttaaaaatattattttttttaaggcctaaattaaaattaactcaggactgaccgtgttttaaatggaactatttgtttccattacattctacatttgcactgtaaaaaaaaaaacaatttgtgaatatatatttacagaaaaaaaaaagcatagaatgtgtttcattagagaaatgagtaaaatcaaaaggttgtaatataatataaatgaaagtgatagtgaattttatttctggaaaaaagaaatgatggtggggttaaataaatagataatggaactaattttttagtttttttttt

SEQ ID NO: 214260 - DNA, 785 bp, Cannabis indica
tctcttcttttttccagaagggttgtgatatataaatgaattagtttgttacacttagtatatagctaaaaaaggcgcgtccatcgacctggactgagatccatacatggtttgatgatgatgaatatgttatattattagtttgcttttttggggggtccatataaaacttcttaattttactatatatgtattgtcacatatatatatggccatgtaaattttctaattaattattaattacatatatatgtcacttttgttttactgaatttatggtgttgccgactattttttttaatgctagctagaaaattaaagcgattaataatagtccaactatatgttgaacaaattattaggataaatatatatttcactttttaatttaatgcccaatatataatattgtacccgaaaaaaataaaaaaagaaaatagagaaagaggccgtgttataaatgaaacgttctcttcttttaataaaagctgaaaaagctcatacattattctgtatagcataatatagttgaagtagagcagtagtagtaggactaattccatatgggtttaattaaagagagcgttgtacatgttaattggttcgtgttcgtgtgtgtatagtttttaattaaagagagcgttgtgtttggttcgtgtgtgtgtatagtttttaattatgagagagttgccagtttgaggcaagggttggtgggtttaggggtttggatttattaggtttgagaggtttgtctctatagtggtgtctctttttgaaagtgaaat

SEQ ID NO: 214261 - DNA, 999 bp, Cannabis indica
agatggatttgaaaataaaatgaattattttccatattagtaataattttcagaaaattatacactaataatgatatgttacttatcctagtgtttgacaccttattgccaattatagcatttgtcaatttaattgagaacaaatttagaagttatatagtactttagctagagttatataaaatatttaaaaatacaacatatatgatttttttttcctatatatactatacattgtcgtgtgagttgtgagcaatgagatggaaccttatttacagtttagcttataaatatttatcatattatgagataaaaacgttatttaccgtttagctaataatttatcatattatttcagacctattggaaaaatggatgatcacatcatatatttttccaacccgatatttaaaaaaaataaattaagtacttttttttttatttaagaaaaaaaaacttcctttccaacctttttacccctttcaaaaaaaaaaattaataattgaagtttttcaatccaaataagcatgaaacttgtcgagatgcacaatactttttggagcatctgcattactcggatagcgccacctaataatttcgtttgtttttcttttttccgtgttattattattattattattattattattatttagctaaataattatgattataataatcaaaggattgtgttgtgttgtgttccattgaataattgagatttgagatattgtgtaaaaccacgagtgtctccctcactcatgataatgcatgcattcatgtggtttttatttattggaaaaacaatgataatattgttaagaggctaatatctaggcacgaaagccactaaatgaggccatgcaaattatatttctattttatctaaaagcctataaaaatatatatttagggtacgtaacataaattagttagtaattaatatatgcattatgccagacagcttattacattattttaagctttttctatagaaac

SEQ ID NO: 214262 - DNA, 525 bp, Cannabis indica
aattactcactgttgttagctaaaagcaaggtcaacaatataaattatataatgcatgcttacttagtcttacattgcatgttgctattaccattcaaataataataataaaacaaatttaattcaattctatcatatttttttaaatatataaaatttaaatttagacttatatatatatgaaaaaaaaatatctacctaattttattaacactttcaaataattatataaattatattctagtaatcaataaaataaataataaaatttagacattttatctaaattaattaataaataatgttcaaaaaaaaataattaattaataatttaacgtttaatttaaattttaagtttagacttatataaaaaatatctatctaattttattaacacttttatataattatataagttatttttgataaataataaaataaagaattacatttagatattttaagaaaaataattaattaattgatttaatgatgttagttgtaattattaattttcataaaaaa

SEQ ID NO: 214263 - DNA, 842 bp, Cannabis indica
aggaggtgatttgtgtgcaattgccaagaaatggtgatagttgtaccgaattggatccagaaagagatataacttgtaaatacttgaactttctacaaaggtaaggatctatcacgactccagatctagaaagattcaacaccttaagtgggctgctccaattatgttgtggaaaagaaccagtgagattggtattgtaaaacaaatcgagttgttgaaggtttggcaaactgagaacattttctggaagtttcccctgcaaatgagttccaactaagatcaagagatgtcaaagaagttgagagattcataaaggaatcaggtgaagtagaagacatatcaacaccactaagaaacaattctctgatattagttagatttgcaacagttcttttccagctagatgtctctagtttcaaatcataattaaaactcaagtcaagtgtaagcaagttggacaagtaagacaattggagagggacttggccaatgaaaccagagagagaaaggtcaaggtgaaccatatttgaaaacttaccaaattcagatgaaattgtggagccatcaaaatgattcccagagagaacaagagattggagatgagagagagagaaaagagtgttgttggagtgaagaatgccttgaagcccactgcatttgaggtcaaggcgtatgacgtggcctgtgacgtcatcgcacgtgactccactccatctgcaacaatccttgctctttatatcccatgaaattgtactattaggattaacaatttcaagatgataataatcataacagtaggttgtgccatggatgttgggcaaagagtttttaaagtggagcaa

SEQ ID NO: 214264 - DNA, 917 bp, Cannabis indica
tgtattattatgtattgagtaaatatattggagataacaacgacaaagactacagatgagatacgctgatgacaaccggtgagatacaataattgacaaatactctaatttttctctatactatcctatttattttattttatattaacaattttttaatttaaaattttatatatacattatccatataaattttaaatttcttaataaataaaatagaatctttgagttttatttttaataaataattctatagtataattttaatattattatatattagattaatttttaaattattatttattatttttataagtaattgtttttttaattattatactaaaataaaattaaaatagtggcacggaaaaggctatattacctaattttataatctcttttaaatattactatactaattttatttttgtcaaaaaaaaaattgtggtatataatttttttattataatatattaattttttgtgttacaatatattaaataatattatatgtaaaatatatatttgatgatataataaaatatatttatttattgtaattatactaaattaataggaaatactaataaatttataccacataattttattattatataatttattttttaaaaaaaacatgaaataaataataaatatatttttataatttttattatattttttttttaaaataaatatttacttaatttaggggaattctataatgcattctcttaaaaagagatacaccgatacatctttatatgttttagtatctgaaataattttttagttaaattttttcttatggtcatgtaaattatagttatttaagacatcctgtaaaatttaagaaattcaaaaaaatttaacacgctgaaaattgcgttctagaattatgttgcacgcgt

SEQ ID NO: 214265 - DNA, 546 bp, Cannabis indica
aaacagtcatcacatagggcaacatagtagcatgaacaagaagtatggataaacatcgctttattattatatggccgttgatagggaaagggggtacacagttgggcccctatcatgctggtaataaggtgtttcataagtcactcccccttaaagagcttaatagggtttcaaagaatttcaaggaacatacatgattttagctctctatacatatgtgaatggaattataaaaagaaaagctaatcacaaaagtcaccacgaggtacttggtacaagacttgactaatgatcaagcaccaagatttgattatgttacaaaatagcccctggtgggtgtgttatggggcagcatgttatatactaggcaccactaatgccttgtagcaatgctcatgctattaatagtgttgaacaccactatagctgcaatatccttattattataattaagtatctgacctcacataatttaatttaataactattataaaatatcattaactatttacaaggtgtcacttttaaagtgctaagaaccactaa

SEQ ID NO: 214266 - DNA, 621 bp, Cannabis indica
aatctatatagagtgatgaaatgtggattctcgccagttttgagacctactcaaagactagaggtattaaacgtccatggactaccctccataactcgttcaatatctatttcatgatagaattagaaaaaaaaaaatcaattcggttctgattctttaacaaataagtcgcgaacaagacaccacaacaaagccatcttgtgttgcatcatttgaaaatcaatggtgcgatctgtaaggaacctaccaaccaaacaccaacgatcatcaaattcaaaaaggtctacagtatcttcctcataaatgagaaaagcatcctaatcttctctcaaattcatgaaaacatattgcccatctcgatatccatttgttgtcgaacatccataataatcaaaagagccaagcaaaataaaattaaactaaacaagacaccttcataacaatagccttatcatgtcaaaaaaaaataagatcacaaatatatgggttggtgattttaattttgacaagattaataaatgagtcaggtttaagtttgatatttgcttgtaacaccaaagagcatctctaatagaggccaacacagtgagagacccaaaaattttaatttgtatgaactta

SEQ ID NO: 214267 - DNA, 883 bp, Cannabis indica
tagaatgaagggagagtttataagaaatgatgtgaagtaggaatgacagaaatgatagtagttattattgatatttagtattagtaataaattagaatgatggagaggaaataaatattccaattaccattttatcatgttttaatactttataatatatataattttgaaaggaaaagtgtttaattttttttcttttttcttggattccctatttttgggggaatagaaatttggtaatttggagggactccctccatttcttttgtctttttatctctcttttttgccatgcaaatgatttaaccaatctctatattcctctccctccacccctcttcctctccttctgcctcctctagcaaacatagtgttagagaaaagaatgtgttgaatgatttgatttttttatttttttttaaaaaaaaattatcttaaaggagctaactaatactatgatatccaaacaacagtatttttatttgtttaactaaattgtagtagaaaatgttgaaaggtaccagttttatatctcactactataaaaaaaacgcctatttctattatttttgtaagaccatcacaaataaagttatgcgatcacgattttaaacagtcatttattagaattcccgaacagtcacattttaaaatataaaaaagagttaaaatggtctcctcaacgattttaaaccattatataaaaactaaaaaaaatcaattttgttattgaaacatttagatctctctacgtatcgctctccctcactctcactcgaacacaaaaaaagaaaaaaaaacttaaatactatacgacaccacgccagccaaactcccggccgaccctacgccgtcgtcgtaaactctgtgaactcccaacatt

SEQ ID NO: 214268 - DNA, 862 bp, Cannabis indica
aaaaaaaaatttccaaaagaggaatgtgtccatttgggctggacgtggtgaatcttgcctcattcttcaaatataatataatggtataattaatagaaatagtagaatgtatactaattcattaaatagttatatatatactgattttttttagaaattacatctgaataataataataataataatcataataataataataataataatgtatattttagtatataaagattgaacacctcattcctttgagcgcgcgggtcactcaaattttggcgcctaatttttcactttgtctctttttgcttctttttttttcctttgttttaaactattttcttttttcttttttattttactttatttctctatgtttattgttgagaaatcccttatgtctcattctttgcctctgacgatcgacctctgagaaagtggccattcttgtacaaagagagcaagcccaaatcattgtccagcaaactctctcttcaaactgccttaattttgattttgctgcacccaaatctggtgaggtcttttttttttttcctggacttctgactttgaatcctaaaaagtggattatgtaaatcctttactttgattcattagcatcaaaatgtataattgaaatcaattgatgcttgagtgagattttttgcatttctatttgtatttgattaaagggagtttctctatttctcaatctctcttttatatatactttctcttgatctctcttccttttactctatattcactacaaaaaaactgacttttgccggcgcatttttgcaccggcaaaagtacactgaatgcaccgttaaagttttgcatctgagaatcttggtcggtaaa

SEQ ID NO: 214269 - DNA, 674 bp, Cannabis indica
aaaaaaaaaaaaagaagagagacgagtgggtatacttttttagaaatttattgaaattgctctataaaagaagtttatgttgaatacaatttagttacttttttttagatatttatcgagatttctctttaaaataaatttatgtagaatattatttagtatataataaaatacattttagtagtccataaaattagttggtacattaaatttcgtttaagtgtcaaatttgatatgttgaattcactattctagaatttttatggtaatgtcttgttttttcataagttattttagaaatttttaaaaagtgttttataatattaaaatataatttagtaatatttaaatatgaaataattacatgtaaaaataaattaacttattaaattagttggtattttaaatttgttttagaagaaaaaaagaatagaggaagttttttttaatattaaaaaaaactattattaattttatgtttctatttaaaaaataaaaaagggagcaaaaaataaaaaagagaaaaaacaaaaaccaaactatcaacccatttgcattgatgcgctgcttatctttgccctgtatacacgttcttcaaaaaaataaaaatatcacggtattatggtttaaataaaagaagcattggtatttatgggattaatttgaaattttag

SEQ ID NO: 214270 - DNA, 868 bp, Cannabis indica
attgattgacatcgaatatatgtaccaacaatgacacggttgtgaatgtgatttttgtaataaaagaaagagaaatgttaaagcacaccagtcgcaccttatgtgttaatatcgctattgatttaactaagtattgagttccatataatttaatataataatttttagagactatcgctagccgatcgcaacgcgacatgtcgagaagatgttaggcactactagtacctaatagcaatgctataaaagaaaatatgtacatgtagaaagtacgcaagagcacactatttatttttttaaataaaaaaataatcaatcttaattggtgttactcgtaaaaagtattattaacaaaatttaagtttttatacttattttttctgtttaattaaaaaaatttattattacattatatggaatgatgttgctctattggcggaaaaaaaacaaaaaaaaaattgttaaaaaaagaaaaattgagtttaacctaaaattttttatataatatattttttgatgtagtgtaagaaaatatatttttcgctatttttttatttaagtatagaaattttttgacttcatagctctcagttactatgaaaaactagattaatgctcaagaagaaattagaattggataagcataacccagtgcgccatgtcacatgtcaacctgggcgttgggtgctctttctaaagcttctaggatgttgttttgatacttccatagttctttgaaattgagaacaaggtctcctaccctgtttttgaccattttagagagaattcttggaacaaattttgcatttgagtgattgaaaccaacgcaccagaactattgtcaacctaggcactaggcccacgcacc

SEQ ID NO: 214271 - DNA, 587 bp, Cannabis indica
aattactttgtatttttgtgatccatctaatgaatttaagctctgggcgtgacctagtggactagtaacaatctgcaagaattattgatatcacgtacaaatatcttgtgtgttattattttcctacactgtttattttttaattttattctacaattatagagttgtgttctgtaactacaaaataattgtttcagtatcatatttattatttcgcatttaattaattgactaattaaataataaattagtaatattgaaattccttgttcaagcttagtaatattagaaaattgagtttaggatcctatttttataattttaaaaaatatagataatttattttgtcatttaacaaaataaaggatttacttggtaacttatgtaaaatacagggtctaaaaaaatatataccttactttaaaatgatacggggaatgttgatgctgtaaaaatttatagaataaatgcttgcaattaaatattgaagttctttaagaaaaaaaaagaaatttacaactcttttacatattattattattattattattttggtttgaaatgaatatcttcctacatcttaaaat

SEQ ID NO: 214272 - DNA, 578 bp, Cannabis indica
tattttttaaaatattacaaataagattatgaattgatttttttgtaaaaataacttaataataatctgacataaaagtattatgacaaaaccggttaaatttcttacatttgctcgtattaggaattgttttcaagttgattatattgaaaagaaaaaattgtcaaaaattaaactcagggtcttatttatactattttaaaaaatatagagtcttttaacaaaacagagagtccaatctgtaatttttgcaaaacacagggtccaaagtctaaatgaaatttacccttattttattgagaaattgtaaaaaatgacttatttttatttaaaaatgatttgatcaagttttaataatgttttcgtttgtttgagtatgttttaataattttagatgtatttagttaaaggtaataaaatagaatagaatgaaaaaaaaaacaattttcatttcattcttttgttttgttgcatattaaaggattggaatgttaatctaatagaatgttctttctactattttggtagaataactattttatttgtaaataaaaaaaaataccattccaatgcatgat

SEQ ID NO: 214273 - DNA, 498 bp, Cannabis indica
tatataagggtgtactcttaatgggtattacccatgaacatgtaatattagaaaaaattgactttttaagtttatttttctatctagttaaaaaaatctctcatttttacattatatgggctaggtttattccatcgactaaaaaaaatcaagaaaacaagtttttacgggaaaaaaataaaaataaaaaattgaatttaacttaaatattttgtatacaaatatatttttgatatagtgttaaaagtaatatgttttaatagttttttttttaattaagtagttaaactaagtataaaaatttaaaattttcttttattattcgccattggatcaaaatctaataatgtaatatttttaaaattgatatttatagttaaatttatttagaatctttattgagaagtgttccatatatacatatatatatatagatatatctttctattattattttcttaaaagaaaatagaaaaatttatgatatttctaaaaaaa

SEQ ID NO: 214274 - DNA, 579 bp, Cannabis indica
atttaaatatattcgtttaaaagataaataataaattaggtttttaacgtaactttgtattattaattaaaaaaatacattctatatatggaaagtaaaaaagatattcagtttattttttaaaataaaaaaataaataaatattggattattattataggataaatttaaacaaattatagagtatatattatatattcatacgtattttttattttgaaaaaataatggttaaaaaaactgaattgttttttttttaaaataatatatattatttttttaaaaaacaagtttaaacctaatttattattattatctttaatttttaagttcttattcaattataattatataaatttaaaagacatatttttactatataaagaggaatgaaacaatgtatattttcatttattcaaagcaactctctttctctattctctttctcttctcttacgacaacttcatcaacctccgatccgacggccgccacctcttccgatcacctccacaaacacacggtaattataatattttgaataattaattaaccttttttaaataatcaaatgcttttaa

SEQ ID NO: 214275 - DNA, 533 bp, Cannabis indica
ctctgaaactaacacaaatcgaccacataaatttttttggggaacccagcaggaaatctgggtaaccggttttacaggtcctataaaacccgttagctggtttacactagaaaacccaaaaaaaaaaaaatccaaaacctaaccaaatcaattccaatccttagcaaaccttccagacctgcatattattccccaatagacatattccaagcaacaaaacaactacctaagctcagaatcaaaaattaccattaaagagctaagcttgagttctaaaactcaaagcttgcgcaaacctaataacagcccacaaaacaagtttaattcaacacaatacatcacagcttaactacagaaaaaaaaaatcaaacaacaacaaccactatagaacacaaaactccaattcatgcaaaaaactattttctttaaattccagaaaataagagtaggagtttaaaagactttaccttggcttgagatcactaaaaactagctgagaattagaagaactactgaagaaaacaccaacccta

SEQ ID NO: 214276 - DNA, 716 bp, Cannabis indica
atatataatgattgcatataaattttttggtatgtatacatattttcatagtggtatatataattttgttagcatgacatatatattttttgagtattaatgtagtattcttataattttttgtggtatataattttattactacgatatattaattttcagtaatacgatatgttgaagtaattgtccaaatatcaaatgacatcactgccctcaccgaacttaactaacttaaccaactgttagttatgacagttggtgctcgggcattatgaaacactgatgcaacatcagtatttaaggggccattctttcacactgcagggattgatcttggagaagtattgtacagttagaaagagagaattttagagtgattgagagttgtcttgagtgctgagaaattggagtgacattattctatgatcactgccattagagagaaaaattactgaaactttgcttctctgagtgtgtaattttgtatctgctgtaatctctcacattgaagctcaatcaaataaaatgctcaaagccataattgtggctgcttctggccgaggatgtaggcaagttatattgctcgaacctcgtaaatcctttgtgttctttatgttttattgcatatattttctggtttaaacattactgaatagctctgattattgtcattgctggtttcattgatcattcttgttctacatttgttcttgctg

SEQ ID NO: 214277 - DNA, 817 bp, Cannabis indica
gagcttaatttttgataactttttttttaatacaaccaacttgaagacaatacttaatacgaacagatacaaaaaatgtaaacagttttgtcatatagtacttttaaatcggattataattaaattttattttgacaaaaaatcaattcaaggtcctatttgtactattttaaaaaatacagagtctattttgtcatttaacaaaacacaaggtccaattggtaacttttgtaaaatagagggtccaaaatggtatttaccctttaaataattgtgaaaacttcattaaatcaaatcatataaaattaagtatgcaattataataagcaaagagtgactactaaaaatgcgattaacctcaacaagagataatcgtgccaaataatgcgcaaccctattagcagatcgcttaacaaaacttaacgagacattgtcaacatcagcaatcaaagccgtataatcagaaataatatggccatatggagaagccataattttattattttgtaaatccgctataactttaagacaatccaactccactatcacattcagccaaccattagctttaatccaactcaaaacttattttattatcattgcctcgacttcatgagactgaagcgctgtaatcttgttcaaagtcttggcttgaacaaccaaaccagttgcagaacgtgcaaccaaacccactacataatgcctctccataaaaaaaaacttgatccatctacgttcactttgatgattgggaagtcgggaggcatccaacgatccaaccacacctcttgattcccactgtgagagtcaatatcag

SEQ ID NO: 214278 - DNA, 628 bp, Cannabis indica
aaggtctactagaacatccgtactattatatatatatatatatattatttggtgttctttttctttctttctttctttcttttttttaatatgcatttttcattatttggttttctaataaacattataatgcatgcatgatgtagttaattaagtcgtacgttatactcagccaatcattccaaagccccattaattattatacataataaatagttgatctctctctctctctcttatatatataaaaagtttttaattacaaaataaagaaaaggtaaacataatataatgattaatttaaattttttaaaaaaattatatgaagatcatgaagatgtgccaaagaaaatatattactaaaatgataccgagaaagtaatgccattttaacaattctcttaactaaatgcattgagccaaagatatacatattaatattaattaaattacatacaaatatctataacagctagttaattaagttaactaattaaaccgttaatgatgatgatcaaactaaattatttatatctcatactactataattttactacaatacatatatatatatatgtatatgtttacttcaaatccaaattaacgtctctctctctctgatctctc

SEQ ID NO: 214279 - DNA, 746 bp, Cannabis indica
ctttgtatataaaggtgtgatccgccatgaaataaaagggagaggatccttgcaacagtggactaagcagaccgagatctgactaaaccactatacttccctttgtgttcattatttttccagtcttgtgctaagtatttttgttcttcatttgaatacctgccattctgggtcgactactcgcacttattatacacatattattactatttattttggtgttgtaaaatttcttcatctacatttggggccgtctgtgggaacgctgatactttgctgatttagaaggagaatcaccatggctggaaattagatgaatgaatgtcttaacaatgaatcaattaacatagagacgatttccacttctgggaaatagggtacctcccgtcgataccatcaatggaggagaaggacgaacgagcgtaaggccaatcaatttgttccctgaaactgctgctcacgttggggaaacatccacgctagcggccacaataggacagttcccacccatcacacctgtcgtggtatctgagggcattgttcagttaaccactgatcagtacgcggctatacaggacaaaatgcaggcttatagcccgaaattgacggacggaatagaacatggcatcctccttgagtgcccaactaccccgctcggataaatccctcaaagtaacaaaactctagacgtcgaactaaccgtgctcgcagggaacgagaacagatcaagaagggctgattaaaat

SEQ ID NO: 214280 - DNA, 817 bp, Cannabis indica
ttcttaaactctcacataatagaaatatgacttataaaaattgagtataaattaaagagtaataaaagaaagataaaaattaaaataaaaaaatgaaaaagtaagtatatcgtataattctctctatatctttttagctgtgcatgttcataaaaattgaactttatggtagtgtataatatgatttaaatttaaaattatgtgaaatttaatataaaataattagaccaaattttaccggacaatacatatattttttgtaatttactgttttaacacttaattaataacttttaatatttttatttatatatttaatataatttttatatacaactttaataaaaatttaatattttattgatttttttaaaatctttttataaaataaaatttcttttacttttagtgtattgaagtatagttaaaaaatatagggtaaatataatttatattttaagctaaatttagcataaaaatttatggattagagaggttcttatagtatttccaagttgctgatataaataacatatttattgatattggtggtgggtagctagaaggaagttttattattttaatattaaaattgtaaaaagtaaaaaagttaagaattaataggaatagtctctataccagatttcaatattgggtgctttgttcaacattatatttctattcagtaaaaaatgtcaaggaggttcaaactagtcggcttcaaattataacagaattaaaccccaattatatacatataacttaatacttacaaaaatagctcttagttaatttaccaatttaagactttaactgt

SEQ ID NO: 214281 - DNA, 461 bp, Cannabis indica
ttcactaatgcccgttattcagtcaagaaatctcaattcgaattgctgatgtagtatgatatctaagtgaatgtgttatatataatagagatatataatagagattatatatgacaatgattgatatttaatttagttatctttatcaaacatgtcatttattataaaaatctaattcatatcataaggatgatcaataatagatcgacctaaattttgagtaatcatgaacttttgttcatgttattagtttctttgattcattagttaaaatttctcaaagaagataattcttacaacttctgttttgagaatctaataatatagatgactaggaatatgatctacattatagaatcctaactttccaatggatcaaatgttagttcctttaagtgttaattctagagctgaaaagtgtgcataaatttagattggatctaaattatactttcactagt

SEQ ID NO: 214282 - DNA, 614 bp, Cannabis indica
gtctggttcttggttctcgattcaggtttaggtcccaggtcctaggtgctgggctttatccaggtccctgtctaggttctagtctggatgtgggttcgggtttgggtctagttccgggcccaggtctgggtcctagtcccgaccctagtccagttccaatttcgattccgattgtggttttcggttcgcgttcgggtccgggtccgggtcagggtttgagtcctggtccaagtctgggttagagttagggttatggtcttgatctcggtctgggtctaggtctgagtccgagttttggtgggggtcccaagtttgggtctaggtgtgggtctagatataggttctagatagggtgcgagtcttaagtttcgatttaggtcttgaattcgtggctcggatctcagatcccgggtccgggtctcccatctacatcaaggtcctaactcacaatacgggtccaggtcctaggtcctagtccgggtccaggtttgggtttgagtcccggttcgagtctcagttcgagtcctggtctaggtcccagttcttgggtccgggtcccatatctcttgtctaagtatggttccctatccaagtccaggtctcggactgagtcc

SEQ ID NO: 214283 - DNA, 417 bp, Cannabis indica
gtaatatgagaaaaaaatttaataacaaccactaaaatggaaatataaattttgattttgatttatttttttcaaaagaaaaaacatttgtttggtaacttttttttttatgttttttatttatttaagtgaggagagaaaaaataaagtaagagatagtagttagagaagctaaagtaaatattgatgaaaaatacaaaatagattatgattaaaaatatcagtttaaataaattttgaaaataacttattttattttaattttttaattaattttgtttcttattttaaaaataaaataattttactaaacatatttttggaataatttttattttatattaaaagatgatttttttttaaattaagaaaagctattaaattgttacagaacaataattttaaaaataaattcaa

SEQ ID NO: 214284 - DNA, 538 bp, Cannabis indica
gttgttcttagttgatattgcatgcattatttagtataaaagttcccgtggatacgaactttgatacttatcattgtatcacttgtttgtgattgtgtacacatgcgcaattataaatcaaaataattttcacaacacgtatcttctaattcttgtttcaatgactctcaataacaaaaattggatttagtagctaagcctagacaataaactgtattatataccagattactttataaatcatattacacatactaaattactttttttcttaaatcgagacatcaatttttgtaagtaaaaattaaaattgtacttgtaaaaaaacaaaatctagatataatgaaattttaatggtaccagggtaataataaacttaactgaatttcaaaatatagacattaggttactttcctatataattaggttacttgtaaagcattacaaacatactaggttactttttttcttcttcatttttttatttattttttttttttttaaaaaaaagtttaactctaaaactttgtaatcaata

SEQ ID NO: 214285 - DNA, 955 bp, Cannabis indica
ggagtgatattggtgtacaacctacttctaaacaaaatgagagaatcacccaacttaaaaaaagaaaaatatttgaaggctctttctcacaatgttcttgtcttaagaaaattctacgttagtgtaacaccctgctagtctaggcgtgttaacatgatttttaacttaactgtgcaactcgtagctaattaacgagtttattgaaaatcgtgaataattaaacctttaattaactaattacaaataccaaataacatacttggattaaactgggatcccgtttacaaaaatacaaaagttttactgtgcaaattacaagggtttgtcgcccagcgactatacaaaataagcatagccgtctcaaagaccgtacgctccatgcctaatcgccccaacatgtacaatcttcatatgctcgctctcacgattgctcaaccttagccttgcccttacctacacatgcaaaatatatttgtgagtcgataaactcagtaaaaataaagcataaataataacatagcaatacccctgattataatccagtgcccatacacctaaccataaccctattcccgtttccgacacggtactgagtctagaacatttgtacgataatactatcaaccataatatcaacctatactcagtgtgcaagtcatactctaagtgtaatgatgaaatagcgttgatcaatatctgagtcaaacatacatctatcagtatccaatataattctacgtatattgataccgctatcgatgtaatctaaaaggcttagtaaacatgtacgctaaatgtgtaaatacatatgcatatcattatactaatcttaccttgcttccgaattcaggtgtgccggactacctgagtggaacagctgctcgacgagttacagacccctaaatcacattattcgcaaaactgataagtcacccgctaaatcacgttttcgggg

SEQ ID NO: 214286 - DNA, 740 bp, Cannabis indica
ctttttttaaaaaaaaaatatatatatattattattaaggatatttacataaatataaaaaaaaaaataaagctaatttacataaatatagtaaacaaatttaatagaaaaaaatataacatttaaaataaaaacttaacgtatatggaatatgccacttcagattaccataaaaaatattaaactttccttcatatttttttctaaaaaaaaaaacaaataaaactacaatgatcgtcggagttgtcactggaactggaaagtcgccgaagtttgctatcggaaccgaaaagtcgccgaagtttgctgtccgtgccggaaaagtcatcgaagtagctccggtgtcagaaaagttgctgaagtttgttgtcggtgccggaaaagtcgtcgaagtagctgctggggttagaaaagttattggagttgctgtcggcaccggaaaagtcatcgaaattagcattgtcgccggaacaatcactaaaaaaatcacaaaaaaactgatttcttcatcttgaaactggtttcttggtatttttacggatttgattgaattggatttgagttactatgttgattggattggatccaaaatataaaattctcattagtgcgaatcggacgcactatgaacaaaatagtgcagattgggttggatgaacacccctacttgagaccaagtaaattctattctaattgagagatcaaaactaaatagtggtacactagaaaaaaaaataaaa

SEQ ID NO: 214287 - DNA, 737 bp, Cannabis indica
tgttttaaatcaaataacataacttaacgacaccatcgattattattgagtatgtatatatatatatcgaaaattcactcccaatctcaagaacatacttatatcgagtaaccattgaacctatcgtagtttttgacaaaaaagttaaaaaaaatgcaagaaaaaagacaaaaaattcaacatagcaaataaataaaggcacaaatcagttgaaaaaaccctttaaacatgtaaaaaccaacaccaatgcataaatgttagagaaaggaacaaacttatgaaagcttcctctaagtaccaaaaaataatataatggcaacaagagtgggtggtggtcaagcgcgaacctgggttaaggccggctaggcctgtacctaggacccacccgaatccatgacccaaagttctatgccatattataaatagggaaatttacatggtatactaacttttgccatttttttactaaaaataactgccaggcggtatttattacttttttactgtgtttttttataagtttcatactgcagtatactgtgttaagtttcactggtgttctactagtgttttactagtgttcaactgttgttttgagttaaaatactttgtgttttactggtgttttataaaaacaaagtatttttgaaaaaaattccgtgtgacagtatttttgtaaaagttaacccaaattccagtatttttgtagatttcccttataaatatgtagagaaaaa

SEQ ID NO: 214288 - DNA, 676 bp, Cannabis indica
taatcttcactcaagctatcattagcgagaatctaaggtgaggacatcttaaggactggcaatcatactaggtgtggtcatttataaaatttctggtgacgtctttagggactaaccaaagcaccgatagctcttatgaatttggcgttcggggtactcatggattttcttgatagatgtgctatagtaaatatcgatgatatcattgtgtattttcaatcagaaacagagtatgagcaacatctacagatagtttgtagttactatagacacatagaatgtgtatatcatattaagaagtatgaattttggttattctgagtgccttttaagggcacgtaattagtaaagatgggatcacagtttatctgggaaacaagtaatttgatgaagactggcaaaggccaaagatagtcactaagtttagaagttttctagatttagatagttactaccatttcctcgtctaagggtttctaagatctcaacgccctttacagggttaatcaagaagaaacgaatatttgtatgaccaaacaattgtgaaaattagattcgagagctgaagcaatgatgattgattatgattttagtgtaagcttaggcattagatcaagaaaactcgtggtgcattgtgaggcatccaaacaggatctggagtgcattctgatgcaag

SEQ ID NO: 214289 - DNA, 584 bp, Cannabis indica
aaaaatctgatactatagcagcaggaaatgccgctgctagtgtcgaaaaatctactactgttgtagtaggtagtgccgtggaaaaaactgttgctactgttgcgggaagtgctaggtttggggggggggggaagagaagtgattactcacaaagatgcttggcaggtttttaaacacaaagggtcgggttcctctaaaaaatatggaattgaacaacagcaagttctaaggaattcttttgaaatgcttggggaaaatcagagagaggaggtgggtgaagaggggtccttttttagattctgatggatagtagcaatattggaagttggaatgttaggggtttaaataaaaaagagaaacatgaagcggttttggatattttgagattaaataatgttggagttggagctcttgtagagactaaaataaagggtgatagattggttgagatgatgcaaaagaggtttgttaattggagttattatactagcaatgagatcgaaggaagaatcttattattttggatgagaggctttgttaatgtggaagtgaggaggaatctaatcagcatgtccattgtcgta

SEQ ID NO: 214290 - DNA, 536 bp, Cannabis indica
catatgtatatatatttatttggagaatttataagaggaggtcacggagtgactaccggtttaccaaccatatggtaaagtggaaccattaaaggcaagagtagctcaatgaatatgctcctatttggaatttagcactatatttatatagagagaagatttaccacttatagcttagtacaagtagtgcactagccactaaactaggtctataatttttattcttgttagggatagggtctaaaatcaggaccacaaccggcctttgaggttaatattttttgttgaaataaagataggtctccatgagagagagatagactataatgaaattattcatgttgtgacaaatttgaaaggattatttcatattgcaccaatattggaaaagattgtacgattcttccctactgagacaaccgacactcttcaaaggatccaaattattttataggtcaatttttactaaagccgggaataaatcaatttaatccaatgataaccgaccattaaacattatatatttaattgtgatc

SEQ ID NO: 214291 - DNA, 500 bp, Cannabis indica
tttgtttttttttttttgcgtttgttgcagttacggagagaaagaattgcagagagaatgaaagctctacaagagctagttcccaacgccaacaaggtactcgaaaatttctttaatttaattaaattatataattttttttttatataaaataaccataataatgaaagttcactcagtttctgaactgagatctccctctctcagtaaaacagttgtcaggataataattcccataacaaaacagggtcaatttggtcatttctggtcatttccaatttaaccttcaccgggttaaaccatcggaataatgacgaccgaatggcgtcattactgacacgtgttgtgatacgagtggataatatgttttgtcttttatttttttggtggtaaagccaaaggtgtgaatttttatatttttgaccctcaaaaaaaatttatttttgttaatcgtactaacatagtcctatttagcaaaaaaaaaaaacggaagtaactta

SEQ ID NO: 214292 - DNA, 623 bp, Cannabis indica
taattactaagtttttgaagtttttgatgcgatagtatggtggtgatattattatgtatggatgagattgtacgacgtttactactcagatctcaagtgtgtggatgtacataatatattaaagaatattaatatgtaattgtaaatgtatgccaatttataaataaatatatatctaatgaaaaagatgcattaattatatatattattgaaaggttggtctcatttatttagtgcttatataaatttatatgcttaaatcaactgtagtttaaatctatagtattttgatatgtatttttaagaagttaccaatatatataatagatttttaatgttttatattaattcatgcttccgtgtttagtaaataaaacaaaatgatattgtaagacgttattttagtcacatacttttttttaactctaatcttaaaattttctattctcaaactcttgctaattattgtggacattgtcctacataaaataaatagtagagaattgagccacatataaaaacatgagctactctattcattgccaattggttttgagatagaacttcataattctcaacactaatgaatgatggtgtagcctgaaatctaatctagctaatta

SEQ ID NO: 214293 - DNA, 1013 bp, Cannabis indica
agagagaaagaggggaaagagagggggttatgtgggaattaacaaaatattgtcccatcttactaatataaggtatttagggtttaatagaaaaatttccctctaatataagcataaaatttcaaatttcgcattctatactacatcctttgaaagaagtattttgatacacttttattttttattttattttttaaagagtttatgaatgaatttcaaaagaaaattgaaattatgatagttctttactttttgaaaaactaaaagaaatatcttttgataagtaattagacattacgtacaagagcaaagcaataacttaccattcttagactagactatccaataagagtcaaagccataacaactactagctccatatgcttaagctgtgaaacaccaccccaacccgaaatctagaccgaacaaccacaccaaactcgttaatcgccaccattatcccgacactacacccaagaacccccactacgtagaagctcgcccaccaaacaggagccaacctattagacaaaatcccaccccaccgaaaggatccaagatcggccctgaaattagatgggcttaagaaaaaaaaaattattgtgtcatttatttaaaaaaaatgtcgtagtacattcaaaaactactaaaaatgtataattttaaatgaaaaatatttttttttgggctctgtgctgggtggcccgctttagcccaagcccgaccttgaaaggataaggtcaaagataaagccaaaataaaagacagaattaccccttgaagcatgagatgataccgtccatgattgcaattgttgtataataactttcactcccaaacaaagtcgtgcttaaccccattcaattaacgagccctggtttaaaaaaagaaaatgtctttagaaattaggattggaagagagaaaacactcatagttgataatataatttccaatcaaaactacttacaattcttcttattaattatgtttaattatatgtgtagatcgcatt

SEQ ID NO: 214294 - DNA, 603 bp, Cannabis indica
caatctttcccacttatgtatgcattctgaaaaaaaatgatggtttttggagtcagttaatgttttcatctatttgaaactgatttcaatctttgaaacaatttcaatatctaataaagaagtcttaccacttcaaatgtgatgagagtctgctgaagagtctcaaaagcatggtttgtctccattttctcatccccttctttgcagtcagccaatggatggagtccaacaacaatgcgcctgtttcgcagaagaaaatctatgcagccttttagccattgcaacactacttttcacttgataaataagaaaatgatctattttgaaatgaatgttttagacatacatagaaaacaaggattgtccaaactatagctaatagagattggaatttaccagttaccactggtctcttctagtgttcttgtcagccagagaaattgattgtcctctgtctcctccaaaggtcccgggtgcacattctacaagttcaaagtaagttcaataagatgaatgaaagaaaaatgctgcaatattatagtatgctactatgtcttgaaaggatatgttaacaagtttactccataagcaatggaagccaat

SEQ ID NO: 214295 - DNA, 543 bp, Cannabis indica
ggaaaagaacaactaacaaaccgaataaacaaggtaagaaatcgattatgaatagcacaagaatcttaaccataaaagaaaaattatttagtcaactaacttgacaaaaaaaggactttaacaagattatcgtataatatcaagctcctatatagtcaaaacccatgtaaaatcatagaaggatgaaatgtcacaaaacccttcaaagcaaaatttcgcataagactttgtatctatattggtaagctctcatcctatttatgattggtacgatgccctattacatttaagaaaaaaaaaatgacaagccattaaaagattcattattttcagtctcatcttaaagtaaaaaaaaaaaaaaaaaccctatatatcatttttcttgaatgctatgcttgaaagggatctcaaatcataactaagttgatttgtcataaatttggtatgtacacgaattcttttgcttgagtagtgttctttctttacaagtttcaattattatattataatttcattttttttccaacagaagccacatatatg

SEQ ID NO: 214296 - DNA, 512 bp, Cannabis indica
gtatataatttatattaatcaatatttatgaaactaataaaacatataaaaaaaatagagaattaatgagagaacaaataacactaattaatgaaatcttgaggtatatatagattataacgagcactgacatggaattatttttcaaaaaaataaaaacaatatttcgtctatgtattttcaaatacaaaaattaactacgagattgtaaaaaaaatgaaatttttacataagaaattgaaaaaaaataagtttatttacaaaaatactactatacgactttttacacttttatactcttacttatataattatttgccaaaatactttttgtacttatacatcaactagacacactacgggcatatttgagacatcagaatcagaatcagaatcagagcaagttaatttttgagcacctagcgcctaggttaataatttgtcaatctgggcacttttcaagtatcagattggagatccgaattttgcagcttcttcgtcttcataaaaaa

SEQ ID NO: 214297 - DNA, 538 bp, Cannabis indica
cctttggaaacgttaagggtacgaaaccgaaaattttcgaaaccgtagtaaaactacgttaagttggtaagtaaaggtaaaccaatttacggggggactaactttaactaagttaaaccttaaaacttttagtaacgtaaccgaactttaaacgaactaaattaggtacccgttttaaaacttaattcgaatttttttaaaccctttaaaactttaagggtactacgtttaaaaattttaccaaaaaattaccccgtaacctacccaaaaccaaaaaccggggtactttaaaaactaacttaaggggttagtacttttacgtaaaaaaagtttaaaattagtaaaggttaatttaaacttaaaacggactaacttaaattaactttaactaaattttccgttccttacttaaattaacttttttaaacttaaacccttaaaggttaaggggacttacgtccttaaagtcccgtacttttagttaaaaaggttttttaacgggttacttaacgaaattcgacttcgattgggtagtact

SEQ ID NO: 214298 - DNA, 588 bp, Cannabis indica
atcttaagtcttttgttttagcttcttaggttatgtgtgacataattgcttagactgttgaaggatgaagcttagaaacaactttgcaggatctaagtctctacttgggtgcctcttgtgtgcacgtaatattgtcctatcctaaaatgcaaggccagaattattttcttcgtaccacgtatcaaaaacactatccacgtcaaaaaaaaaaaaattaaatatatgtagtttaaagcatatttgttttttaatatatatttacaattaaagaataatttttttctttttctttttttacataaagaataacattttttttgagtaatttgagatatatatacttaagtttaatttttggttgcaaataaatacctaagtttaatttttagcggtaataatacataaattgtaattctagaatttcgtaggtacttgacggttaaatttcaagtcattatccacatgtcattttcttattgatatatttaaactatttttttaaaaaaaaataaaaaattaaatgatctagaccaatcatgaattcacacgttgcaatttactgaagctaggtaaaagtaaacttatata

SEQ ID NO: 214299 - DNA, 738 bp, Cannabis indica
ttatattaaactatatgggatcttatacttaattagacaatagcaatattaacatataagagagtgttggacacaacttatactttttagtatttctctatatattataactattttttttaagtaatatttgtgaagttatgatatttcgcatgcgaggatatctctcatgtgccacttgtttatatagcagtaatttctttaaaattactagaataataaaaaacaattaaaagaaatactaaacagccacaatagctcttgttttgagttcaagcgatttgagtgatattttttatatattatttagaatagttagtaattttatcacttaaatttttgataatattaattttgtattttaaaatatacagcttattaagaatactcttgaagttttatgttttagaaaaattaaagtttacgtctcattattctgtttaaatacttacatatctttgttagttagcaactatgtcgcctaaactttgacaactatcaaattgtactacctacaaaagaaaaatgaaaatttattttaaatgattaagaaaattaaaagaagaaattaaaattttaaaactaattaagcgatttaaaaaaattatttattttttattacaaaattcatttatatataaaaaatatattaaaaatttaatttttgccaaagtctaaattttacaagaacaaacttgaatctatttttttttcttcaaaattttagatttgtttaag

SEQ ID NO: 214300 - DNA, 737 bp, Cannabis indica
ggaaaacaatcaagataattcaacaaaaataaatagattcaataactccggcatctgcgctacaaaaaatcttggaataacaaataataacatatatagttaataatttacaatagactctacctaaaaaaaatgtagtgtatgagagtactattttttgtatgttgtatttatttaagacatcgggtaaattttaagtaatcaaaaaaatttaacacgtaaaaaatataattacacgcgttttattttatatgtgtgcgaaaatactattttttatattttaaattattcaaaatttctcaaaattttataaaatctcttgaataattaaactaaaatattttcctaagcttatgtttggtgggagggagggagagtaagatggatggagaggtgacagagaggatggggagtaagagggatagagagttaatctcctttgtattgtttgatattaggtgtaaggtggaaaggatggagaaaaattaattagcaaaattacaaaattgtcttttcatttaaaaataaaattttattattttttttaagagtaattattgtattatgcaaaatatattgtctttttttacaatccttccaaatttgaagggattaaattttgaaggtttggagggagacattctccctccatctctctcttgctaaacaagtgatttagtcttttcttccactcctctctatccgcctatctcctcctcctaccaaacatagtgtaa

SEQ ID NO: 214301 - DNA, 644 bp, Cannabis indica
ggtaaaaataaatagataaagtaaagtgggtatacaatacaattttctccaaatcttgggcacaaaacatatgtataattgttgtttttttattgttagttttaaaattttgtaaattaggcccattcatacagacctcacgatcccaaaccccaacccaatcttgaaccggactcagacccaggttcaaaattggacacagacctagatcctgatctagcttcggacccagaccccaactctacacctggactcgacacgcaactcccgaccccaatcccaaacctgggtctggggtccagatttgaggatgggatttgattccatgatcggggtcgaagttgggtcaagttttagggatgaaatagattggttacgggtacccattattattcaatctgaatagtgaggggaataaccattcaaatggaaaaaatgactggggcagagaataactgcactgcacatatgcaggtatggtacgagtacgatattagcatacactgcccattccccctcgatatatacatatatattaaaaaaaactttattaattatatatttattttattctattatcatatcatatttcttaatttaaaacttcattaaatttgtggttattgtttgattttgtttttttt

SEQ ID NO: 214302 - DNA, 732 bp, Cannabis indica
tatccattcattcttattgggagaaaactcatgatgattccaaataggtctgttgaaagaaattgttaggcgatatgtcaagcttttctatggaaggagaagattgattaccaatgataggggtatgtagcttggcattagttatgtaagacacgaaaagatggtgatcttgatttttgaaacataatgatttggaacaaggtgcactacagaaaaaggcttatctcggcagccttatcttggcgggctcacgtgtcagcgtgtgcgtgtcgatataggtctaattaagtttttttttttttaaaaaaaaaatactaggctcgccgttattgctattttttaaaactttgaatttgagcaatctcagtgggctcatgtgtgcgtgtcgagataggcccgatttttttaaaaaaaaattgtaaaacttaaaatttgaccaatctcgacgggccaatataagccctccgttattggtccagccgtggttatcaataatggcaggcctatattggcccgccgagattggtcaaaaaaagcccagcccgcccatatgcccttcaacctttcttttcatcttctttccattacatcttcaaaaaaaaccctattttcttcccccattgagaaagtggcagacattctcccctaatccaaaatttcaagcaaacattgatgttctcttcttctatttcatcacaaccatttaaaaaaaaaggtgaacttaaatatata

SEQ ID NO: 214303 - DNA, 627 bp, Cannabis indica
tcaatttttagtttagttattattcttgtttcacataagactaaatagtaagcgagtttgaacaactctaatgaacttatatttaattgaaacgagttatttgtattgcatttaatgatataacgtcatcattatattcattgagttgatccaaattctttctgtaggacacgtgttagcttttgatacatagctgaatttcaggtataacaatatattattatgtgaataatatacattaagggtttggtcaataaattgtgtaatatatgatttatttaacgaaaaattttaacctatactttgtaacatggagagaagttataagattaattgcttttgtaacttctttcggatgatcttatttttgtgtaataaaagagatgttactcaaaattgatgagaggattcaaatgttatgaaatataattgttacaaattatattaatactaatttatatgagagaaatgagatggtgtgacgtttgaattctaagtgtgatcacctaaacactataaaaaggagtttaatttcctcattttgatgagaagttttctatcaaaaaaatccccattggtagaaaaactctaaagcttcataattccaaaagtaatttcctagaaagt

SEQ ID NO: 214304 - DNA, 769 bp, Cannabis indica
atttaagccctctatcaagttattttcacacctcagtcaaaaatttgaagctatcatcgtctatatttaccccaagggagttataaaaataagcttcgagtaactcacagtgggacccgctaggcataaaaaatcagccatcaccaccacaagctaatttttaccgttaaatcaacattagtggtgcaaaacactttatttgtattttatctcctatttttgtgggtctactttacctataaaaggagagctcccttagttcattttttacgtttagaaaattacccacatggtcagagcttctctctttagactttctctctctagagtttggagaatctgatacttaaagacttgatgtaatcatgatttcgtgagaaataaaaattccaggtagacgtagccccattactatcacgacataagggtgaactactaaaattttatgtatctctcttattaattacttaacaacttacttattcttgtcaatctagcgagttaatgttggctactttttagcgtcaacaaatataaaataaaaagagataactgaattttattattcggttatataatattattttaaattttaaaattaaaatataatatcatcttttattttaaaggattaaaaaaaagtttaaaatattataatatttataattttgaaacaagttatatatataagtgagaagagtacgtaacagaaataattaatttttggggataaaaaaatacgattgaaaattcaactctctctctctct

SEQ ID NO: 214305 - DNA, 783 bp, Cannabis indica
atattgggcaaaatcaggggcaacaagtaaaataaaaaaaaaaataaacctaaaaacatatctaaaataatgtaacaaacaacacgaaaacaattataaaacagcaaaaaaataactgcaaagcaacgaaaaataacaaaataatgacctaattgcaatatgcaaaacaatatcaatgtacttagttttgacgacttgatttatctttttgtaccactacaatactttttttcatagaatatgttgttataatttcatattatcaaatttttttctcttttcctttttaagttagtggcatttaaaatgataatttattttttaaaagttaaataagtaattacattaataatagaaataataaaatctcatgatttcaaaatgggacatataatataataggtaatatataattaatattgttgacccaaaaattaatcaactgacagcgaggtcgtatgactctgatgtttgcctcatttacacaattagaatgagaaactaaaccacacataattattatagaggttcggctccattagatatcggataatgacctactctcattttagttgtattgatccgagggttaatgctatccagatcactataggtaggatctgatataacacccttaaagatacaaagtagaaatcgaggttggcaaatctcaagtgatgagaaagcttgtatgggcgtgtgagagagattgggaaagagatttattagacttaggcttaaaacttggacgctagtatcagacttaatgacttaggttttcta

SEQ ID NO: 214306 - DNA, 1006 bp, Cannabis indica
aaacataaacatttttttttgtattttattgttaaaaaaacaacaatagaaatatatactttttagatatgtagattaagttaaaaaaattgatagtagaaagatttttttttagatatgtgcaataaatttaaatttaaaatacaatattaaaaaaatataattaatataagagataaaagataatcgaaatatttataatttaaatttaattttttttaaaaaattaacactttatattatataaaaatatttaataaaacataaaatacatacaaattataacttaaatataaaaaatggtataaccgtaaaaaaaaatatagatagatatataagaaatgatttagtctcacgttcttcaaaccataagtaggaaaagcaaattcaacaaacatgcattaagcaaaaataaataaataaataaataattcaacaaatatgctgaattgaatgataattaatcttcattatatactttatctcttagcaatgattattttactcttatctcacattattaatattaagtattaagtaattatttttgagaacccaatctttcacgaaacatatcaatattgattgtcatattattcgttaatatgtacaaagtgattaattgaacatccttcacatcaataccaaatacaatctttttgatttccttactaagcttcttttcatcctatttaaaattattgtcaagctaaatgttatttgtacactttatcttaagaaatatataaagtattaaatgattatttataatatttgaatatagaaattaaaatattttctatttaatttaatgtgtattctaaaattgaatatctctccatatataaaatcacatttattgtagtaacgctgtatagcattttcattcattacaaaataatggagacttttggagatggaagagaagtcaagtcataactttttcaacacatattagatattttactataacacccaaatatatactactatagtgacgccaatg

SEQ ID NO: 214307 - DNA, 1184 bp, Cannabis indica
aatatatatatatatgaaaaatatatatttctttcacatcaaacaaaattaaaacaaatttatttttattttatgtctacaataataaattaaaataaattaaaataacaattaacaaattcaaaggaagaaaaaaaaattgtatgtaatatgtttaattttattttaaattatatgtagaaaaaaaatataatatgagaatgaaatatacatttgatttattaagttttgaaatatgtgtattatatgtattaaatttttaaattactatttttttgtattaaaattttaattatatatttaatttttatttttttttttataaatatatgcgaattaaattgtatcatatcaatcaattaaaataaacactcctaattctcaatgtctcatttttttcaatcttaatccataaaaaaaattatgtaatattcatggtaactcactttaattcgtttatgtgttattaaagctgaaattgtagacacgacaataaatttaaaattcaattaaaaaacttatatgaatatacaataaataacttattagaatttttatccattaaactttaaaatatactaaattatgcccataaacatttttaggagttaaatattcttcctaaactattgaaactgtaagatttaaaaacttttatttaattttatttgattttattttagtaattatttatgtactaaattatgtccttaaatttttatccatgttaaattttttatactaaaattgaacaaaaattcttaaatttaacaatcttagttcaagaggcatttttaacaatcttaacaaatcaaatggtataatttagtacatatcaaaaaagaaaaaaaaaagttataattagccataaaaaataaattttgtaaacattttaattttctttttttcaaattactcttggtaagattcatattaaggaccttccattcttcacctgctaaagattgtgaagtaaaggctaaaaatagcaggcttggcaaaacttcattatttttcctttgctaccgaccatcataatttcaaggacaatacatttacaaataaactgaaagaaaaaaattattttacttaggatcattgttaactaaatccactgttttgccaatttaggaaaatgggtgcgttgtcatgactcatgcattctcactacattaataattaat

SEQ ID NO: 214308 - DNA, 1005 bp, Cannabis indica
ttccttccatttcaaaatataattatcattccaccaatatggtggaaaggccattccattaaaataacattctaacactttaatatataaccaaataaaggaatggaatgaaattgtttcctttcctttttcattccatttcattacctccaaccaaacaccagagagttctagaaatataacttaggtattattaccgctaaaaattaaacttatgtatttatttgtaactgagagctaaacttaagtatttataccgcaaattactcttaaaggtaaaataactttactttttataacaaaaggtaaaaaagtcagtatataataaaattattagttaccttaatgagtgaaaaaaaaagtaaataaaaatgtattatttattatagtgtaaaatttattccatattatattttgtgttaaatttgatagatgtgctaaatttaaactaaatacactactattaaaatccttttttttttttgataagtcactactattaaaattcaattgtacaaatataatctaaaaaattcttatataccatctttataacacttctttaaaaatgttctaatgttggcaaaagaaccataactttgaacactattggttgtattacttacaggtctcctttatgccaagacctttaggtcttttatttaacatcatcgattttcaaaaaaaaaaatgtaagtaaattatgtaaaatttaataattatatttactatattatagtagttttatttgtccatatacaaagtttccaatataatattcatttactaataacaaaagggaattttgatttatatgcttaaatataaatttttttattattataccaaaacttaaaccataaaaaaactatactttttttttctaaaacccaaaataaccccctccacattctctctctctctgcatcatctctctctctctctctctcttctctctctctctgccaacctctctctctctcactcacacgtcggaccaaccga

SEQ ID NO: 214309 - DNA, 627 bp, Cannabis indica
tattttcacaaaataagctttgttgtgtgcttttttttaggaaattaaagctttattattgcttgttagctgttccagaaaatgggcttgtatttggaaagactgaagatgctttttgtatataaaataatctttatctttatttagagattactggggaaagttgaactgaacaatagatttcttgaaaatttgccaagaaattcaacgaactcactctcagcttggaaaaattcagttttcctgccacatcatgttttcaaagaaaatccaaaagggttgaaggcttgaagccgatctttgaggcttcaatttgatccagtcatttcagtacttgttttttcttttcttttcttttcgccaaggaatacttttttttttttaaggtttttttccttaaggaatactttttttttctttcttaattgaaatttagtcaccatataaaattactattttctatttctttgcataattctaaaaaaaaaaaaaataaaagtcctatttttaaatataataactaattataattgttgaaagtcaaataataatattaattaaattaagttccattcgttaaatgagagttaaataatataattccttaaattaagttccattcttaaa

SEQ ID NO: 214310 - DNA, 652 bp, Cannabis indica
atatatgataaagagataataagacacatgatttttatagaggttcagccccaagcagttcggtaatagcctaatcctcgttatttgtattgacttaagatcaaggaagaagattccttttcttatagctcttacaacaatatctctgaatatataattcttagataataatacagtcttagcttaactacttttcgaccgatccctccttttgcccagtgaatatgcatcactatttatagggctaggaaacttgaaaaggaagagtttcctctctcgttaaaatgcgtataaatagaaagatcgtgggatcaatgctgaatgcaaggatcgtgggattgaggttgaatacactgatagtgggatcctgtgtaggccatatccacgtaaattgatccttgagttatagggattgagctgatgactcatgatgcgaaagttgaattcgctaagtgttgactgctctgcgcggatcgctgaacatcttactctgaacatgccagcgaggcatcctgctcggcctatcttcctaagcagatgttccaagtggactccacgtgtcaccattctcgtgatgccacatcagagtgccaaatttgggataacatttgccttccaagtctgtacgagacccctaaggttgcgtgtagac

SEQ ID NO: 214311 - DNA, 736 bp, Cannabis indica
tattttgaaggataatgtagagacgtttattggagtgctctgaacagttgtttcatgttgtgataaattcaacactcaagtatacgtattgtcataacaagtaatactcaagttagtaaaattattcccacgagaactattgctaagtaccaatcaattgaattcttgtttttatttagcaatcgaataaacgaatttcggaactaaataatctaagcaaagatttaatagctcaacaataaacaagatttaatcaacaaatgaaatataaggaaattaacttcacctgcatctacttcttatttcaataatgcaaatcaattttcttcttctatctagtatgataacggattataaattcaccaaaatctttttcatacttaaggtactaaattgcaaggataattattgtatatttaagacaagtaacaagcaatttgcattaagtaataattcaaaagttacgcaagccatacaaatactctcgttttgtatcgaaacctatgtttattcaattagagcattctcaatattctctttttagattttatattgagatcgtagatcatacattagatggccaatcaaacacatgtactaaatacaaatataaataaatcatacatcaatagaagaaagaattcaaaatagcattattccaaggaaagtttcaaaaaaattcattaaaatccttaaattagagtttaactaacaatctccattaaaacattcataa

SEQ ID NO: 214312 - DNA, 612 bp, Cannabis indica
tctttgcttggtgcggcgtcgaaatcggaccagaagcacggtgctccgccatctctcaagtcatacctcatatccgctctcccaagcccgagaaccctgagccccaacctctctttctcttccttcctcaccatatctctcctcatccttctcttttgttctcaactcaaccatgtccacgcctcgacggccgtctatggtcgctgatggtccaaaaggaccacagaaacctgatctcgaagcccagaaatctaaacccagtgatcgcctaagtctgtctctctctatttctcgatttttctatcgccgaagctaaagctttttggcttcgatttggcctcttttgttgtcaataagcttgaagtctaccttttgtacactgttgcagtctaccttggtacttaacagaccaaagtggacagaatagtgaagatcaaaacagaattaaatgttggagagtttctactaaaaattcaataatgagggttgatcgtgctaaactaaaaattttaaggaatttggcagtttttttttttaaaatataataagagaaagttaaaaaaaatatttcttaacttttcttattattttcctataagttaactttttttt

SEQ ID NO: 214313 - DNA, 556 bp, Cannabis indica
caaattctttttcttatagcacaactacaactattttttctgagagcacagcagtgccaaacggacccttaatatgtcaattattataacggtcttattatgaccaaactattttagtcgctacctattacctataaataggagttttttcctccattcaaagggggctaagcaattctgttcagtattagtaatgatatttgcatttttgtttaaggagaaaaaacattcattcaatggttgaagggatataagtccaaaaaaaaaaaaaaaaaagaaaagaagaaaacaagcggtagacttcaaagagtcgcataaatctcacaaaaaatatgatcaaacaacactaatcaagcagatatatgcatatgggtaatacacagtttgtgatatcggtgttctccgattaggttgggggtttcctactgattgaggtgacctttggtcttttcttcttccacgaggggttcttttgctatggaacctatacaagaaggtagggattcgaatatgagaggggatacaggtaaagcgacggagaaggaaaacggaagta

SEQ ID NO: 214314 - DNA, 556 bp, Cannabis indica
ttttttttttttttgcttggagaaatatgaaataatttttaattaaaaatatttattataactaattaaaattaatataatttttttctcaatttcttttcgcccatgattatacataacttgtttgaactgatcaccaaagtacattaaaataccacactggtgtatatatatggcttatggaaccgacaatgagacattaccatgtttttgggactcaaatataaatggtaaaaagttgaaccaatgtatatttatatatgtatctatattactaagataattaattaattattaattattagtgaagtgagtcgttcaatggaaacatgttttatggtcctatgtctgatgacaagcatattaactaaatttgtccaattttcagtggtggtgatctcagattccctagctagctaataaaacatcaacaagatccaatattcagatcgagttgttaattaattattactaactactacatatagaagtactacatgagtgaccaccagatcatctcagttcaatcgaagctaccattgactgtgtatatata

SEQ ID NO: 214315 - DNA, 730 bp, Cannabis indica
ggaaattatagacgaggaagatgagagcctaagaaatctaaggaaggaatggggagaaacgatatataggaccgtagttatccgcttgaaagaaattaaggagtataacccaaatggaagatatatcgttcctgaactttggaatttcaaagatggaatgtacaaaaaagttattactttttctcttttgaatatgaaaaaactaaatacggtaaaataaatgaattaatgaattaatgtaactattaaattttaccattatttttgaggaattagtaagattaaattttggtaggattatatactaaattaatcaatttaatatcagttcaaatattaatgttttattattattttattatatataaataatattttattattttattaaataaaataaaaagtcacccatgaatttctcataaaccaagaattttagttatataggcacactttatatagaatagatatatatagcacaaccaacactatgcatagattattattttcaatacaaaaaaaaaaaaagaattggtgtttgtgcatagtgtaatatcaacgcttaacatatagtctcaggttatgcaatgtaatatataaacgcttaaattaaaaaaaaataatttttttttttattaaaagtaaaaaaaaaaataatatgtaaaagaagtaactaagatatataaagttatgatataagggtaaattcacttaaatatatatatatata

SEQ ID NO: 214316 - DNA, 526 bp, Cannabis indica
ttattcctgataatgagttatgtctcttcgtttagttgaaggtctacgtggctaataaaaaatcaattggcaagaattaccaaattaatagaaaatatcccgaaactcgccgtcatatagtaggcaatagcgagatgtgaataataactattaacaggtgagactagcgagacaacacgtctatctcgggataaacagaatataataaaaattgttcagaatgagtaaacaaagagcttacaacttattgatccacatactcgtgagtatgttaaaaggggtggaatcaacttcaacatttactcacctcgcttttgacgtgtggaagtaaccatctagcaaatgcctttcgaacaacaaagtcattgttattaaaataaatactttaaactatttattatttaaaagattattgttatttaaatataaattaaaatttacatataaagtcatttatacttcaacaaaacaataggtattgttttgataaacagataaaacaataggtatttttactatacaataa

SEQ ID NO: 214317 - DNA, 653 bp, Cannabis indica
tatgtattaaattatacttcccatatttgtccttcgaactttgacatatactaaaccatgcacctgaattttcattcatgttagactttctttactaaaattggacaaaaatctttaaattcaaccatctcaatagttaaaagaaaatttttaacgatcttaataatgtaaagaagatgatttgatacatgtcaaaattcgagaataaaaattctaattaaccaataatatatacacccacaaattatataaaagtattacacatactcatagtgatgccacaatttttttatttttaaattattataattatcaaaaatgggagccattgtattaaaagacagtaccaccacatcaaatttgtgtaatgttttggttaaattatgatttacctggattcttagtaccaaagagaatatcagcaatagcagctcccccaccttgtcctgggtatccagcccaaaggatggcacctatgcgaggatttctctttgcaaatgaaatatcaatagggcccccagcatcaacactagaatcactgggccttttgacggccccagccactctagaaacaagttctgttggcgccacggtaaaagaatgtcaacccctatcttagattcagcttcaatggattgatctaagcccataaa

SEQ ID NO: 214318 - DNA, 710 bp, Cannabis indica
ttcactttcaggctgactgttagtgagccgctccttggagagacaatgaccatatgcaagggagcggaagaagcagccaagcaaggtttcaggaaggtaatcttccaaaatgactgtgctaatgcaatatctgccctgaaaactaaattgcaggacatcaactcgctcaattttaatatccaggagctggtccataagttcatcggtatttcgagcagtttcaatctctgggaagcttcttggatacccaaaaacctcaatggtgtggcccattcgttggcgaaatgggcaaatcaaaacaactcttttggctggcttgatttgtctcttgaggatggtcccttacgctctgttcttaaagagattggatgacttgaatcctcccttttgatagtagttgttagttggactggtagttttatttctagttctgtttcttgtttgttgtttagactttaactggcttagcctgctttgttttttctgtgttagtttcctgttaggtcgttaggccgggtttgttgtttgcgtcccctggcacttccaggggttccattaataaaaaaaaatagatttaatttaaaattacatcccattgtatgatttactcctttatgatagcaactttaatatggtatttgaatatttaatttcttaaaaataattaaaatatgtagccataaattacattctcataattgctaactaca

SEQ ID NO: 214319 - DNA, 597 bp, Cannabis indica
aaaattttaagaagacggagaacaattgtaacctccctatcattggctttacaatacaagtagctatcatccgcaaataacatatgagaaattattggtgctgcattagcaacacgacaaccatgaatccatttcctctcttcaaatttttgactcactgtagacacaccttctgtgcatatcagaaaaagataaggcgagattgggtccccttgacgaattcctcttgttggaataataggccccaacagtcttcctcacgtaacaattttatactgaactgaagaaagacatgttggaagttattttaccaggaacttagatctactcacaagtatgttgatttaacaacctaaatatgaacttctaaaacgataggaaattaaacacataagagtatcagaaatcttacagtgattgcagcggaatatatgtctcctcccactcagatctctaacccttgattcctttctgtagcagagtataatcaagatctgagcccgatagtccttctttgttgtttctgaattctacacagccttcctcactatgattgaggtattcttgatgtgtgtgggcactactctagcacttata

SEQ ID NO: 214320 - DNA, 1208 bp, Cannabis indica
catgaaaatacttaagcgaaaatctaagaattaagtattagcaagagaaaggttttattatcactaagtatttgcaagacatcatacaaataaaagacacaatttgaatgatataaaatcatgttttccaatttgttggtgtggttacataagtaaattacatttatttaagataaaaaatgcaacataagtggtcatcggaccttgggatctgttaaatttataaaggcattggacgaacatgttgtccaaaagatgtcatttaagaacaatatttttattggtagtgcttctttagatgttccccattccagtatattggtactgggatgagctgcatttgattatttgtaggcaccaaacaatgtgacttcagtcacttggtatggcctttgccagtttggttcgagcacacctattgcactgtccttagggttaagaaaaactcttctaagcaccaattcccaaacaaagaattttctctttttaacttgttaaagtatcttgccacttttggctagtaggaccatagcttcaagttggagataataggtcagcttttcgattggatgataacatttttagcatcaataaaccttttattggcacaatagacaggatgttggacaccttcctcttctcgaattaacatggcgcttagcacgaatgtaatgcctgtacttgaaaagtaattactttagatttaaatataattaactaattataattatatatgaatatacttataaaattttatatgtcgagatcccgagttaaaaaccactgttggaaaacataccataaatatatacataatatttttttacaagtcacaaggcgacaacaaaagatagttcaaaatacaatatgacagaaaccctccaggttgcactgccgcaatatgtacaatccttgccgagcagcaacccactactcctccatcttagctttacccttgcctacacaaggtagcaaactaatgagtcaacaaactcaataagatatgcataaaatatataaaacattagcaatatcgaattagtacttaaagccctcctagagcctaagtataaggctcatcaaatggttaagaacgttctcaacggaagtacgacctctgtaccactatgtactagaacgtaccgactacgtactagtgttggtagggccatattgtacctccaagagttactaggtgttgtaccaca

SEQ ID NO: 214321 - DNA, 766 bp, Cannabis indica
tccatccacactctgatctttgtttgggaaggacgaatgagcactaactggttctctatctctatctcactcacttaaaggtctacttggcgagaagaaaataagcaaaataaacaaaagtgaaaattgattgctgaagcattccaatggtttaccatttcacgaggaaaacttactttaaaatgtattgtttcattgaaatagatatgacagatttagtccatgaaaatacaaaattatactgctgtaccattatttgatattatatatatatatatatatatatatattttttttttttttaatttatccaactgccacagctttgaacattatcagtctttgcctacataagtggaaatattcaaacacggcagcctgtcttttattctaaaacataaaccactttcaatgttgattaatttgggccattgaccatttaaaaaaaaagtagtctaatatcagaaattaatcaggaaaacttgaacatcaagacttcattgtgccagttgtgattttggtttagaactttgttttttgtgttgttcacttcattccatgaagtaagatggactctggttgaaacccagcagaaaattttcttccccatttaatagtgatccaaaaagaggtgtatatgcttttgaaattctggttgtatatatgatggaacaaaaattacaagtcttcctgcttcttgtaatatcccaaacatgggtcgttgtttattcaaacaatcaagactgtaagttctatttatttatca

SEQ ID NO: 214322 - DNA, 925 bp, Cannabis indica
gactccctaccatttaataaatgaaattggattgtcaccaattaatttataataatgttattgaaagcaatctactcttatttttgttctcttgaaaggtattaatagactatgatttgaaacattgtttgactgaaatgtctttcataatattaagagatggactatgactatttatttttatgtatataatcagcttagaatctatacacataaaaattaattatatattaaaattgagttgaatataaagacaaatcactcccaattaaattatacatataatttggcataataaaaccacaaaaaaaggtataaaattggaaaaaaaaaaaaaaaattgcacgtgtgataggcatagcataaagaaaaaaaggataaaagtactaaaatagtgcatcctaatttgggataatttcaaaaaaaaaatatatatatatatatacatacaaaaatagcaaaaaaattataaaaatactgtatggaatttttaatatttttaccattttttaaattttatttacataaaatacggtattatattcttgttattttattgtttattttttgttatttgtatattattttttatattgttttgatattattttattattgttttaatgtttgttttttagtattttttttgttattttcttgcatttttatagaataccttaaaaatatatttaaaaaataactttaaaatataaaaattatagttttatataattattcttattaatttttgtaataaacagttatgagtattttaaggggataagttgaaaatgcctctttattaatcaattaaccaaatttgcctataattttatatttatttgtaaacatacctcttttatatgtattgtacccaaaataccctgacataagagagtcacatggagagtatcttgaagtgaca

SEQ ID NO: 214323 - DNA, 633 bp, Cannabis indica
cctaaaagagaggtaaaaatcatgcatcaattagatgggttcaactaggtcttactttttcaattaagatctagcttgctaaatgttaaagctggccaaaaattaatattcaatcaacatttcatcgtatctaattaaacaaagataggattactcaatcattgcaaatcatagcactagttcatacaagggttcataaccacccaaatctcaaagatcttagttcatgtctgaaactaaaaacttaaaaccaagaaataacatgttcatggagctaaagagaataacaaagagtagaaaatgatacaaaatggaagaggagagcaagagaaatgagttggtgagctcaaatcttctttattgaggttgccttcttctccttcttcttagtcttcttcttctcttctttgtactctcttcctttctttctttctttctttttttttttttttttttttctgtacttcctcttaaaaattcgtactacctcctttcttaaagtgcagccacaattttctatctcctctttttttattggctgcctcccaattagggtactaaagtttaccctaattgaaaatccaagtcattgtccacttgcccttttttctccacatattggctgagtcattg

SEQ ID NO: 214324 - DNA, 625 bp, Cannabis indica
acttgtgatttaaaaccaaaaaactaaaagagtgtaaaatataaccaactaaaaccatcccaaacacaataatcgtatgaatttgttttaaaaaataaaataaaatagagacacgaagaagatgatgagcagaacaagagaacaatggagaagtgagattaaacttaaaagaacgggtagtgaatatttagggtatactattttgaataattagcaatttcgcctcctgaacttttgacaatactgatttttggcccctaaaatatacggcttgttaagaatcccctctaaactattacatttactaaaaatttagttttcctgttaggttccgtccaattattccgtttaaatagtgacagtgtctttgtcaattagcaactttgactccctaaactttaacaactatcaaatcgtaccccctcaaaataaaaatgagaaagattcaatattttttttagtaaatcttaaaaatttaatttaaatcttaagaaaaatcattttgaatgattaagaaaattaaacaataaattaaaattttcaaactaattacgcgatataaaaattatttattttttatttagaaattcatttagatattaaaaaatatattaaaatttaattt

SEQ ID NO: 214325 - DNA, 528 bp, Cannabis indica
acattaagaactgcagcacaaaacctgtttcccacggtggtccaattcttttgatagaattgtacattaagcccatcagaactaggagctttgtcaccaggcaagtgagacaaagtcgattgaacttcatcataagtaaaaggttgactaagaaattggtattgggcagtattaagagaacaagaaatcccttgaagaataaaatgaatggcagtggaatcacttccctgaaaaagaggagagggaggtataaaattctctgaaatggtgacaaacaaggttgaaatcttggatgaccaagccattagccaatgtaatgtagctaatggtattatgtctatgcctagaggaagctctatggtagaagtatttagtgtttttatcgccagccttgagccaggaagcacgtgaacgttgtttccaaaagacttcctccttataaagagcaacatccagatcattttgaagagttttagcatgctgaaggtcatcttgatttaacacaggggaggagaaagtgttctcgaa

SEQ ID NO: 214326 - DNA, 677 bp, Cannabis indica
aatctcatctcccactggtctattggcctcattttaattgctggggctacctatttaatgaaccatacgccttctgactttattaaaaagcagtacatcttttgaattattacacaataaactccctacttatgatcatcttagatccttcgggtgtttagcttatggttcaactttaaactctaaacggcacaaattttcaccaaggagtcgtgcctctatttttattggttatccatccgggatgaaagcctatgttctacttgacattgaatctcaccaaatatacacatctagagatgttatatttcatgaggacatttttccatacttttctaccatttcttcaactgagattgatcattgtttttctcaaacaattcttccttgtcaaaaacctgttgcaccagcaacagtaccccatgccacaacctcccaatagcaacatattactgctacaccagtcgcacatgcaccaggttcatctccccaacagtctgctgcacctgcatcagctacaccggcagccaaatcatcccaagattagcaaattgttgttgattcaacaacaaccatacctggcacttcttcccgccatgacatacaaaccaccaaaacaggtagacctattgtcaaactcgctcatctaaaaatttatgtttgtcatgtggcttcca

SEQ ID NO: 214327 - DNA, 688 bp, Cannabis indica
atcatttccttatacaagctcaagttcgtgctttatatttttacatttttacaatcttttatttatatatatactctgcagtcctcttaactacatgttataaattatataaataaaattgagaaaattatattgtatacttattttattttacatactttaatttttatttttatttttgtattctttaagatatatcaatttttatagataatattcatattatatctcttagatcaatataaattatgtgctaaaatttaagtagaaggtgagattatattaggcaaaaacatttaaaaaataagtacatttagataaaatataatatgaagaagtttttaattaatagatacgaaaagtaatcttatacgtatccttaaataatttcacttatatacaattaaagtcaatttttttgaaaggataaatagggtgatttttagaattgcaaaaaaatatgcttattttttttttgaacaaaaaaaaaatatgctatttaattatgttttagtgtaatgaaatgaaatccattttttcctgtcactccttcaaaagactatacaattttcaatgagatagacaaaaactgtacccaattggcaattagaaaagtaatttttttccttcctaccttcaaaaaagaaagcaatataatgtaattacaagcagtcaaacgtacgtacgc

SEQ ID NO: 214328 - DNA, 771 bp, Cannabis indica
tctcttctttattctcttcttcatttgaaataccttaatacttatcctaatcacaattatatcattgcactaccacctccattaacaccaccacccttacactacaatcacaactattatcacttgcaccattaccttcacaccacaatcactaccattaccaccaccaggcccggtcctgggcatagacgtgctaggtctgtgcctagagcccacccagcccaagggcccaattttttttttctgttttaaaattatatattttttttttacaaattttgaaaaataccacattttttcagcaaagagcccaatttttttttccatgacccactttgtttcaggcccgtcctgaccaccactacaaacattttctctaaaccaccacaaccacaccgccgaaatcacccccactaccatcaccaccgtagctactgcaataactactgccactattacgattttcaaatccatataaacacctataaaatgcaaaataaataaaatccaaaaaatagatctcaaatctggtttgtatccgtttgtatcccctaaaccctttgaacccagtcgaacactaaaggataaaaaaaatttacttttgataaatcatcacagatctaattttatgtataaattatgagctatttgatttagtaaaacaagtaaaatttcaaaagaaaaaaattaggagtgaaagatatttaagaaaaaaaaatgaaagagaatttgagagagatctgagatggagagggagagagactgaaacat

SEQ ID NO: 214329 - DNA, 851 bp, Cannabis indica
gctcaatcgctcgatctagaggacttcgtccgagcgaatgtatgaggtgccctgttcggcctgtgttttgtgagcaggtacccagagtcgactctacgtgtcaccatcatgtgatgccacgtcagagtgactaaaaattgggataacaacattaatattaatatttttatattattattattaatattaataatgcacaattatattatacatataatattttataagtttacaataggtaaatgaaatataacgtaccttcattctttcctttcgacaaaaacctctccccctatgttaaatttctttaatttttaacccaaaacctagtgatctaagcatcgatagtagaaggatggcaaattctcagagcgggaaagcttacggtaagatttaattcccttttacctttaaaccaattggttttgtataagggttttacgaattagaatagtcatgaaatttctgaccttataagattgttctcgagtactcgcgggactagttctgatgctttcttgctaaaattatggtgatcttaggttagaaattgagtttggaaatttttttaacttaagtccgaacactagtggtgtttgctaaataagggctcgattttagattctattatgtaagtatggtagtatgtatggtatatatgtaccctatgaagtttggggtggtttggacaggttccgatagcatttcggtgagtgcgtaaacttggaaaatcacatttttttatccctaaccaacaggtcaaccggttgggaaccgattaactggttctagcaaaccggttaactgtttcaggccgggcagcctcgggaacttgggaatcatatttttgc

SEQ ID NO: 214330 - DNA, 701 bp, Cannabis indica
caaagatattttcttatatactttttgtgatctaagtaatttaaattgtaataaaaatataaaatagtcttatattaataaattgttatggataattataggttttaataattttatatacttaaaaaatattatatattcaactaaaattaataatttaaaataaaaaatctaaagaaaatattaatttttttgttagaaaacttaaaatatttttttaattttaaatttttgacaaaaattaaaaatataaaatattaatttatattagaattaatcaatattaatagggaaatttgcgacataaatgttttatattttcgattttatacacttaaataccacatctttttttttagcggattaaataccaaattttagattccatctattttcattattatttttctgttatatgttgagtgtgttcattaaagtaacaaatatcatattttcatttgtccatccatattaatttaaataataataattattaaaaaaattatgaaaattgaaaaatataattaattagcttcttaaatctaatttagacaattaatcaaaattaaagatcatattttttttttcaaattaccaatatagaattaacatacccacaaaatcaaattacataaactttaaactcatatttaaacacaaaaataatctaattcaaaccaatattacacactatctgctgc

SEQ ID NO: 214331 - DNA, 864 bp, Cannabis indica
aattgagctgagggtcctatttttaccatttaacaaaacagagagtccattttgtcatttaacaaaacagagggtccaattggtaatttttacaaaacacaaggtcttaaatagtatttacccatatataaatattatcgtaaaataaataatcctttgttccttaatatttatttattattttttattttaaaaaaatattttatatttcttacatattttatatttttaataattttatgtcaactaaccacatgaatctaatgtctaatatgatttttaaaactgtaaaaaccacactgcaaaaatatagtgcgttggagtgcggtttaggcggtttacattatcatcattatcatatactaaaataaaataaaaattagcctaataaagtttcaggaattaaacaagaagaaaaaactatcttatcaaacttttaatggcataacatatatactaatcttattattgtattaaattgttgctaaaaaattatatataatatatattatattatatatattgttgaccgaggttttcggcaaccaattaaatgatataatgagaagagctttggaataattaatgcagttagttttaacgtagttcgggcattaatgagtcatagtccacgagtctttgttattaatgagagttcttttactagagaatgttcttggtgagtctcctctctcttcttttttctcctcgattgatcgatcccccttttcgttttgttcaggggtatttatagagttttgtaaggatcacttaaaaagggatcacttgtcttttagtgcacgcccctaggtgcacaagttcctaagaggtctgaaataatacatacatgacctatgccgtagg

SEQ ID NO: 214332 - DNA, 527 bp, Cannabis indica
accaccatcatcctccccccccccctctctttctctctctctcattaccctcaatctctctccccctctctaattaattttttagacaaataaaaaaaatgaaatataactctaaccaccgcctgcacctcaggccactactaaccgagcctccaattccacttctgaatttctcacttttaatcaagataacttctaatttttatttgtgtatattaatttaggtttaattttgtatatattaatttaggtttaattttgtttatatatgtgtatagttagaatatatatatatatgtacaagtgtttgtggatatatatgagcttgtatgtgtacttttgtatatatatgtgtgtatgtatgtatatatgggtgagtatgtatatacatgtgtatttaaatatatatatatatataagtgtatgaatatatatatgtatatttaatatggttcggttaaaatagaacccataaatatacctatcgatgaaactcttacttttaactcttaggtggcgtttggttg

SEQ ID NO: 214333 - DNA, 1142 bp, Cannabis indica
attcaatgaataactattgtttaataaaaggttagattcctctcctttgggccttgtgtgagagttagggggccaatagtagtgggtacgatatactggaatcagtcctccctcatatgaacaatcccaattgtgaaggcccattttccttatttaaataattttattaggctaattatattagtttaacgtaattaaaattgaattagcaacgtaattaattttaaaacaaatgaaattaattttcattagattattttaaaattaatttcgaaaaacatatttagtttaaagaaaagattctagataatgatctttggtaactaatttatatattttaaacatttaattaagtagaaaaatatatttaagttgaaaatcaatttttaattaattttaaagcaacttaaattaagatatttttcttagaatttaaattagaattaataattacgttgattttattcaagatacttaataatttatttttattttaagaaatttaattaaatagtaaattatatttaagttaaaaatttatcaattaattaattttagaagaacttaaattagaatatttttcttagatattaaattagaattaataattaagttgattttaattaatattgagcttgcttttagccaacaacaatgagtctaatttgtaagcgacaagtagtttaatacaagtgtaatataataaagcgaataaagacacaagaattttatagaggttcagccccgagcagttcggttttagcctaatcctcgttatttgtattaacttaagaacaaggagaatggttccttttcttagagctcttacaatagtatctctaaatatgaattcttaaaaaaatgtttcgaccttttgcccagtgaatatgaatcactatttatagggctttaagcttgggaatgaagtatttcccttctagttacaattgatataagtagatagattgcatagtaaatacaaaatacactaatcgtgggattcagacaacttgcaatatctctgtgatctgatcccaaagttatagggatttctttggcgactcacgatgcgaaagctaaatttggtaagtgttggcatgctgcacggattgcttatttcccggctaagaggacttcgtccg

SEQ ID NO: 214334 - DNA, 505 bp, Cannabis indica
atttttttaattaaaaaatattactataataatgaaaaaaaatattaatttctatttttttttttttttggtatattagagaagtagaattcgaacttggaacattttttcatgaaaagagtggtgaaactgctaaattatgcctacatattattttttatcaaaacaatttttttcataaaattcttttcttatttaccacgcagtgtctaggaacattgctattatacacttataaagttttttttttttgatacattatgttatattatattttattgtattacattatattagcactataaaaaaaaaatctaactttaagtcacaacaaaacttgtgactaaaagtaaaaaaattaatgactaattataaattacaatttttatatattaatcacaaaaaataaatttgttcttgactaaagtatttttagtctacaatacttgtcatgactaaaatcaaattaatgacacttatatctaaataatatattttagttact

SEQ ID NO: 214335 - DNA, 623 bp, Cannabis indica
gtctggattatgtcaacatacgtttagcacaaggcactaaggcagacctacgacttttatactaatgtttgattataaaatgtttggtcaatttggtaatattttaaaaaatatgtttttttaaattgtttttattttcaattttttaatttttaatcaaaatttttttaaaaaattactttgaaaaattttgtactaaatttttttcttagctaatattttggactctgacctcagtttagatcttgaaactcggattcggacctagaccctgaccccaaccccgtaaccaaacctcgactcggaccctaattcaaacccctatattggaccctgatttggacctcgaacacagtcttggttttggagttgacttacaataaaatcaacaaataaaaatgaaaatgaaatttacagacttttgttttttatttctgatagaacacatttttgtatttcaaaaataaaattttaaatttgtgaataaaaaatttaaaatcataaatgttactaaacaccaccaaaatgcatcaagaaagactttttctgctgcttaaactattgtaaaaaaaaatggaaagaaagaagaaatcaaactagcatgcttagtataattttaatta

SEQ ID NO: 214336 - DNA, 749 bp, Cannabis indica
gtaattttaattactgatagttggttaatttagagaaaatttcgtgtatcaaacactctaaatatggctttcacaaaaaataaaaaacactcaaaatatctttatttattataaatgcatagaaatacaaaatatatacaaaaaagaaaatatgataaattaatttgttaaagtatatttccttctatttttaaatatttaaataaatttttaaaaataattgccttagaaatccactttcctaatcctcatattatatatttaaaaaaacgattttattagaagctcctaattatagggagatagcctatatatatattatatatattaatttcaaccctaaactatttagtcgaatttgtgaagattaataatatatagagcttctgagtcttcaatgggtaatgctaatgctacttcatcaccatcaacatcacaaggtaatattttgattattattatcattataatctatctaaattaattgattaataatatatattttttataataatattacatatcgtattagtaatcctttgtttgtgaatttgaagtattcaaaatgaaattataatcttcaatatctattaactacaaatcaaatacatgtttttagactaaattaagattctcaaatataattatttaaggattatttacactacattcaaatttttatactatattttttttcaaaaatactatatcttttttaaaaatatattgtgtattgcattaagttttca

SEQ ID NO: 214337 - DNA, 509 bp, Cannabis indica
aaattaacaagtgatatcaaaagccacttttggtagattctttgaggatttaaaattaatatttaaaaaatttaagaattttaaaaattagggttttgtttttctatttaagctttttaattgtagtttttgatatttatcttccatatttgttaaaagtaattttagattatcatgtttatagctttagtaatgtttttatgttgtaattttttatatgcttgtgtcaacgtgtatatatgttcaagttcaaccatgaaataatatgataaaaataaaataaaagttatatgcaactatttcatctgatggcgttttttttttttttttttttgttagatggaatgacccaaaagagagattacaaagggatgggatatgggtcatgaccattccaacaccaagtgttatctaattctaaagccatctgagccaagttgtgtgcacctgtattcccttgtcgaccaatatgatgaagggaaacagcgggaaacgaagataacacctgt

SEQ ID NO: 214338 - DNA, 497 bp, Cannabis indica
tattggaattatttttgaatatggaatagttattttattaaaaatagtaaaaaaaaaaacattctattgaaattgtattttaatattttaaaagtaattaaataaagaaatagaatgaaatttgattattttcattattttcaactaaacacagtggttactggtttattaaatagttcttaaaatctttggggtttgatattattattaaagaaaagacaaaagaaagacaataagtgggtcattgtctccctctctatcaaagtcttttgtcctttttggtccttttcgcttatatagatgtttaattaaattttgtgtacatgttttcgtattaaattttgcttaatcatttttcaggcccaaaaaaattcaatgttcaaattggattataaaatttttgtgggcatgaggccgtgtaattacatatggtgtatggactattttttccattaattccaccgacaatatagtaccatagaaatatgaagcaattt

SEQ ID NO: 214339 - DNA, 684 bp, Cannabis indica
actttattaagtaattacaccaagacttgaatactatttactagatcacactacacaaagcactcactacttttattttactactagacacctttactacacatttgtatgcaattcacactttactaaaaaatttatctttatattggaatactttagaacacacacttatgtatacaaaacttagcacaaactaggacttcacttaatttgggatacaccttaagatcttataatatatatatatatatatatatacttttcataatcaagttagtgacttcatttaactagaattttgtaggcgaaatttacatggcatactaacgtttgccctttttttacaaaaatattatcaggcgatattttttacttgtttactgtgttttttataagtttcatactgcagtatactgtgttaagttttcactgttgttctactgttgttttttagttgttctactgttgttttgagttgttctattttgtgttctactggtgttttataaaaacacaacttttgaaaaaaaaattccgtgtgacaatatttttataaaaattaaccaaaattctagtatttttgtaagtttcccttttgtagtttgttttgattttgggctcaagcctaatggctaaaaaggtctccaatcatccccatacttttaattaattcttttagtgttt

SEQ ID NO: 214340 - DNA, 513 bp, Cannabis indica
aactcataattcggggtgcaaaatagctttgtccctaagtatcactatcaccactactactaggaaatttcctcaaagatgatgcactatacaaaagattgttaatgaaaactagaaaataagatttacataatcaagagatgaaagatgattagtactatagccactaattacgcttaataggatggtacatgtagtgaacacaaagaaaagaggctgcaaaactaacactaccaaacattaaggaaattccatagcttatgatagccatgtatccaaagaagaatgagatttgcaaaaaaccagaccaatgtgatttcacatagtagtagtatatgcaaaagcagtaaacatataatccaactgacccgccccgaaaaaacgacctgaaacataaaaacaaacaaacaaacattagttacttattcttatgtcttagtttcgataattttttgcaaaatggtctccgatacacttagatagctggtccaaaaatttcaaaagtggtcgaaa

SEQ ID NO: 214341 - DNA, 606 bp, Cannabis indica
tcaaggtttagttttactttgacaaatgcttatctgacgttttctgtattttttttttttctagtgtaaatttgtggggtcaaacattagtaatgttttaacatttttggataacgttaagctagaaatgaagatgtgttcatcactgcgatccaattaagtatatatttccgaagttacatcttgtcaaattttatgttcagttcatgaatttctttcaaagcttccaacttggtattggtcttattcatgtaaaattattgtttgagtggcaggatcttgtgcttatttctacaatttggtatgctatgcctatgcatagtgatttgcctttcttaatgtaacaagggacattgtagttgttgtttttgctagatagtaacctttaatatgtctttgcagaatgctcatcagaagatggcaagattaagtcagaagatgaagtcattatgagtaactcatcatcttctatttctgattcaaatgctcgaaatacggcagaggtaactgaagcagtggctgaaataacagactcaatcctgagttcgagtggaatggatgatattggggatggtagagtttcaaaaggaaaatcagtcatttcca

SEQ ID NO: 214342 - DNA, 1046 bp, Cannabis indica
tcacaatatcattaataaagacatctaggaagtcattgaatatgaaaagctattttagaaatgtccttccttcgagccttcaactggtaataaccagatcgaagaccgatcttagagaagatggttctttcttaaaattaatcaacataacatctatccttgacaaaggatactcgttcatcaccgttaattggtttaatctcccagcagtcaatactcactcatatggtgtcatccttcttcctcataaataaaacctactcaaactgaaatttcaaacctaatatttcctgtaacggaatatttacccttttcaatcctacagttaccatccaattcagactttggataccggttttactccaagtatcaattcaattcaaaattaatttcccatttcatcaataatcttggtagctcttccaaaaaggcatccagaagcccttgagccacaaaattgtgtctcagttccacggatgtttcctttgcaatatttgccacactaactgaaaggttggtacatccatcccataataaaccttcagccttaaacaccatgatcaatggattctgggacctttgatccttgcccaagaacacgaaggtcctcaccttctgattccaaagctaccatctttccttcctaatgacatttgtactatattttaccagtcaatccaatcctcaacattacctcaaatcacctcaatttaactcaactaaaacaaccaaccacatcctttagccaatccaacactgggcatttactttcatgaatctctctcttcacattatttcctttgtgatctaatccttgtaccctcaacattaagggttagctcaatcacctgagcataaaactagaaaactcctagttatttagtcataatatctacattctgaacaatatacccgttccaccttaaagccttcctagcggccttagtagtcgctgtattttaacaaaactttactaatcagttcagcctagtgtcattctccatcactatgctgcccggaattaaccacacaggttctactacctt

SEQ ID NO: 214343 - DNA, 650 bp, Cannabis indica
ttttttatagatgtcacatgcattgagatgatgacatgtggaaaaaggaagccaaggaatgactcatcgaacaactctatgagagcgcgattaaacgtccttttgataggcacgaactctgaaggattttgatgatgtaacaccttgaaaacccacatgccataattaccaaccgccattcacgaaccttgataagttaagtcaaaagtcacccgtgatgtgacaactcgattgtccctcaaggtagtttcaccatttgactgataattatcaaaactaggggcatgtgttataagatgaattttttatataaaattatgagtatagtctcatatttatctaacacgtggagccagttctcggtagaaaaaggatgacgtgtcaagggtaaaaatcccgatagggtttctccttgcatgatagaaacatgtgaggaggtgaccgagacaagatctagttgcacactacgcgccgcttagtaaaagagaataaaaataagacatagagagaagattatcacaatcgcgacatatatcgaacatatgcagtgatctggtatttttccctcgcgccctatgtaaagactgcaaatttacgatgattagtcagaatgctattaggcacgataactcgtgatagacccatgagcc

SEQ ID NO: 214344 - DNA, 500 bp, Cannabis indica
gtgtgagattccctgtttcattagtaggtgacacaacttcctcaaccgcataacattcaaccatatgagactttttaattgatgccccaatcttctcccataattcaccatcactagttacacactcaacaacatcactatctgcccacttaaagaaaaacttcaatgccatccaatttttgtgacccacatccctagctatggcaaacagttcattcatactaatagtttctaataaacaaaaatgtatatagtgagttttcccgcctaggtaagaggggttgttacctatattcactaattttcctttgagatgatactttagggtgaaagcatttgatgttggacctgcacagtaaacaaattgatatacaaatattagtttaatgtacccaatactatttaaagcattgaacaacaacaaagtaaaaaaacaaaaccccataactcaatacaagtataccccacaaaccctttggacccaattcaagattccaaaa

SEQ ID NO: 214345 - DNA, 531 bp, Cannabis indica
tgctttgtcctagcctccaaaaaacttcggtcttacttccaaaatcacacaataaaggtgttcaccgatcaaccacttaggcaagttctgatgaacccagaagcatcaaggtgcctacacaagtaggcagtagaactaggtctgtttgagatcacctaccagcctcaaacaacagtcaaaggacaggcattaccagacttcattcctgaatacactagccatgacaaagacgatcatatgatttgtgaagaccaggtctacatgcctcatactggagcttagggggacactggaccttcctagaaattatatgttgatgactcctccaacgagcacaattctggtgctggtcccatcttagttactctatagagatattgaactcacactgctttatagtttgagttcaccgcaacaaacaacaaagtagagtatgaggcactcttagcacaactatggttagcactagcaatcaaagccaaatcactcaagatctacagtgattcaaagctagttgttaatcagattctc

SEQ ID NO: 214346 - DNA, 1745 bp, Cannabis indica
atataaaatcaatattttaattcgatttcattatacataactaaatagatatagtttggagttcttactttgctctttaataaatttattatttaattttaattaatttaaataatattattctttttaaaatttagttaaaataatttttttgaactgatattattaaaacaaatttagtcaaaagtttgagattttctaccattaaaaggtggattagtttgtgacccaaataataataattacgaagtgatgttagtattttatcatatatagtagccttaatatacttcgacatgtaaattgtgatgcaaccttttattttaacttatgtatttacaaaattatttaattattgtaatatttgaaaaaatatatatataacttaatataaaattaaacattcgtgccttgcacaaaacattatctagtatatatatataatactttaaagaaaattattgtgttgtccattttaatttataaaataattaaaaatggtattatatataatgagtaatgatatcggcacacataaataatattaagataaaagatttaagttttgaaatctcattttttcttggagaattactccatttactatttttttaaaaaaaaaattttatggtttaagtttctaaagtgcacgtaatttctatgtgggttgctatacgatttttggttacgatttaagttgctctgctagttgcaatagagatttctatgtcgaatacgaattccataaaaatacaaaaaaaaataataaataaaaataacttttagaaaaagaataccaagacaatatcattaatcaacaagaacaggcttgtaaagagacactaggcttgtaaagagacactgatacaacaaaggtaatcatgccaccaaacataatgatcgtttcaattttgccaataagtgagcaatattattagcaatcatgagaaatcactagagtagtattcaataagccaaaatttttctaataatacaacctaaattgaatgatccaccaaataatttttgaaagcattaatgacattgagagaattggattccaacttaacatgagcatagctaaaacactaccgaattaaagaatcccgcaacaccctcaaaactaactttagcataattaaatatccaaactatagtatcacataaatttatgttaataatctcatttggaggcttcacccacctatgcctaataactcacctagagctattagtagctctattataatatatacaaactaatattagtagctctataataatatatacaaactattggccttgtagttcttaatatacactaacttattaaagtgaagctattagtgcttcacttataatttgagattccacaatttggatcataacaaaggtttatcttagaaactcgaaatcttatcttctcatatataattctttatcttaattatttatttcaaatttcaatgagatttatagaagatcatttttatttggcatattaattaaggtgcctatagtacacacactatatatatatatatatctatatatattgtacattttattaattaattaactaatttcgtattgaaataaaaaggaaaaaagtaatatcatctagtatttgtctaaaagtactaaaatttactattattgtatattaactatattttaaattgtatcatgatccatatgcaatggtctttctatatacgtcactatcatgatcatgaagaacttat

SEQ ID NO: 214347 - DNA, 685 bp, Cannabis indica
ataaactatacaatatgaattactagtaaattctcacatattttcatcaaaataacgtacgtattatgattcagaatcattcaaagaaattataaaatgagaaccccaaccagcgctgatcattttcttgagattttctatattttcaagcaaaaaaaaaaaaaaatatggttagcatcattacagttcagacctatctaatattgttgtttttaatttgtttttttttttttgttttgctataacaaaaaaaagtgctatacttaactccttaatacatgtcattctaatttattatgtttgtccagccatgagaccgcttggattattctaggaaactatactgttgattaattggagttttaatatttatatatttgtgtttgatgtgaaataataggtgccttcccgtttatgtgtgtggctttagcatatatacgcggtgtgatgacttggtctgctacgtaaacttctcataacattaataaattataagttaatgtaagtgtgaaatggtcctctgaatttgtaagaattcaaagcttccaatctacaatggacgagatgaaaatgtttgaattaaatgaatctctctccagcacaagcaaacctatattatattatagttattacttatataatttataatcagttgataagaattagcctaagcatatacttctac

SEQ ID NO: 214348 - DNA, 726 bp, Cannabis indica
tgatatatatgtaatgtatatgagaatcggtgtagaaaaatgacgattataccctttactcttggcaaatgcataaagagagtttgaccatagataagaattaatatagtagtgcagatggcatctgaattagcaggaaagagtggagagaatggaattagaatcactttggtcggcctctcacaaaaaaaggttaatttttgagaaagttgctgagaaaaaaaaaagagagaaaagcacattttagagtgtcaatgaagacacgaattggaaattaaaaaaaaaaagaaatgtgtaaatttttttgtggttgacctagctattattgccacaaaatgagctagcttcattagaaacaacctttccttcaaatcaatttactcaaacataaatatgtgcatatatatatacatacaattttaataaattctggtgagatctttatgttgatgcgtcacggcgcatgcaaagtctagatatggggatttttatgcctaacaaaatgtactctatggtcgacgttttattatatatatatatatatatatgctgccatttatattaatataattatatataattaagaagaaaaataaaagattatctgatgaaagttgcaggatatacatgtccagcttcatgatgatcgatccaccagctggattgattcttctgagctaaaaatattgattaaaagaattggcgatggtcacttcgatctcttaa

SEQ ID NO: 214349 - DNA, 671 bp, Cannabis indica
atgggaaggggaaccaaattagaccaaacatagacggatctagggatgttgaggaaggacaaaaattcactctgaaatttaaaaacatattaggataaataacggcataagtacttaaaatttaagctttataagtgtcataaacctaatatttatttttagcagcataagtacccaatatatataaaaccgtaatttttctttaattttgtcagtacaatttttgtgttaatataccactaaaaataaatactgactttatgccgcatataaacttaaaattgtaggtacttatgacgctatttacctaatatattaatgtaaaattgttgctttcatatgtatagtagtttaatagaacaaatttgttaagatgctttcatgtatctccgagtttgctcccccccttttttttttcttagtgtctacattttatttattaacaaaattaaaaaagaaaaggaacacaaatagatttgaacttatgactactagagtagacagatgttgccaaattatcattctattaaatttaacttgtaattattattttgtattatattaaatgtataattaagcctaccctaaaattaaattctgagtcatcgtacacaagcacaatccctttattctatatatttatacattatatgtcatgccttataatcaac

SEQ ID NO: 214350 - DNA, 853 bp, Cannabis indica
actatatcatttagtatcaataataagattaataatattatgagtacatatatcacacacaaaatcaatacacaagtcactttaagaaatagtcactatacaaaaaaatttatttttagttacaacaaaatttgtggctaaaaataaataaattgtaactaattataaagttcatgactttagtcaggggcggacccacattgtagcgagggggggcagtcgccccccctgaaaaaaaaaatcgagaaaaaaatgtatatgtattttaattagttacaacatatatttgtattaaaagatgatatttatagatataatagtaaccttggtgtaatggttaaggtagttggtaaataggttagagggtaaaggttcaaaccccactaactacactttatattttctttttaaatttatttacgcccccctcactttaaattctgggtccgccactgactttagtcacaatatttgttgtgactaaaactaaattagtgataacttataactgaggctatattttagtcataagtaacattttgttcggactaaaattcacatttagtcaaaaaaaaattattttatgattaaaaattgtcactaaaaaataatttttgccagtgagtattaggacttagctaaagatgaatattaattctataattacttgttatataggcatgtctgtgaaatttgtgtatgtatataacattatatttatctttaaaataatatatataaaaaataaaatattattatacaacctatataaaacaccacatcaataagtatataaatttagttagtttttttttttttttttttttattttttttatttttgtatagtcgtt

SEQ ID NO: 214351 - DNA, 805 bp, Cannabis indica
tgtgtaatgccaaaatgtatagaccaaaaagatatagaatggattagattattataagggaagtaattgtatagaaatacacatgctctttggtgagccatagtttgtacaaatgtgattgtttgcaatgaaaattctgatttaatcaaaaaaaaaaaagaatttcatgtcttgagttttgaaataacccttaactaaaaagaaactactcgaaactagacattataataaaaatcataataaacagtaagagtttaaggagaagaaaaagaacaatgatgtagaacaatcgatgctgcaatctctgtcttcttcttgctctctctctctctaagtttctctcttaattttgtagttcaaaagttgctaaaaatgaaccttgaaatcatataaatacccctaaaaaaaatcaaagattaaaaaaaaagataaaaatttgaaaactagcagaaatcgcgttctcaccgcggccacgagttcccgtcgctgccaaaatttttttgtctcgtgttcaaattagtattttggtcataacttctttaatacaagtcataattggacgattcaaaatgttctggaaagctgggaacgagatctacaactttcatgttcagttccaagtgcagttctgtctttaaagtcgtctacatttgcaattaagttttgtcttgtaaaactgagctcgctggcttccactattttctaccaaaatatgctaacatctctctaaatgactctaaatgcatgattaatctttaaaacagcctaacaaattataatttcactaatcaataatttaaagaat

SEQ ID NO: 214352 - DNA, 819 bp, Cannabis indica
aaagaaatttaattctaaaaatctaaaatagactttttattcttgagaattgattgaagatataatacttgtgataaaggtttgatcttaattttgtatatggattattttacaaatacataaaaataataataaaaattataaaatacggttgtacaaatttatataaacttacttttttttgttcagaaaaggataaattcttgttctttacttactttggcataccttgctaaagtcaaaagttgtctctcgaatattattcttattaggacatacatatctctaataataaaatttttacgatttttatgattttatttatagaaaatactattttttttaatatgtttttatattatactcttataaatttgctgttgattttttattatttatatattattttttatgtctatttttttattatttgtatgcttttaaaaggacttaaaaatataaaaaataatgattaatgtaattaagtgttcatgaaaaacatcattatgggccatttatgttgtagtgtcaactaagtgtttagtgatcaagtgctccagtggaaaactgtacttccatttcactgaaagttgatcaattggatcacctcagactcagcccaaagttagaatctacacatttattgtgtttttttttaaaaaaatactactttggacaaaagattacaattttattattatacggaattttttataaaaatactgtttttttataaaacaattgtaaaacagcaaaacagaacaattaaaacaacagtggaactactaaaaaataaccgtggcataacagtaaaaactt

SEQ ID NO: 214353 - DNA, 608 bp, Cannabis indica
tctctatttcatctcctcataacttctctctctacttttttttatttagttttattacagattataatctatatatttatataatttagttggcatcttagatttctctaatgtgatttaacttttttcttattaattccaattctaatattttataatatattatgagtagtaaactaaaagtcattcaaatgagttataaccgttcaaattttgtgctataattaatatatgctctctcaaatttggttatttatggatatatattttttaaaatttttatattaaagttaatcattcaatgagttaaatttaattctattatgtacagggagatgaacgatcaaaacattcaatttacataatcatatctattctatataaaatgtggctatataaaaaaaactttctttatcgagttggtcgggttagttcaagttgattgggcgggtttatattattttcaacctgtccagtataaagattgggcgggttatattttcgtcgggttatctcggtttagttcaagcgggttgttcgggttgggcagtttacaaaaatttatgtacaacctttttgatatgttttttttctcttctctttatgag

SEQ ID NO: 214354 - DNA, 1315 bp, Cannabis indica
atggcagaaagtgtagatctccccttcgctaggatgaaacaggggagaagaagtgtttgggaccggagtcagtacagcggactaatgaagcaattgagaagattaaagccagaatgcttgcttctcaaagcaggcaaaagagttatgcagatccgaaacgcaaaaatatggagtttcaagtaggggatcatgtgtttctacgagtgtctccgatgaaaggaataggtgtttcaggaaaagaggcaagttatgccctagattacaggacctttcgagattcttgagaaggttgaacaagtggcatatcgattagctttgcctccagctgtttcagcagttcacaacatattccatgttcctatgctaaggaagtacgtttcagaccctgctcatgtactaagttatgaaaatcttgagctgcaaaaggatttgtcatattaagaacagccagttcagatccttgacagaaaggataaggtccttcggaacaagaccataactttggtcaaagtactctggagaaatagcagggtggaggaagccacctgggagttagaatctgacatgagagctcaatatccagagtttttcaggttagatttcgaggacgaaatccttttaggggggataattgtaaagaccacttagttttaatttgaaaattatttgatgatttattttaattcagaatgcattttatatgtcatatttagaatttcataatttatcatgttgtgtgcccgacaacattagaacgcggggtttggctattagaatcccatcctagtatttttagtatagcggagcagtatagttagacattgagaatgtcgggaatagtcgagattttagagttgacaaaaatacccctaagtgacttttttatgatttttagtgtgggaggggcaaaatggtcattttgccaatttatattttgtctttttgtgagtttatgttaagttttaaaatctcattattagtgattattaagttggtattattaataaaactaaactcaatttatatcactttattaaaaaaataagaaaaaatagataaaggaaacattttctctctcaaactcaccctctctctttctctcttagaaccagctagggttctagattttctactcttttttaagcaatttgcagcaagtttttagtgttcttaagctctaggtaagctcttaactttatcctcttaagtttcttgaattttaagaaagtggattatgcatgtttttgtgatttttgctgctgtggttgttgttcgtgtatgatttgtttctagagttagattatggttttatatg

SEQ ID NO: 214355 - DNA, 547 bp, Cannabis indica
gtgtacaccgtgtccacgtagatattctaccatgttagtttacagctaaaaatagatgaaaatgttaaactgctaacagaaaacgagtttagggggttttaccactaaaattttagaattgggggttagttacaaaaacctagtcatttaaggagattatggcgcaaattactctatattaaattgcgtttatacaatatttatatataaaagggttaaattttatttatatacaagtaaatgtataatattacaaaaattgtaaaaaaaaaaatataattacataattatatacaattttatgaatatttacaaataaacatatatgtttacaattttaatttattgattatttttctaaaaaacgcacaaagctaaatatgtaaatataaaagttaatatctatatttgatatattactaaaataatatattaactaaaatttagtataaaatttaaaaaaaaaattatacataacacatttataaattttatttacattttataaaaaatgcatacatatttgtttattaaacatttgattagt

SEQ ID NO: 214356 - DNA, 737 bp, Cannabis indica
ggaaagctattcacaatgctttgccggttgcttcagagcttttcaagaggaaatcgctcacttttgcctcatgtagtttgtgcctcaatgcttgggaatctgtggggcatgcaatgttctcttgtaaacatgctagacacgtttggaaagttgctggtttttcattcaataacagagcggctgtttccatgaaaattgaagattatttgtttcagatatcagaaagctataccaaatctgagttggaaatgattttttgcactatgtggtctatttggtctgatcgtaacaatatcattcatggtaaacttcctcaacagccactggttatctatgctaaagcacacacttttctaaataattaccaagcggctcaacaactatctctccatgctagtttggcaccagctgacactccaaacactagcaaaacttggactcctcctcctcctactttcctaaaattgaatgtagatgcatcctttgatgaagctagaaatagaattggatttggtgctataatcagagactccacaggcaaggtactggctgcaatgtctcacccaattgctagttgctgtcgaccacaggacatggaagccaaggggctgttttatagcctcaaatgggctagacatctcaatttaaaggttgataaggtggaaacggactccttgatccttgttgatgccctccgcaaatcaacatcaaatagatcttcttttcaagatttaatt

SEQ ID NO: 214357 - DNA, 670 bp, Cannabis indica
aactttgtttttctgtttgatatcctcaatatttattgaagactctgcatccttcataagttctaataacctagattgcaagtcatcactggattagtaaatttacatctaaacctagaatcctgattatttgcaatacatgaaatttcttgctcaaaatgacaacaaaatcaatgttataaccagaaattgtaaaattttaaagggacaaatagaaacctcttctctctatcagcatctaatggacaatgttcactgttcgatcttttggaagtaggatcaactataacagccttattaagctcaacatcagctgaatcccgtttcaatcgttttactgatccaaacctctcattatctaaggtgtatagcttatcacccaatgtgttgttttcatcatccatggaaggattcagttcctctctatatgtgttatttacttctgctttcttatagatacttgatccaacgggtaattttccagtaatcgtcccaccatgagatttttccaaaggaagaaatctagccgtagactcaattttcctttgacctgccagcaactctgatgtctgtttttgcctctttctccaatactaatgttcctttctttgacagtgcatttcattttttcaacaatgggaaacttcacatggttcctcaacggagtacc

SEQ ID NO: 214358 - DNA, 723 bp, Cannabis indica
aggccttaaatataaaatagacgtgtgagcgttacacgtgggtctatgcaatatagacattaatagatgtgtgagcgtaacacgtgggtctatgctacatagacattaataggcgtgtgagcgtaacacgtgggtctatgcaatatatacattcattatagtggcattattatatatggaataatgtgatacaaaatgcagtggcacagtatatacgcattggcgtattgtataaagtgtaattaataattataattatttaattgttttttatattgtcttgttgggcttggctcacgggtgctctactgtgcaggaaaggataacttagtttgtgattggccatgagatcgaggacttggcggtggattgtacatgttcaggccatactagataacgtgggttgggtctaccagttgatgtactttgtattctcttattttgccgtttaggtcggcatataaaagtaacttgtattgttttgtgaaaaattttacgggatcccaaaacgtgtgtaatattttggaatggtttgtaaaattaaatagttataagttatgttttcatttcgtaaataatttaaagtttaaattccgctcttattctagtaatcctggtttagcggggttaggttaagttcattaggaaatcatagcgtgcctaattgttagggcgttacagaatcaaagaaactaataacatgagcatgagttcataatcact

SEQ ID NO: 214359 - DNA, 1141 bp, Cannabis indica
tatcttatttactttattaggaaacgtaatcggaatgcttaaattaattaaattgcccttttaagttaaactacattatatgataattattttgtaagatatattttaaagaacaaaattgtcattatatattttatattaaaaaataaaataaaaataattaaaattactcttaatggcattccttacaaaattagtagaggaagttctctttttcttttctcctttatttaataaagttttccattttctaattttaataatgtaagttctcctttttttttctttatttaattaagttttttcttttttatattatatggtagttattttataagatatattttgagtacattctcgttgtccttcgagtttgactcaagcacatccacttggataattgaatattatttttaagttttcttaaagagtaattatcacatttctctctttatacacgtcagaatattttaatatattgtattaagaattttgtgaaaacaataaaataaaaataaagagaagtactattattcatagaactcaaacaattaaatattgagttttttaatttttacatgcaattttttttttttttttttttttttgcatttatacaaaaatatgtagaataactaaccaagcaacttaaagggtaatctaaattcacattgcaactcactcaccaaccaccgaaacaacccaaatcatgaaaatgaaaaaataaaataaaaaaaaaaaataatatataaaataatttcccaaaatatttctttttactttcagaaactaaatttccaaacaaattaaaactcaggggcatatataataactaaataaataataaaataaaaaactttgaaagttttaatacaaactcaaatattaaattaaagaaaaaatattatattctatgatttatctaatagaaaaaccaatgattgtgttgttatatgaatattattttgccataaacaagctaagtcagttctgtaaggcttctacttctgatcagtggtatgcttgcaaatgggttctaagataccttgttggtacaactcattatggtatcagctttacaccaactcaaaatttagatatccaaggatctatagatgctgattgggccaactctattgat

SEQ ID NO: 214360 - DNA, 444 bp, Cannabis indica
tacttgatttggtaaataaatataatagttgcataactttaaaatgttaaagtcaacacaattattaaaatcacacgcctaaataaaattaagtaaataattaccaaatcatattttttcaattttaatttaaactaaataaaatataaatttcaaattatatttttaaataaaaataaaaaattaattaaatacaatttaatgaccaaagtaacttgaataattctttttcttttttctctttttttttttttgaaaaaattgcttagaaaaatgatgtttcgttttgttccgtcttcaaccttcgaattgggtcaatttgacctattattctgtaactcgagtctgattaacccgacccaaaactagattgaaatttacaattttgacgattaaaatgcacaaaattaacttcaaatgaatctaaatgaaaaaaaattaata

SEQ ID NO: 214361 - DNA, 517 bp, Cannabis indica
ctttaagccggcgatcaaggcttgatatttagcctcattatttgatgcgtcaaattggaattttagagcatagtgaaacttaaagccttccaacgatattaatattacccctggacctgaaccctgttcgttgattgcgccatccacatataacttccaggtttctgcatcttgcttatcaggtgggatttcctctagggttataccttctgtcaagaagtcagccaaagcttgacccttgatggatgtttaaggatggtatgttatatcgaactggcccagttcaatcgatcattttatcaatcttccagaaacatctagttttgataaaacttgtctcaagggcggatcggttaacacttttatggggtgagcctagaaacgtggtcgtatattgcaagacgcatggactaggcagaaatcgagttcttgtagagggggatacctaggttctgcccctagtaaccttttacttacgtcgtaaataggttaccggtgcttaccctcttctcgcact

SEQ ID NO: 214362 - DNA, 512 bp, Cannabis indica
cagccttagtgtattttgtgaaagaattagcttgaagaccataaagaagaggaatgataatgcttacaagaaaaatgaagaaaaattggagcttttatctttgaatgtagggaagaataaactttttagaaaaggcatattattttggataaatagtggcataaatatttaagtttttaagcggcataaactcaatatttatttttagcggtttaactacttaatgtttataaaactgtaatttttctctaatttcgtcagtacatactctgttattatcttaaacaggacacatataactataatgcctatattataggtcattgagtctagataaaaaaatgtagtatcaattatttttaaatatttttttaaataactttaaaacggagtttgtactgacgaaactggaagaaaattacagctttacaaatattgaatacttatgccgctaaaaataaacattaaatttatgctgcctataaatttaaaactttatgtacttatgccgc

SEQ ID NO: 214363 - DNA, 579 bp, Cannabis indica
ttctattcttatatataatttttctacacagtttaaaatagtaacattttttatacatacaatttttttttcttcctttgaatttgttatttgttatttattttaatgtgttattttttttttttttggtaaattagcaagtgtattgaatccaaacaacaatttatacaacctaagagcatcctctaattagaggaccttcaaactctataatctttacaatgaattaaaccaattctcctcactacttgttacaattttcggtccatatacatgctattctatttttaatgacacctttaattttgtatacaatttatcacaattttccatctcaccattccaaaatttattgtttcggttgctccaaatcatatataccagcgctgcaatggcagcagcgtaaaccttcctttcgaagctgtcaacttttgctttctttatccacttgctgatattcttcaaggtcacagccatattcctccattgaagccattgctaaatttgtgctaagcaattcttcaaaaacaggcagttaaacaataggtgtccattgtctcgctgccatcattgcacagt

SEQ ID NO: 214364 - DNA, 587 bp, Cannabis indica
tatttttaagcctatctagatcccatccatttatatattaaatgttagattttaccatctgatacgatccaattaatttcagtcatctaatcgatccaacatccactggataatggattgggtcggttctatccattggatgtatttcatatatatttattagtttaatttaggtttatccgatattttagacctagtatttgttggatcgggtcagattcatctaatattttaagcttagtatgtattgaattggattggatccatccattcaaagaaaaaaagagtaaaattttaatattaatttttgtatgtacatatatattttatatataacaacataaaattaaattactcatcttaactaaattaaaatactaattaattcgattggatgttggatgtattggatttttggacatcccatccaacatccgatctaattcaatttgatattaaaaataacattcaatctgatctgatcacaattggatatccaatatttggcagtcggttgtagttggatctgttggttgtcattagattagatcgattaatgcacacctctagataaaaaaaaaaaaaaa

SEQ ID NO: 214365 - DNA, 1522 bp, Cannabis indica
ggcgctcctttggaagtaacggacgtttatgtgccctattgggtagttcatggtactccttacggtgggagggcctctgctagcaaccatcttaggaactatgtataaacctttgcttccccagtggtctttgagattgctattaagctaaaggagttgaggataggatatgcaccacctaatttctttttgagttatataattaaatatatatgtgtatatatataaaaagatagttacttaaataattttaatatataattttttaaattggttttttatattttttttttcttattcaaattttgtgaaaatttcataagcttactttttaaaaaaatcccacattacttagaaagtatagagggtctagcagtggaagagatggaagaacaacgaaaaacctaatgtgaagaaatcaacaaagtcccttggttagagcctcgttgggaccaaacagtgaatactgaccatactttaattaagcgaaacaaatttgtccttttggaggtggcacacaagtctttacagtctctcagtgtgttactttttttttttttttttatatcaaatacatattttgattgcacatatcattattttatattgtttattattaatcatattgctcaaatttacaaatactaaatgtttggatttttataggtaaaatttaaacttcattgtatgtgtaagagcagtctcaacaatatagctaaaatacttttttagctaaacatattcactattccaaattaaaatccttagcttaagcattacataacatatttgaagaaagcaattgtaagatttattgaaggaaattagtgataagtggacaaaatatatgttttaacagctaatttttaaaagcccaagcgtaggtctgatagttgtacatacaatttaattgatttgaagaagggatgaataagcatataaaaagattaataacaaagaatgagattattaagggtggtaatttggtacagacacgataacacgacttaaaactcgcatgaaataaatgagtttgtgtttgtcttaaatgaatcgagtcatttttcaggttgacataactgactcgtttattcaacggatcatttttggattgagatatacttaacccaaaaatgatatgaaaatgacctatgtatctaagagtatctatacactcttgagtttattatatttattacatataaatatttttttagttaaataggacataaacatactagattatttataaatgtgtcacaacaagattgtaaacatgttaaatttgttataaacgtattaataaatttgtaagttaactaaaattaaatatgattctttatataaggttaaacagattggtcacgtcaatttgtttataaatttgaattttaatttttgacacgattaataaataagttgggtttgaatttgacatttacttataatacttaagtctcaacacgaatcgaacacgacccacaaagacaaattttggctcataagattaattaatcaacct

SEQ ID NO: 214366 - DNA, 485 bp, Cannabis indica
tatatatatatatgtatatgttggatcttactattgtctaatctgaaaggccctgtaatggcctctctttcttactcttcccagtaacggtgcgcctatttgcctttattttattttatttatttttattttattttattttaaatatctttaaagtgtgtgggacctttaatgtttcaatatatatgtttttttttcaaggaaaaaaatcatatagaagtcaaattgttttctttagaattaaatagtagtatcaagctagtagtatatagtttgaccacttaggaaacataataatggtataatttaaaaaaaaacacaaaaaaaaaattataaaatattgttacacacaattttaaatatttttacggtttttaaaattttctttatataaaatatgatattttcaggattgagcttaggctgagacagattaaacccgtgtctagggtccattcagcctaggggttcaaaaataatatttt

SEQ ID NO: 214367 - DNA, 610 bp, Cannabis indica
atcaatattttggactccgatcctaacttagactttagaaactgcacccggacgcgaccccaaacttagacctgccgcagtctcgacttcgaactcggcctcagacccgacttaaataaaatcaacaaataaaaatgaaaataaaatttacagaacacacttttatttttatttttaaaattgaaaaaaatggttacagaacatattttatttttaaaataaattttaaaaccaaaatttaaatttattttatgattaaaaatctaaaacaaagtgttatcaaatactaccatgattgattaattgatttttaaaatatattcatcagtaaaacttaaaatttaatattaaccactatcttttattttcttataatttaatatattattattataattaccatgtagaagttacttattattattattattttattatttgttagtattattgatatgaatatagtagttagagaagtatattgcctgcaattcgatttattactatatcatgataaatatgctttgagagcagtttttttttttttttttaaaaaaaattcaattaaatatttcagaccacaattccaaactaatccgttttaagtgga

SEQ ID NO: 214368 - DNA, 730 bp, Cannabis indica
ttatacaattcataattgtcatacttaaacaacataatagtttcacaaataattgttttgtacctgcttaagaatttatatcccatagaaattaattctcactcaaaatttattcatcaaataaaatctttccctgtacagtattgtatagaggtgactcggcgaccatagacctatatttcgaagctccaataaatccaagattattatcaatctcatcaatagaataatttgtttattaattttattattaatccactataaatatggaattgcactctttgacaatatagaattataattacagaatacttacttgtagttcattaatataatcaatataaacagttcgtcctctaattattagttcataattagagttggtcaaaataccactttaccattccaattgtctatttattccttatccaaggacaaaacacttatccgatgtgtaagtatacattatcgctgattatcatgtcagtctaaatttagtgaactgacaaatcataagaattaaatttttgaacttataagcataattatatttcactgtgctaacgacactataatcatgtacaaatatatatttacatatgtccaggacttaatagaatttatacattaaatataatcaatgaaataaatcatgtgaaccatgcaacataaacgatttctgatcttttattaattagtaaatttgattatattaaatgatatacaaact

SEQ ID NO: 214369 - DNA, 1460 bp, Cannabis indica
atttgatttatttaatattttagacctaatattattttggatcagatcagatcaatccaatattttaggatccaatatgtattggatttatggattcatccaatctaaaaaaaaaagattaaaattttaatgttaattttaatatatacatatatattttatgtataacaatataaaatctaattactcatctccaaactaaatgaaaatactaattagtttaattagatgttggatgtattagatttttggacacaccattcaacatccgatccgatccaattggatattcaaaaatcacatccaatctgatccggtcacaattggatatccaatgtttagcggtcggttataattgaatcgatcaattgtcattggattggatgatctatgcacacccctaatggcatgtttactcaaaagggaaggttctcctcctatttttataggaaatacctttccctattctaacttaatttattttaattttattagttaaaaatgaaaaaaacaaatatatgccttttaaaaatctataaacagaaaataattacatgttctaataatgataattttgtcaaattaaagtattatgattaccttttttaattatgtaaacaaaataatatgattctgattttcttttcggacagtttagtaaatagcataataaaatattgtttctaattattttttattttaaaccgatatatttctcccattaattattctaattccaattaaaatttagtaaaagtgctataaattatataatggattttcattctatgctagcatatatacgagatagtgatgttataagttatataattgggtcaaaaacatatagacccagcatgcattccaacaaaaatagtagaaaaagtggcttaaaaattaaaactgattaatttttttaagtatttttaatttaaaaagaaaaaatatgatacatacagtattaatatagatgtggtttaataatatttttttttttaattttttaatcaccaaaataaaaatacgttatgtaactacttttatttttaattttaaaaacagaaaataaaagtttgttctataaaattcatattcattttcattttttgattttatttaagtctagtctaagtccaagctcgaattcgggtcagaggccaagttcaacgccaaggaggtggggagggggaaagatttggatcgggtctgatcaaagtgcaaaatattaattaagaaggaaaaattatttaaaaaatatattgaaagtattttttttgtttttaaaattttaattctcaattaaaaattaaaaagtgagaacagttttataaaacataatttggaaaaaatattttaacttctaacaattttaaaaacaaaaaaccaattaaaaaagatattaccagacactaccataacatttaaccatctcaccaactgatattactgaatttaattcc

SEQ ID NO: 214370 - DNA, 658 bp, Cannabis indica
gtgacaaccaaaaggactgcttgcttaccagtcaccttatttgaaatcatgctcaccaacaacatcactcgtagaactagcagggaatgcgaatggccgagaaacacaggcatacaacaccccaagagatcgagaattctcgatctcactcctggatgacacgcgcaaggaacgaggcacaaaaccctttgagtcaaagctgaggcacgtagagtgaggcttcaagtcgagtttcttggccagcctcgtgggcagcaacccaaaaattaattttggggtcaattttgactcgattttcaatccgtaaaatttgtacatgcataattttcaaccaacaatatttctaattttttttatcacaattaatataatatatattccatagaaatacatattgtttcacataaaaattatcaaatcaccaaaaactcaacatgaaatcatatttaacaatgaaaaaaaaaaattaatcataactctgagaccatttgtttgaacttgttttacaatgatctatttattaccatgtatgtttgattatatatataatctaacatcctaaaatatgaaatgatgaaacgattaataaacacatataaagttttaaatttcttacattgattgaagcgaaaattagtgactcctttctcttaatcac

SEQ ID NO: 214371 - DNA, 576 bp, Cannabis indica
atttatggccacaattaagaggtatttataaaaatattggagttttgacaaaaatttataattttactgccatacaattttacaaaaatattgtctttttataaaacaaacgtaaaacaacaaaacagaacaattaaaacaacagtagaacaactaaaaaccaaccacggaacaaccgtgaaaagttaacactgtacacaatataaaacttacacagtattttttaaaaaaattccgtcccacagtaaaaaaataaaaaaattaaaaattttagtatgtggtgtaaaaatcccaattaatactgtattttagcatattataagaaaaaaaaaatcaaatgcaatgttaaaaaaaatagtatattttgtcccttgaatttcttacactactcaattatatatgtcttttaagatatacgactctccttcaaatttatggggtctttcccacagaattatgactcttatatacaggtatgtcactttgcatgctttctcacttgcacgcttcttagaaaaattttccaggagctcacccatcttaagattacttcaagtcaaacatacttaattttgg

SEQ ID NO: 214372 - DNA, 1007 bp, Cannabis indica
aaattgtaagaaattttgttaaagatcaaaaaaatgaatatcgtaacatgaattgcaaatatgttgtgaatcatcgcaaaataaaatcgcagatacgtagcctgttgctcgacgatatttcacgacaagatggcgacatatcttgtgatacaattaacgacatataacgacaatattatcattggatatttcatccaatgttgcaaatcatatcgcaatacatcgtgaaactatcgctaaacaactaacattttaaaaggtacatcctaccaaaaagaactcgtaaacacgtcgcaacatgtcgtgaaaacattgctaatagaaataactaacataacattttgaaaagaaataaaaaaaggtcaggaacaatgtcgcgacatgtcgataattgaccgaaaacccagaacttgaataggcgttaatgaaattgaaatgaaaacacaaaaattgaacctaaaccaaacaaatttccttacaatgaagcacaaacaacacagaacttgaataggcgttaatgaaattcaaatgaaaacataaaaatgaacctaaaccaaataaattttcttacaatgaagcacaaacaacaaaaaacccgattcaaataaaaaaaaatagaaaaatacattttttgtgatttcagatgtgggtttggggtttcgtgatttcccttataaatttggtttcacgatatcggtctgggtctggacttgggatttcgtcggaggtggtggttttgttgggctcgctgggttttgttgatgttgcgtctggtggtggcaaatggtgatgggaatcgggttggagtgggtttggggagttagagaaagagaaacaaacgagagaatgcgagttagagggagagtaggagtttcaaatgggaaggatattattgggattaaaagtttttgaagtattaaattcttatattatttaaggtggaatattaaaagaccttatgcttattttaagcatagattggcaaattttccttaattaatatatca

SEQ ID NO: 214373 - DNA, 575 bp, Cannabis indica
ttttttacataacggtgtataatatagttccaagactttgcacaaatatttagaaaattccgaataatttaatttatcgaaatcaagaatgagatagcttgttgcacgcatacttgtttcaatatttatatgttacatgtactgaaaatactaaaagtacctataagtagttattgaaaacaatcactaccactatgttacccgtacatatatatataaaaacacacacatttacattgtataaaacctaaacaaccagaaaacatggcagactccaaaaaacattggcaatgacaagatgtaacactatttaacgtccccaattagtacaaaatcaaccgataatccaaattaacaactaattatgcagaaaaaaatacaccatcaatattatacctatttagacatgtaacatcaagggtcaaagccaccttcccgccggtatgaaaattgataaaacaaagctgcaagctaagttgctgacctgcaaaacaagagcatagaccttgaaaacttagcttcgaaacttttcacttgcaaactcatcaatagacaacaaaatagcaataatgtca

SEQ ID NO: 214374 - DNA, 555 bp, Cannabis indica
ttaatttgaagagataaacttctaactttgagtagaaaggactaattcaaacaaaataattagatatattatactaattcaaacatgtatatgattattgtaaagtcaactacctttatgagggtcatttatatttaatatttatataaaacactctacaccaacaccacaaaaaatcattactctaaatcatcctcattgactatccaagtttcttaattaattctacaaaaatattacttagactatttgtgtaatcaccaaattaaatatggccaactagcctccttcaaaaaaaaaaaaataaaacaaaataaaatatggccaactagccaatgtcatattagatatgtgtacctttgttccaattgtagagtaagaatttacagcttgtaaattaagaacattaactaaagataagtaaaaaaagaagaagagagagtttaatctggttcacactaaatgaggtcctaagctaatatgatttccctagtctcatataggattgaagagcagctcataagatcagattcaaaggtcaaaaattataacttg

SEQ ID NO: 214375 - DNA, 519 bp, Cannabis indica
atgtcattcaactagtataaaaaaatggtaactaaaaaaaacactgttgaattgtcagtcttgaaggaaattaacgcctccaaatatatatatcgttatacaaaattgacaaaatacatgagcaaaccagcccgaagaattttttaaatgtgtgtgttcatcgtatatatttaatcgtttcatacatgtatatatacaccaagcacatttaaaatttgcaaacctgacgtggtagcatgagaaaacgaatatcctcaaaactctatttgttatctaaaagcacaataaaaaaataatgaaatcctatatgtatttatatatatatatttaaagtacggttaccaaaaatatttattggcccacttacttaaaattgtggactagatatatatctatatatgaaaagtcaaataaaaaacggtgtaataccaccttttgttttatacgtgtatatatatatcaagtcaaaattgatacacacatttcatttaaatactatatatatcatgttataagcca

SEQ ID NO: 214376 - DNA, 502 bp, Cannabis indica
acacctcaacccaagcctccaaagccaactcctcaaactcctcaatctcagcccacacctcaaaatcctcaacctcagcctatgcctcaatctccaaagctagcacctcaaactcctcagcctcaaccaaacaaacaacaacacctcagcctcaacctcagcctatgcctcaaccccaaccaaaacaaacacctcaacctcaacctcaacctaaaccaacgtcaccagcacctcaaccgaagccccaacctcagcccacacctcaaccaaaaccaactcctcaacctcaaccaacacctcaaactcctcaacctcaaccaaaaccatctcctcaaactcctcaacctcagcctacacctcaaccaaatccaactcctaaaactcctcaaccgaagccccaacctcagcccgcaccaaagccaacacctcaaactcctcagcctcagcccacacctcaaccaagacctcgacctcaaccccaaccaaagcctcaacctaagcc

SEQ ID NO: 214377 - DNA, 698 bp, Cannabis indica
gcaaaaaactacagtataaaaggctagggtggttttttctccgggtttgaaagtttcggctgaagcgttttagctctttcgaatggggatcgtctctggctgtccaaattgcagcaacccctttcatcattcaattagactgtcttcgggtggttgagtacatcaaaggaaacttcaaaagcaaaatcagattggggggctttggctggatgaagttcgtgaagctccggagttcactcattgcttggccgtgactcacatcagcaggcaatgcaacatggttgcccattctttggccaaattggctatcccttctaattgtaataagttgtggttggggaattacccttcttgtgcgtctgcctatataatggcggacttgcctaaacttttgtacttattttttattgataaatatacatatttctaaaaaaaaaaaaaaaactaatggattcctaaaagctaatgttagctgaattgactaaaattaaaaattatgtttaattttaaattaattcaataggatttaattcttcatatatggtgtggaaaaaatttgaaaaaaaaaaaaaattgattgataaaggttttaattagcatggagaaaggaatagaaaaaacaaaaatagccaacaaatatagtttcaattaatactaatatatatttatttgtacgtgtgtaccttttgttgccccat

SEQ ID NO: 214378 - DNA, 613 bp, Cannabis indica
tttgtctagtatatatatatatatatatatatatatatgcatgcatcatattggaaaaacaaaacagagaaaatgtttctaagtagaacatattagaccagttcaaggaatcaagatagacattaactatgtctagtgttatgtcaaaaaaaaaaaaaaaaaaagagtgtaaaattttaattcgatttttttccatgttttcatatttttttttatttgctattagcaattttttattatacacacatttgtaaaagatgtgtgaaagtattagactatacttatgatttaagatatcatttagtttctttataagtatttttcttagtaattaattacgaagttactttataatgtacttattgaataatttttaattataaaataactaaatactttataataatttatgaaattggttgctataataaattttgtttaagcttatgattttctttgtgaggtgtttaagtttacaattttgttaatcttgaggttttttttatcttttttgaaagtgttttagttaatacaaatactaaagaaactaaaatgatgcttttaagtctaaaaataattaatcgtatggctgatttttttttttcttttttgt

SEQ ID NO: 214379 - DNA, 705 bp, Cannabis indica
caaatttaaaaattttagtaaaaagaaaaaatcaagacattttaatatttacaaactcatatcttaacaaaataaacaaaattattaaaagtgtattaattaatttaaaaaaaactaagatttatcaaccaaaaaataaaataaaataaaataaaataaagattcaaacttatttagatttacaaactcatatcttaatacaaattattaaatctaattaaaaaataaaattaactttaaaaaaatttagaaagttaatctaaacaaatatcatgtttacttaaacaaccctaaaagttaaattcaattttgttcccataaaattgaatctttacacaaattaaattttaatatacttctttcatatctaaatgaaatttttaataatttaaaatattagtttcttttttaattttcttaatcatttaaaatgatttttttattcttttttttttttaattctttaagagttcaattatttttttttttatagaattatctattgagttaatttttctcattttttgaagggagtacactttcatagtttcaaagattgaagtacaaaaatattaatttttaatgatacgttagcatttaaatagacaaaataagatgaagcttaatataagaactaaatttctctaagtgtaaatgcacccaaaaaatgttaacaatatattttaaagaacacgattgatacta

SEQ ID NO: 214380 - DNA, 618 bp, Cannabis indica
gttattatttctctttcttcttcatgtctttttccttttgtgttcttgtgttttctcaatgatacaatcagcaacactatcaactacttgaaatatgtttggtaatgcaagtacctcgcttatttctgaggtttcatcatcgtattccatatagtcgtaagttggctagtttgttatttgtaaaaccagtttctgaacatctgtatcttgtcttacggcttcagtttctggtttttgttgagcaatgatctggagtcttgtctcgtctactgttgtgatgcagagtggagactcactaactgcattctgtgtctttctcagttgtaagtagaacatcagtgagttgtcacttattatttttattggtggtgagtctgggaataactggtaatgaatttctattgttgtgttgcatttgatttcatttcttactaattccaacaaactttttagatcacagtttgttggtattagtagtccagtcattatgtagtcttcatactttttatcctctttccattgccctccatatttgacccacacattattgagtccattcctgtacaatattttgaaaactgttagttaaaaatcataatgtattaagaaaccggtttt

SEQ ID NO: 214381 - DNA, 557 bp, Cannabis indica
gggaaaaataatataagataactgattaccttttattgcttttctagtgtatttttttaaaaaatgtatttttgcaaaaatgtgtaatttccaaaaaagattttgggattttaaatagggattatttcataaatacagaaaaacaacaaaaaaaaaattataaaaatacggtttcacaggattttaaatatttttacgattttttttattttatttatagaaaataagatttttttatgttgtattattgttaatttgctgttgatttttcgttacttgcatgctattttttatttttgttttgacattgttttcatattatttttatgtagttttttttgttgtctttatgaaaaccgtaaaaaattaaaaaaaaaattagtaaaagtaaaaatgtaatttatttaaaaaaaataggtgccccacttttaataaatatgactcctttgagtttgagaggttggttcaagaaaagatctagaaattccaaatccaaaaaactatattgacaaaagtcgagtatatataatataggtctaatttttaacttttttttt

SEQ ID NO: 214382 - DNA, 689 bp, Cannabis indica
ctatatgattttttgttacaatttaagttgcagcgttagttgcaataggagtttctatgtagaattttgtaaaaatgcaaagaaaattgttttgaagtataaaaataaaaaaatcataatttgaaaaaaattacaaaattagattttatttacataaaatagatttttttatgtatttttatgttaaattattattattttgttgttgattttttgttatttatgcattattttttatgttgatttcttgtggttctagaataccgtaaaaatatataaaaaaaattataaaaattagtattttatgtaattataaactctagtattacaaataaataaaccactcaagtatgatgatttctagcctcaactctatataagaacttttagaggaaaaactaaagtttcacattcttgaattttgattttgttgatttaaaaaaaaaaaaagcttttttttagttcaattttattttcttccatccaacaaaaaaaccctttttatttaaaaacaagttatatcattcaccagatttcaagagagaaagattaaaaaatctacccaagtttaagaaacattaaataaaaatgtgtgtgaattattttttttttgtttttatggtaagtggaactgaaaacagaatatgaaaaatatattcattttagtcttttatattaagggttttttt

SEQ ID NO: 214383 - DNA, 504 bp, Cannabis indica
agcatggcattaatgccaaatttcggcaccaatattattttttagtttggcatccaattctccaatggttagtttttaatcattctaccacatcatcaagcgctttatccaagcaccaccattagagatgctaatataattattcattatcacccaacctaaatatgtacgtttattgggaaatttctttgtagctggtagggttgtcatcgaaatcggaaaattacaatttaaattcagatcgcgacaagctgaattactgtagaccgtaatcgggaaaactgtttttggtggtctggttaatctgaactgtttatcgcttaatggttcagttgcggttcgtaataaataattaacggttaaatcgaaccgggccgtttataataaataattgatttatatatattttatatatgattatatgtacttctccatttataatatatatatatatattttttatatataattatatgtatttctccatatataatatatatatat

SEQ ID NO: 214384 - DNA, 628 bp, Cannabis indica
cagtgtagtcagtactgatattatctctcagaacatctgaaggtgtaatggtatcattctgaacctcagcaaaagttgtgtagacacagaaaagaagtctcaaaaacaagtaataataaggtaacaagagaagaaaagaactccatttgctgttagtatttggtttagtagtttgctctatattgcaccatagtgcactgcatattaatatttggcttgtttgtggaaaagtcttggtcattgtgttgtggaaaaacagcatatacacttgctcatgtagtaggatatactttattgtaaaattgttcagattcaaattgaataaataagtagtttcaattgtacactaattaatttttgttacttttctaaaaaaaaaaaaaaaaaaagtttagatcgggtcatacccgacccgcttattccgagttggttatacccgacccgctaattccaggttgggttataccctcctcggtatattagtgttaacgggtcaggtcaggactagtccgacccgtttgctattcctagttgatatatgcttgaagtcttgcaagttagtccacaatttcttgcttggctaaaaaaaagttgaatcgggtcagacccgagtcgcttattccgggtt

SEQ ID NO: 214385 - DNA, 434 bp, Cannabis indica
taagaataaaactttgaaaatttgtaggatatatatatatttatataaataaagtcggagagaattaatgagagatgacgataagtacatggattttggctatatatatttcctaattaaaatcctattcctattattaaaactattattatgtttttttaaaagattaaaattattattaattatcatattttaaatttttaaaaaaaatgatataagaaactatttaaaaatttaaaacaactcccgcatattaattatagaaaaatctccgaaaacattttattttttttgttaatattacaaatataagaataatttttttacaaaatagacaaaaaaaaattaaaaaaaaaaaaaattacaaaaataagtcaataacttaagaagcatttcacagttcaatccttaattcctaacactctcacttcaat

SEQ ID NO: 214386 - DNA, 518 bp, Cannabis indica
acctattcatgcgcgaaaacaataacaaggcctccttatcataaccgttctttgaataagctgttaacatggaattccaagagccgccatttctaagtggcatttcttcgaacagctcgcgggcatcacgaacacagcaacaattaccataggcctctatggcacgattcaagagaaagacaggtgggtcggatgagaaagtgaccaaatgagattcaagctttcgagcctcgacaattgcgcgagttgaagaagttagctggaaaagacgagcgtagacagagtagggaaagggtacaggagaatcgaagaggattgagacggctttagagaggttgcccgagttgagagttcggaggattgcattggttacggctatggtggtcttaggtcgagggattctgccattgctgttgctagatatactttgaagaagatgattcagctcagagactttgcttacaccacccatcgttacacgaagaatttgaattttgccgctgcaaaggcaaaaaaaa

SEQ ID NO: 214387 - DNA, 782 bp, Cannabis indica
ctttttcatcctaaaactctaaattcaattttttttttattgtacctccaatgccacgatattttctcaatcaataaacaccatggattttcgaaacccaaagctaagatgtctggccatataaataaaacccctcaatcgatgttgcgattcactcaagtggactcaatggacccacctttggccaccattagcacaaacagagaccaaaactgaactcagagcactccaaaacccacaaaacccaaccttgaaattttcaggaagaagaagaaataaaaaagaatcatacttcgatgactcattttattgtctatgcctcttatatcgatattcatctctctatcgtggtctttgtctttgtagcttcgagagctcaacaaaatatcgaaggttcgaccctccaccctagtggtcacaacacccaaaagccccacgaacccaagcacaagtgaaagtccaaccatccatggcattctcccaaactgacagaacaaggttagggctcaatttctttcaaattattttgtattttagttttagattgtgagactgcattaggagatttatcttttgtgaattgatagtttgatttgtaagttttcaatagaactctcgatgtctcttgacaaatcatttcaataataagatccatatttatttcttatttgttttgtttgatatgatttatgattgtttttttttctggtttctttgattttagtttttggatgttgatttttggatctaagaaatgtattggttgtggtggtggtggtggt

SEQ ID NO: 214388 - DNA, 1499 bp, Cannabis indica
  modified_base (1437)..(1437): a, c, t, g, unknown or other
gtaaaattacttaagagagagagaatggtatatttatttatataattactataatggtacacaatcaagcttcactctctctgtcattaatttctaccaaaattaaaatcagagcttaattgttaattaaaaatatagccagaggaaaaatagccacaacaaattatataccgttgataaatgtaaaattttaatatgaagtctacaagtacaacttaccatacaattatttattacttaattatagttgaaaagccagcaaaacttgacaaataaatttgtaacaagtgttgcacaaatatgcatatattccattatttaccttacataatattatcatttgaaaatgtcattatatatagagcaaaattatgtatttcgaggaacttctcaaattcatgtgacactactgaatttgtcaagaaaggctagggtgtttctattgggatatacagcatatttttaatttatatgaaataaacaatgtatatttagttttctttataaattttttttaataaaattaaagtattattataatatttttcatacttcctttttaaaaatgctgaatgcatgagatgaccaaacaaagttccaaatagaacttctaattgttgactgtagaaaatccaaacaaactcgtcaatctactaaagttggggttgtttagaaaatccaaacaaactctttaatctattaaagttgggttaaaaaagcaaaatatagttatcgattagactaacaaacttataaacctttttattcaaaagttataaggcactgcttgttacatgtagttatattgatgtactcaattttagatttgcggcataaatatttaagtttaatttttaattgtaaataaataattaaatttaattttttatagtaataatatttaagttatatttctgtaactctgtaaccgttaagtcatttttttattggtatttttaaattatttttttttaattaaaagttaataacttagactatacttaacacttgacaactaagtacttacaaaagttctataattataacgtattattattgctaaaaattaaacttaagtatttatttacaaataattgttaaagttaaatatttatattattactctttggttacataattgtttgttataactcgtaattatataatggggaaggtggaccaataacatggctccatggcaacacatatcacgccacaaaaggtatttactttacgtcccaattttctactgtagcttcttcctttctttccttttttctcgtataggttaagtaaaagaaagtttggatgtagatttattactacacttataacttctactatttttaaaaatttaaatagttaaataacgttaaagtattttaggtttattaagtaacgttaaataaaaacttggtaaagttgggttaaacgggngtaggtgtaagtagtaatttttagttaagttgtagtatgggtatggacgtttgggagggttc

SEQ ID NO: 214389 - DNA, 772 bp, Cannabis indica
ctaagggtgcacatggctaggttggctgggttagaggtattttaataggccaatccaatgattgcggtttggataagctataaaccattcaattttttttcattgtacaacccaaccctacttagtacaataatatatggggtgggttgggttgggttcattggattgagatgaatattttaaactttaatatttatgttacaaacatgataaaattattcaacctagtacatacacgaaaaaacgatacatgtgtctgtgtgaaatatagtgatttaaaaaaaaaaactaagatagcagtggtatcattgtgtgagtagcaaagttaataataatgattgattctaacattaggcttgttggtagaagtagtagggtaactatagactacatgttagtgatgtgttttggttaatttacgttctaaggttatcacaatatattttttttatgtatgaaaacgtaaaatatatatttgtatatattttgtgaatataaaatatattttatatatgaaagttgtcttaaatttagaatatcttttaagaaatgggttggtttgggttatatagagttaaaatgtgtccaacccataaccaactcatacttatatggcctatcagtacttttcaactcaatgagccatgacctactcttaacataactatttactacaaaaaatgggttgggttggtcgggttgaatggtttgacccatattttgtaatggctaccctttacacaaaggtagcttaactttatgagtttttttt

SEQ ID NO: 214390 - DNA, 950 bp, Cannabis indica
agaaaaaaaaaataaagaaaaaatctcaaatccgtttcaaaaataataaataaatctcaaacattatcctcaagaataggagtgccaagaaattcttcccaataatcataaatcccgaacattatcctcaagaataggaagccaagtacataaaagtctccccaaaaacagaaatcgttcgtccatgaaagcaacgggaaaaagggaaatgtcatatattaatgaaacttgttttgttggagtcggatctgtaagattctagggattcaaaagagtatccatacccgattccttgaccgtacccgaatccaattccaacaccacagccgactccgacgccgaagacaagcctcaagtggttccagggccagccgccgaagccgagtccgccgaccaaaccgaacccgagtccggcgccgcacccaataccagctccgccaccgggacccgcaagagtttcatcggccttacgctttgtgcggttgagaaattcggagatcggtaatagtggatcttccttactattcttattgttattccacttccacaaggaggaagacgcatcttccttgtactttctggagttggttttcatggtcacactcactttcttatcccattttttcttttctttttatattgttaatttccacaatttttactttttgatcttcggaaaatatataaaataagataaaaaaataagttttttttttttttttttttattttttttacaaataaagaaataatttactttaaataacggaattttatgtaaactagatagatgttacctattttaattttattttagtttttttatttttttttaatattataattttaaaattaataatattcaatgtaatgatataattattgaaatttgaaagtataatagtaatttcgtcttaaaatttatcttcgtaattaatgaaaaatgcagtt

SEQ ID NO: 214391 - DNA, 639 bp, Cannabis indica
atattataaatttattttcatttaatagagatacatactataggtgatagaattatagtgatgctaaaatgaaagctcaaactaaccctagagtaattttccatcaagatcttgaaactaaagtaaacttatttggttgagaaaaggagatgaaaacaattcctattttcatgcttgtcttaagaaaaggaaatagaaaaacagaatagctacctttgtgaatgaatgaagaaagagtggtggataatttttggaggtggtggatcataatttgaataattttaagaggtttatgggcagctcgggctctgctcatgtcaacattaatttaaatgctgtaacgctttattagtttagacacgccactataatttcttaattactatactgacctttactaattaaaggattttaaataaaattgtgtttaatcaaaattttataataataaaatattttcataaataaatactgtcaatgtaaataaattacaaaatttaggatcccggaatctattttttttaatggacatattaaataggtcgcctagcaactacaaatatgagcccatattgttctgaagatcagaatactccagatctaaccatccagataatacaatctttactgagctctaat

SEQ ID NO: 214392 - DNA, 552 bp, Cannabis indica
gtagtgaagagagattgagcatgcaacctaagaaaatatgttgttagattatattagatctttactggagataactttctgctgcgggagatgtggcagcaatgacaacggagatgatggtttttaccaaaatctaaactcattctttgagttgaatcgcatacataattataattatacttgataattaatatcaacataaagaaatattacattccaacaataacaataacatatatataaacatatataaaactcataccatatatataaagtgaaatagatacttaagagaaagaaacaaaaagtaataatataaacatatataagactcatacggaagagaaagagaaaaagatactaagtagagaaaaaaataaaggtgagcgatggtatctgatgtgatcagagaaggatttgttattatatatacaatttgggggtgagtttaaaatgaagcattaataaaatttggacggttacatgaagtagttaattctatataaatgaattattactattttttaaacttttaagaattaaatgtagaat

SEQ ID NO: 214393 - DNA, 653 bp, Cannabis indica
aactaaattatgaaccaattcaattaatttttttaatttaaaagtattgttattagacatcagtgtgacagtagagtaatctgattggttgacatagttctttctacacaataattattactttaaaatatatgagactcaatatttaataatatcagtataacattttgtgatagtaataatagtgttctttagttttttttttatcatttaattatggtaaatgtatgaacatttataggactaaaaccaaacacattatatcaataccaatgtggagatgttgaagaaggaataagtactaacctttattacttcaagaccatgccgaagagcggcccgaagagttaccctagcaggatagcagtggtcggagacctcgggcttacatacaacaccacatcaaccattgaacacttgacaagtaaccatcccgatcttattttattggtcggcgatgtttcttatgctaatttgtacctcacaaatggaacgggaaccgattgttactcctgctcttttcctgacactcccattcacgaaacctaccaacctcgtgggcttttggggaaggtaaaatgtattctcccgtcttttctatcatgtcaaaaggtacttgacgagtatttgcacccaaattatgcactaaaata

SEQ ID NO: 214394 - DNA, 501 bp, Cannabis indica
ggatgcgtacgggaggatcggacaccattcgggacagacctaagaaatgactaaggttggaacaataaaaacccttggcatgatcaccccattgaaagggggcatcctaaacctatgaagccgatcattaaattccaccgacctacaagtggagtaatcctgaacagaaggaacatgatgaacaatcagtggggacttaccagctttggaagtgctggcatcaggagccccagcgttaggaactgggaacagaaacttgggcctggaagtcgcctaatcttttatggcctctatctaaaggaccctccctccgacagcttgggccttgatgtaggctaactcttgttccctcttgaagaggtactttttttaccggtcctctgcagaggcaatgatatttgcccgaagtgccttctcagattcgggattacgaatgttggggtagagaaccatggataaattaaagtcatctactgattggctctctaaaatcaacttagc

SEQ ID NO: 214395 - DNA, 680 bp, Cannabis indica
cacccatcttgacttgttaataatgttcccaaagaatttagaagttcatattacaacaagaaatataagttttaactcatttaaaccacatcacgtgagtcttcatagcttctgatgaacaataataatacaagttaatattgacgacgtttaaatcatcccatcctttgtcacccccaaaggccaaaatgatataataaggaaaatcatcccatcttctctttagacaagttcacaccaccacaaattaaagctcagctaggacatgcagaaaacaggagactacttaaagagtacaacagatgtagtttttgcttctaatagatgttaaatgttatttccttgttttgataactggaactgcgcaccctaaaataattttgttgggcatgcattccccgaatagcttctaaattgataaaatttctcaacgtaacagacgagaaaaggcataccttgttgcatgtctcaattgattttttgcattctcccatcttcaaatagcatgcagccacgttcagatgtagcaaattcttcaaacatcaaacataacgagcaaatcagtcccaaataggttgatggaagttgtaaagatgaagtaaataagtttcaaagaggatcggcaatataaaaaagtacttacacgtgtatctacaaacactttgccttcctcatcatct

SEQ ID NO: 214396 - DNA, 758 bp, Cannabis indica
aatatagtgaaaggtattaccctggttcggggaacccaagcactagccgcctagaatgagtttctagggcaggtgaagcttgtaaaattctggtgttgaatatttgattttgttctttttatattcaagcttaaatcaagataaaatcaatctaaatatgaaaaagataggttagacaagaacttggggctcacacagtattaggtaaaatctcagctcaatttgctgagaggaattcattgctatttaatacttacacaggctgatctcagccatttacaatagggccagatggcacaagattacaatagaataaggcacataaaacaagactaacaaattgaggaatcttatgctaacgacttgtacggagagaatattctgaaaagatttttctttacaccagtagagccacattggcattccagatcaccttccatgtcagtgccacttcaccatcatttcttgacatgcaatgttctcaagttgcacgtcaattattacctaaaatgtatacactgacatgtgtaacagtagttaatgtgggattttaataagcctataaatcgatccaatccaataataggtaaattgatgatcaattataatcgaccgtcaaatattatatatccaattgtgatcgaatcagattgaatattatttttgaatatccaataagatggattggatgtttgtggtggtgttcaaaaatttaacatgttcaacattcaattgaattaaaatgatattaaatcaat

SEQ ID NO: 214397 - DNA, 988 bp, Cannabis indica
tatcagtagtactcgcaatgtattatttgtactaagttatgtatttatacttagtcaatttatctacataaatgttctaactatagggggtatatcatcatctcattttgtactattgattaacttattttttataataaaagttatgagttttctcgagcttttaagtataggaggtatatcatcatctcattttgtactattgattaacattaaaaggtaaaaaattaaataatcaatttaaacttcttaaaagaaaaagttaattagagcaaaattgaagagccaatataatctctttaatgagactatctataaatttattaaattaaataagattagttaaaaaaaattaaaaataaatataaaggggcgcgtaaaaataacaatttaaataataatatatgattgatattaaagaagtataatctaataggaagattaataaagttacgaatcgaatttatcaacgaacgccaataataaaatttaatacaaaattaaaatttgcataacttattttaaattattgaaaataaaaaattaaaattaatagctcatgaatctaataacaataaataatatctaatgaaataaatataaattaatatgatataaaagtaaaatgtatgcattaaaaaattattaaactacaaaaaactataataaagccataaaattctcagcaataaataaaaattgataatactttaaagctatgaaaaaatagagtaataagtaaaataaaaatgaggtcaaaatcatcatttcttactattggaaaaggcataataaaattaaaagtaattaaaatgtgtatatattaggaaaataaatataatatcaaaataaatacaaattaatatgacataaaaaggtaaaatagtatgcattaaaaaaataatatattatagagtactaaaataaagtcaataatttttaaaaatttaaaaaaaaatttttagaagttcttgtctttttgacatgg

SEQ ID NO: 214398 - DNA, 570 bp, Cannabis indica
gcaattgtccttaaaagcaacactaatgctcgttgctactaaaagttgctgtaagaaaaatgggatcataatcatattggtaaaatttattaatttttttttcacgtttgctaattaatttttttttagtctcaagtggccataagtgagtgtgtggtaaaaaccacacccaatgctcatttgctaattaattttttttttgaactacttgaggctagctcaagtggccataagtaggtgtgtgagtgttggaggttctgggttcgagtcacagataaaacattgtaatatataaacgcttaaataaaaaaaaattattaatttttctacctacaaatacaagcatcattgctccaatcttaaaaagtattttatttattaaaaaattgacataataataaaaaatatttttttagtgtaattttttatattgttgttgaaataaaaagagtttttgacgttaaatttagtgatagtgtgatactaaatttaatgtatagtttggagatgccctaggtacttaatattttaatattaagagcatgaccgaccctggaaaaaaaatgggcc

SEQ ID NO: 214399 - DNA, 668 bp, Cannabis indica
tgagaatgcagcaacaacatgactatttgaatcccttatgacagcacctatcccgatcacactttggctagtagcaacagccgcatcaacattcattttgaagtgattggcatcaggtggtctccattgttgagcagcaggtactgctggaggttggggttgttgtgtcgtggctggggcaattgtagcagtaaccgaggccatattttgttgctgctgtggatttgtagcagcagttgcaacagatttatacctctgttgtgcattcctatagttgttacgcatgttacagtatcaggaagcgaggtctttgctgctcttgcttgttggccatggacaacacgattcagttcattccatattgcccaaaacagaatatttgttccatctcagcttttgaatagattgttaaaagatgaaatatgtaatcacctttgtgcattgcagtagaaagatgccaatcaaaaaccagatcggaattacaccacacagcttgagcatatttgcaagtaaaaagggcatgtccaaccgattcccaagcctgtttacaaactaagcaagtagaatcagttattactttcctcttcaccagtgaagttgcaactggaagtgcgtcatggaatgctctccaagaaaaaaaaaaaatcacctttgggggaagaagttgc

SEQ ID NO: 214400 - DNA, 508 bp, Cannabis indica
ttttttttttgtaaaataaaaaagtcatgagtatgaactctaaataacctaaaattatatttttatgaggtttttcgttcctaaatttatagctacatgaggttttttttttcgccagccagccaggttaccttgggcatacgtgcggcttggtcggaattgtgttatgctattctgatttaatttttactactgtgattagtcttatctctgtgatattgttttgaagtgttttagtcttgtctgtatgaaatagttttgttctgtttcgttgttggttcttctttattcttcttcgatggctcgccaccaaatcactgttagtgattgggaataacaagttctatgcgactgaaggggttgttagtagtgtagatacacaccttgcacaatagttgagtgctcaagctacgagttttgctgcaacaatttcgactattgtgtcttctgagcggtagatgaagctgaatatacgtgttcttaaggtcaactatgatgctgcaatctt

SEQ ID NO: 214401 - DNA, 685 bp, Cannabis indica
ttatttatattattatttattttcttacattaattttttaaaaatagataactttcaatgtttatttatttatttatttattttatactatgtgaaatataatattcattttttattatattttttatactttgggtattcttatttggtagatatattaataaatattattaacaaataacaagtaatcaatactaataaataattaatatatactaatagatatatatttaaaatggtatatactaattagtatatgttaagaatatataatagttactattaacaagtaagaagtaattaatactatttttgaaattgtacatactaattagtacatattttaaattatatagatactaaaaagtaatagatacaattaggtatacatttgaaaatgtacatactaattagtctatatttaaaactgtatatatagagaaaaaaagtaatagatactattaggtatacgtttgaaatcaaaaatactaattggtatatatttaaaactgaatagatcttaataaattataaatagtttaaaattatatattaatcggtataaatttaaaattgtaaaatattaacaagtaaaatatactattcggtaacaacttgattgtgatgagaataaaacctatgttaagtaatagagtggaactacgaagcttttctctctctctct

SEQ ID NO: 214402 - DNA, 948 bp, Cannabis indica
gaaaccttcccatttagagcattaatatcactaatcaaccataacaggctacatctatatggtgcctaacaacattattgaatttaaaaatgttgttatccctaattaatatgtgaaacttgaagaggacctttacctaagtggaaagtgtttcagaaccataccaaaagtgctcctcacgaaatttaaagtgcatcccacataacttcaaattaattaaatatgaaacccataactttagtaatttggatttttttatattttttatttttaatttcatttccctttcagttatttatttaaagaaaaatacaatttccattactactatttcttgattacttgatccaaattaataaaaataaagaaataattaaaaaaaaaaggaaatatatgctctatttttcagttttttatttttttttaatttaatggaaaaagagagatagatacatacatgtcgagttttctggctgagacccatattgataaaaattgcagcaatggttgacaaagttaatccacacccaattgctcgaaatcctatcacaaacacaaacataacaaatccacatttttcttaattttaaacaaaacaatgtttattttctttgaaaagctaaaacatggtatttttctaaaacaatattaacaacaaaaactgaaaaatcaattaaagaaaaaaagaaaccttgaaaagtttcccaaggataaacgatgccatcgtgattgcggtcgaaaaaagcaacatgtttttgaagaacactttcttcacttggtatgaatattcctccttcatctacacccataattaataataataataataattctcaatttatataattttcttttttatttattgggatagaaagtaaaaaagaaataatgaaaatttataggtacctgagtttgatgggagtggtgcagaagaagtataagccataa

SEQ ID NO: 214403 - DNA, 664 bp, Cannabis indica
gagactacttaactctgagatgttatccttcacgccacatgtcaaacattgatgtccacgtcactaggaaaaatttctaggttaacaaagatttttatttctttaagaacatgagaatagaatagaatggagtattctaattaatgtaatccaataaaattattaaatcattgaaaaatatatacgcaaaaaatatacgtgtatatacgagtataaaaatatatatatgtatatatatatatgaaaataatcattttaatgcataaaaaatattataattaatgaataaaggcaatcctaataataatatatactaaagtgattaaaataataaattctttcgattggaattaacaaaccaaaacacacacatgtatatatacatcaaaactcaaaataaatcaagacagagataaaaacggttctgatccaaattcttacacattattaaatgaaagataaagcatataagatcgatatgtagagcgaaataataaagacatatcgagcataaatgtgaacgaagaaacatattgtgatacctctagccattgatatttgagcatcaatcacagaaaatgagaggagctctctctactcttttatatagaatttactgttcatacaaaaaatgagtgaggagctcggagaccgagaccctata

SEQ ID NO: 214404 - DNA, 444 bp, Cannabis indica
atggatgaggagatggattctcttcgtaagaataagactttggtagttgtgatgaggctgaagaacaagaagattttggagtacaaatggattctcaaggtgaaaaggggaatcaatgagaatgaactagtaaggtttaaagccaggttagtggctaaaggctttactcaggtaagaagctttgttccaacctgtcatttttgtggtattaaggggcatattcgacctaaatgtttcaccatgaaaaatttgtacaaaataaattattttggtaatttgaaattctttcgaaagaaacatagtgttttgaaacaaaaaagaataaaaaaaaaatgtctagctggtttttttgataaaagtgctacttctgaaatgtagtattttgacagtggttattctagacatatgataggtgccaaggatttttagtgaatatcagaccaa

SEQ ID NO: 214405 - DNA, 1238 bp, Cannabis indica
cactttcaccaatttacaccgcaatataaagggattcatacctatatatccgctttaggggtgtgtactctagaagtgtccttaattatatatataaatacataaaataagggaaattctacaatgcaacctctaaaatggatgcactgatatgttcttttatgttttggtatttaaaataatttttttagtcaaatttttttctcatgatgatcatttacattatagttactaagacatcctgtaaaattttaagaaatttaaataaatttaacacgctgaaaatagggttcaaacagtgtgttacactcgtaactattttattttatacgcgtgtaaaatagactgtttgaacacttctttctatattgtaaattattttgaatttctcaaaattttataggatatcttaaataacgtctataacgtatgtgaataggaaagaaaattggacaaatttttttttctgaatgctgaaataaatagagggtatctcagtgcatcccttttatgagggtgtattgtagaaactccctacattatatatacggggaatttgcatttttttccttcacaaatatatgggcgtctttctcaaaaaaaaaaattattttgttggaaaaattcaacaaaaaaataaaataaaaaaatatggataaaaagataataagttataaatttttctcgtatatctttatatatataaaataatttaataatttttattggtttaatagaatattttaagaatataagaatatttcgttaaatttacaggtattaatagggttagctttataaatattaataatacttattttatattaatttaaaaatatataaatattaatatattatttacaatattattattttctattgttatttttaatattaggagtatgtttaattttaatattcttaaattttatatttatttttctcaaatttttaaaacttttaatatattttttaaaaaaaagtaataagtagtttccttttaattaataaaattttaaaatacacatagcaaaaataaatactaaaaaaaatatatatatatatacgtctaatgcatgtaacaataacctaatatatttttacacagattgtataaaagccctataattttcacattatatacttttgggacatttttcataatttagtgtgtaattactaaattaaaattatcttaaaaaattatttcggggctttagccttgtaggacacaatgt

SEQ ID NO: 214406 - DNA, 857 bp, Cannabis indica
gtgctataaattcatgggtgtcgatcgtgctggttcaatccatatttctttttatacttttcaaaatatgggttgtgtcgtgccatcgtgtcttaagaaaatatggaccgtgtcgtgttgtgccaacattttcaaagggtaagctcaatattttcgtgtcgtgatcagattcgtgttgtgctttgctcttatcgggctatttttcttaaatggccaacccattttcatatcatacttgaattcgtacttacttttctatattttttttacaattaatgaattacttactaaattatatgtatattttatatagttgtaattatattcatttaattttttaataatgttttacaaaaaatcatataaaaaataataaaattattagaatttaaatatttatttataaatatttaattttttatatcacattcaataaataaattaatatgtagttttatatttgcatattttaatagtcttaaaatataaaattataaatatttagtgttatatttaagttttattattattttaacttatttataagagatttttttttatttattttaaagtatttttttgttgtatttatacgaaaatatacggagcaacttaaattgcaacccacgccactcagactataaaaatgaaaaaaaaaaaagttaaaaagtattatatgagataattttcctatttataattgacaaatacttatatattattattataattattaaattatgggattttttaatgtttcgtgccgtgctttaaattttgagcttgtcgcgtgtcgtgcttttcaggctagtctattacgtgtcgtgtcattcgtgcttctcgtgccgtattgtgtt

SEQ ID NO: 214407 - DNA, 623 bp, Cannabis indica
tttttataaatgatttttttaatgaataatcttttgtacaactttgttttgcttatttatttatttattattattattaataaaatattattatttgacaccttaagatgcctaatataatactataagaatataacatttaataattggttagcagttttttatattatttaatagattaaaatttgtgagactcgatattgaaatgtaccaataactatatgctcctatttatggtatttagcacatcccttaacattttctttattaatatgtacatatttattaaaatttaactttttgtctaattatacgtaattttgtaattttttttacttgttgcacaccgcataggtaaagatttcctattgtctttacttttttgtattttctcaagctggataaggttatattagcaatttttgtgtgtttgtgattttttttttttttcatatttggaccaattattaatacttttgtgagtcttttctacattttctttctatctttttttcctatttttttctttaactttttgcttatttaacttttttttaaatttttttagtatagtacactactacaatcttggcctttagaggctgttttttcactcccactta

SEQ ID NO: 214408 - DNA, 611 bp, Cannabis indica
atgtaattcttactttaccattaccctgatctgattgtataaaagaggtatctaggtttcgaaccactgaatcagaacgtaaaacagggggagtcggagccttaccttgcaaaatcgcactgttacattggtcatttgccctcaaaaaattgataaagtcatgttgcacctcctcctgtttccgaattgcttccagcgaagatctgggagataacggagattgcagtatttccttgagtgctggatcgtcatcctcctcatccgacatctccaaaggaggaattgcagaaaaaccatcctccatcgattcatgaattgcatccttaccgagtttcacttccttcttcttagaaatcttagcattcgaattaggtttcctttgagttcttgatcttgtttttgccatggcgccagctgcatcagctgcaagaagaaaaaatcgcaggagaccaccgcaagagatataatgttccactagttttttattattaaaacactgacttatagagtcacaccaaaaatgactaggaaagcaatatacccacatacctagcgtgtcactataaggtaattttttttaaaaaaaaaaagaaaaaaaactaaaaaattag

SEQ ID NO: 214409 - DNA, 720 bp, Cannabis indica
ataaaatattaagataggattgtttttttttttaaggtaggattgtgtttttattgcctttgtgataaaaaagattattcatatttctttcattgattttatagactaatacactcaataatttcaatgcttaaacaaaataaaatacataatttatttaaatgtgaatctagtcctaatcttcctattgtaaataagttataaaaagattaaaaaaaaggattattgacttaattacatgagaagtcctaattacaacttcttattacaattttttaatcaatttttatgtctgaaatcacacgtcgaaatatttattttcataatgatatttgtcatggttacaatatcattcttataaattttaaaaaattctaaatagtttgcaatattaaaaatagaattcatgatatttcaatttaccatgagcgttcgaaaaatttcagacgtatttttaacactctaaactatttgaaaatttttaaaaattcacaaggatgatattgaaagtaaaacgaacactgccataaaaaaatttgaaaaaaaatatttcgacatatattttcagatacaaaaattaactaaaaagttttaataaaaaattaagagtggcactcttctcaaaacattgaaaacacatatttattctggactgaaatcctctgtcccaattgaatgtcccattgcctgtcccaataatcaaaaaattgacacatgtct

SEQ ID NO: 214410 - DNA, 658 bp, Cannabis indica
gaaaaattctcgtaactgggctaagaattcctctatatgtgtggcatatgaaaaaaatataaacatgagtaatacatatattactcttcatatgtaatgtgtagataatgacaaaaaagatttacaaccgtcaaagaatttattaaaatttatgaatatagaagttggaacgaaaaacctgaacagagtctcgaccacgatggtaagtaccctttgatttatagcgatgcaattcttcccgatcgacaaagaagactaagccacacacgatcaatactccgactttgctgtcactgtcgaccgtggaaaacacttgacgaagtgatgcgtatctgggcagaagcatctgaaattatagatctcacaaaggaatccacactaacatagcttgggaagaggtgcaaccgttattctccgagaattatgtgctatttttctagtttttcaaatcatttcttcaaacaaacaaaaaaactggcacatgattacaaacttctacagaagattttctgagaattagaatcccaaatcagccaagtaattgcttctaattcatcagaagatcaccaacagttaagccatttaattataataattacgaaaatatttcaaaacaaataaaatttgaacaggcgtgtgatgctctgattctcttccc

SEQ ID NO: 214411 - DNA, 896 bp, Cannabis indica
ggacagtcggtgtactcaattttatttagatttttttgaatttttttgctcagccctaattaatactgatcaaatcaaaatatttatcactaaaacattggtatatcaaatttttttttgaaagttcaattattttgactactctataaccacctaattcctacccatgtagtccaccgctaccaaatatattaaaattttctattaacacaattatcaagaaattaatattaaaataaatgtatgatatgaagaaaattacacctaattttttttttttgagaaaattacacctaattaatatacttttaacagtgaaaaaaattatttagaaaattctatgtactttctttgtagcaaaatgccggccactttatctttaagtagacttttgacgacttaatctttagaaattgcaactatcaaaagaaaaaagtgtattatacaaaatcatttaaaatatagtataataatcttaattggctcaaaaaaacccacttaagatagcacaaaatctctaaagaagcacaagttttaaaataaaagcacgtgaaaattctataaaaaggagtttttttttttcatcatataagaaagatattttgattcaatttattaaaagcaactttaaaaatagccataaaattactgttaaaaacaagtgagaaagaaaattaccaaatttaatgcaaattaaaagttataataacatttaatgtaaaatttatatataagttaaaattaaatcataataacgtatacaaccgtaagtcaaaaatatcagacaaaataaaacaaaagttataagaaaataaaaagtaaagtcaaaactaaaacataaatacaattcaacgtcaaaaaaaaaaaccattaaatacaattaataataattgatt

SEQ ID NO: 214412 - DNA, 704 bp, Cannabis indica
acataattttgggatcctgttaaaagtttacaactattttgtaaaatatgttttatgctaaaggtgtgcccagtgaccaaccaaaagtgagcctaaactgtcccgaagaccctaacactccaggtctaactgtcttaatatgtacaatcttcatctaaccctagactcatcccgatttagttttgactcttacctgtacatacatgtagtaactgtgagtcgacaaacacagtaagaaaatcgtaaacataatcatataacaagaccataatcaggcacccatacacctaatcatgatcttaaaacttggttaagaacgttctctactaaagtatgactaaccacaaatccagtctatacctagtactctagtcgtaccaatgtggtatcaattagtttatacttatctgtatgcctagcatatatcttttgatatctcagtgaaactctatgtacacttcaccaatattttgatatactaatctaatggctactattttgcctagcacatatctactgatattttaattcaactctatgtgcacttcaccaatatcctgataattaatctaatggcgactgaacatgcacactaaacatatatacatatatgcatctattatactaatctatgttgtttctaaatgaaagtatgtcagcaacactcactggaaactttttctcggtgatttaaggccctaagt

SEQ ID NO: 214413 - DNA, 515 bp, Cannabis indica
ccatgaaagttgtcggcaattctgccaaatgaatattcttaagctttgttaattgttggaatccacatgacatctcctttagttgtcggcaatacgattagagaacttacccgattacagacctgaaggaaggcagcccaacattggcacaagcagacatcggggatgcggaagtttcagtacagagggtgctaatgtgggttttccttttgaataaattgaataatttactgattattggtttatttttgaatttgtagggaagacacaatgcatcaaccatttttgaatcaatgatagttggtacctattgatttgccttgatatgggtaagaaactatattgatttacaaagctataaatatataatttataaaatatatatattgattgtgggatgagtagtaaactgtaagctcatacataactcacataattttgaatttgattatggtttgggttaagtattagtgcaccctgctaaagagttatgcggtattttttttttcttttct

SEQ ID NO: 214414 - DNA, 777 bp, Cannabis indica
atttcattaatttttgtaaagagataatttctaaatataagactggttggttattaattttttatataacactatgtgaaattttgatttataatctaaatattgtacgtgtatatgcacataaattaatatcaaatataaagaatattagggtttagtcaattcagtgagaatttatagagagaagattaatctgcgaaacactatatatacttacaatctcatttcatatctaacatcatggaatcaaataaattttccaaaattttccatcttattgttttataaattaattttaataatctaacatgaatttaagattcatatgtatttctagatttaatttctacccgttcgtaatattttataataatataattattaaattaaatatttaaaattccctacttatattgtactaatagcaccataaatacctacattatttgactatttttttttttttggaatatccataccacataatgacaatatataagttaatttccaaacttgacagcaatctttccctaagataatgacttcaatatttaagaaattagatttgataaaaaagaaattcaaaacagttttgtcgtgtttggttacattaattgtgaatattatatatctttatatatatatgttctttgaatacagacatgactttatacttttaatattcactaattacaacattatgaatgataacatctgattaaaaacttaggaactttttttaaaattaaaaaattgttaaaaaaataattattaatg

SEQ ID NO: 214415 - DNA, 549 bp, Cannabis indica
gcaggtattgttcgaggtctacctaagctgggtaaggaaagcgttggtaaatgtgaaccctgttaacttggtaaacaattaaaaatcactcataaacatgtgtctggtatcaatacctcaaaagtattggagttgattcacatggatcttatgggtccaattcaagttgaaagtctgaatggtaagcgatatatttttgtgtgtgttgatgatttctctcgttttacttggatagattttttaagagaaaagtctgacacttttgatgattttaaaactctttgtttaagattaagagttgaaaaaggatgtaatattgggaaaattgatcgaattcagagtgatcatggtaaggagtttgagaactcagtttatgatgacttttgtaagtccacaagtataaatcatgaattctctgctcccaagactcctcaacaaaatggagttgttgagaggaagaaccaaacgttgcaggagatggcaagagtgatgttaaatagcaagaagctgacaaaacgatatattgtgggcaaaagctattaacacagc

SEQ ID NO: 214416 - DNA, 541 bp, Cannabis indica
ggcaagaatagtattaggattttcgcattttcgggtacattccaaacatttcaagtcgttaaaaattcttcctgaattattgagacttaaactgttctttcgatatgaagtaatatttggaaactagaaaactatagcaattactacttaggtagtaaggaggaactcggaactcaaaccttgtggaagcaaatcacatgcctaattatttgaacaaccgaaagagatcataaagtgttctagcctttgggaaagagtgattttgactataagtttggttgaattaaattgttttctaaactaggttgcctaaccctacaatatttaaagaccgaaaaactaaagcgatcgctatataaaccgaaaggggattcgaatctcagactctatgagagcaaaccgcaacttgccattttgagctacaaaaaactatcaaaacccagctcccatgtccaaccttacaatatttcgagactaaaaaactataacaacctgtgattcatttcgataagacaagtttaaggcgaaacatagaaactaa

SEQ ID NO: 214417 - DNA, 628 bp, Cannabis indica
caattaccccaggtgggctgtatatattgggaatttgagaatgttcaatcatccattaaacacctaaactaccttttcccttttatgatgctgtagtattttcatttaacttatccgtttgcatatctttaatctacaattgctgattgacagatgaagctcgtatgacggaatttggcttgaagagcatgtggaggagtccaaatgggaccattaggaacatattgaacggttggtatacagtgtcactgtaaactccattatcttttcggtttgttcatattcaactgaaatctggtgttttctgcaggtactgttttcagggaaccaatcctttgcaaaaacctccctcgtcttgtcccaggtatttttctttgacattctgttagtgtccttcaaactcccctagactatatgtatgctgattgttcttaatatcaggatggacgaagccaatatgtattggaaggcatgctttcggtgaccaatacagagcaactgacacagttattaagggagctggaaaactgaagttggtgtttggtaaagctttttcacatttgacatcattatatatatattaactgttagctttactgagtgtagggggaaacatctctctctctct

SEQ ID NO: 214418 - DNA, 635 bp, Cannabis indica
agcaatgggctgtatcaactcataccattagtaagttctgtaagtcacaagtttactggtcttctagctcacgagtcaaccaacaaaagttctagtgttagtccacacttaggggttgtcaagtcttgttttcaagtttcatcgatgaatcaagtttgtggcatcttaggctaggccatccttctctaaatgtactcaaacatattttacttaatgaaaagaagcatttgccttcccatatgcaattttgctctagttgtcaacttggtaaggcacatcacaaagcatatccttcaacactaaaagaatccaaataaccccttaaattaatacactcgaatatttggggaccatcaccaacaatatctagacatggttaccattattacgttcatttcatagacgattacaaccgctacacatggatctttcctcttatcactaaagatgaagccttatccgctttcaagacttttcaaaatcaaatcgaaaaacaacttaatgtcaccatcaaaacagttcaaacggatcggggggaagaatattcacctttgaaccttatctcaaaactacaaaatggcaaggccgaacaaaaacatcgccacattgtcaaaataggcttgacccttttagct

SEQ ID NO: 214419 - DNA, 749 bp, Cannabis indica
aagaaattctttgcatgcttctctgcctaatctaataataaaaatcattcctaaacaagtttagtttggtgtgtgtgatcacttaaataacttttatttcttttgattgtttgtttgtttgatttggatacgtaaaccatgtttctcatatcattttgtgtatatgttcttggatattggttttcacttataaaatgcatgttatgttatgtggcatcatgagtatccaactacacacccctttctagttttcataataaacatcatttcagttttaatttctcattcgagtttttactaaactcattcaacttagaaaatgacatatctttaatcattcctttcgtttatattttttttttttacatttttactgttccactaaaaataaacaatttatgagtaagagtctcactaccaagagatccaaattagaattttgatctcatcccactttccaatcctcccgtgactaggggtgcaaatgagctgggttggctgggttagaagtgttttaataggccaatccaatgattgtagtttggataagctataaaccatttaattttttttattgtacaatccaaccttacttagtacattaatataaggggtgagttgggttgggtttattgggttgaaatgaatattttaaactttaatatttatgttacaaacaggataaaattattcaacctagtgcatagacaaaaaaaaaacgaatgcatatatatgtatatacatatata

SEQ ID NO: 214420 - DNA, 506 bp, Cannabis indica
atcttttaccaacacaacagtagttataccggttgttgttggtgttattatcaatagtttccatatcatatataacttttcataataataattattattgtttcttgaattttttcactatgaacttgtgccttttataatataatagttcataaatagatacaaattaaatatcttctactctttttacattaaaactatttaatttgtatttatttatcaactctcttccattatttaactcattttaaggtaaaattaaataaaatgtgacagaaagaatactagtgtctactgtaaaagttatattttaaagagtatcattagactgtaagaagcaaattcagtagtataaaaaattcaccgagaaaaatgcgaattattccatttttaagcatacttgtgttgattaaatttaataacataaaaaaaaaacatatacttgcgaattgagtatgtatcattattatttttgtcaatatataaaagtaaacctgaccaaaacc

SEQ ID NO: 214421 - DNA, 574 bp, Cannabis indica
gtactactaaaacgtgaatatgacgattggctttgcgctaaatttggtcaaaataacccctaattcaaaaattaaaaatattattattttcatgttcaattttaaaaagttttttttactaaaacgtgaatgttaatgttctcttcgaaaatcataaaattttacaatgactaaaccaaaaccgttgtgcatcacttttctactagacacgttgagagaaaaaataattttcaagcactaacaatcagtttgatcgaacttgtgaaaatttcacattttcaatagtggtatcccttcgtgaaaggtggcccgaacttatctcggaatattttttctcattaatcacaatgaattcgtactactatgacgtaaatatgaagaatgattttgagttatatttggttaaaatgtccctctaattcaaaaattgaaaatatttttcttaaaattttaacaaattttttttctcttacactcattagtgttcttttaaaatctcaccctacagatctcgaaaaaattatgaagtttcccaaagacgaaaccataaacgttattcatcacttttctactg

SEQ ID NO: 214422 - DNA, 852 bp, Cannabis indica
tagccttgattgctgaagaggctaagcagcatgtagcgaaagagcagactgtaaaggattccgtcacggcatcgaatcctcctgctagttgtaatgtcaataaggggaccgacactggcaatcctaatcataaacggaaggctgaggcttctggaacatcaggagggaatagaaagtttcagggaaacagaggtggtcgtcagggccatgggtcctcatttcgatcatatcctgagtgtcctaaatgcaagaaacatcatccaggtgagtgtcgggccaaggcgtgtttccagtgtggcatggtgggtcactttatcgaggactgtcctcaggctaagaaagaggaacctaagaagaatactgcacataacccggggcgactttttaccatgactcaggctgacggtgatgctagtccatcagttgtgacaggtcaattgtctattaatggctgttcatatactgtgttgtttgattctagaactactcactccaatgtgccgagtagagttattgaaagtttccataagccatgtgatatttatgcttcgaggtttggaaccctgatacccttggagaccttgttgtattcactaggtggattcggtctttgtccttctggattgacggttgtgaattgaccgccaatctaattgaattgcaactatctaattttgacataatcctaggaatggattttctatctaagtatggggcgaacgatcgattgtaaatggaaaataggtggtgtttgagcccgatagtgctaacccacgcagtgtttgtgggtaagggttcgtaggggccgacgcataccaaaaataaactactgttgaaagctaaggacctgat

SEQ ID NO: 214423 - DNA, 674 bp, Cannabis indica
ttgttttccaaaatttcaatgctgaatttattcagttccaacaaatcattcaaatttgcattcatctcacccaatagactatcatgtgtttaaaagtgttccattagtgggaggaaatcttcttacttctccatctaccacattctatatactatttttaatatttttttaaaatttacgatttgggttgctctagtaatatctaggtaggttactatatgaatttatttgtgatttaaagtataaaaataaaaaaatatctaatttatttattgcaaaacttaaataaatatttgtcatcgagtttgctacttaatcaatgaaagagtaaataaattaaaaataaatattttgtttctttgcagtttcagaaaaaaaaaatatatattttgtttctttaataatttttctgtatttataaattgtaattgatgataatggtgttaatatttcattacaattatcccaactatacattatcaccaaattcttcaaagaaagaaaaaaaacttacacgttaaaaaaaaaaaaaaaaaaaacttaacaaccaaaaaatctaaatgctatttaagccgaaaacattcagtattactatcaacaaacccaagaattctttttgactaaattcaaaaacaaaaaaaacatagatattagttaataaaaataaataaaat

SEQ ID NO: 214424 - DNA, 604 bp, Cannabis indica
tttaattttgtggaggtttttttttattattttagcctataattatcaaattaaaaaaattacattaattttttaaaaaggtaatatttttgttagtgggggctatacactaatacaagtaagtgggtagcccatgttcttagctcaattctctatcatttattttatgtgggacaatatccacaccaaattagaagagattactttatttaagaaaatttaagtgaaagaagtgataattagtaatatttcaagaaaatttgtcagttgatctaatatcttaaatgtcatgtgaacatttctaagattttaatttttttaatgtattatataacattttaagttacaaaggataaaagaagacaaatcttattaattgtaatataacaaggcggataaaaacatgtatttttccaacatttctagtagctttcaaaaaagaaaagagagagagatttctagcttgtcttgttttctattataatgaatgaatatcatttttaaaataatattaatctcattttttttggtaagatttatttaattttaggatttttttattttaatactttaaaataattttttttacggtagttctatatag

SEQ ID NO: 214425 - DNA, 655 bp, Cannabis indica
aaaaaatatttaccgagatagataaataaagcttacaaaaataataaataataacagtggacaagtgatttttacttggtttgaccgttaacaattcctagtccacgagtcagttgtattggtcccttagggaagtattttgataatatagtatgtgtttacagtataaaccctgtctctacaagtttgtaggaatttttgtagatgttcggccagtacaaattttgttcacccatttttttcataaaaaataggggtatttataggcttacgtgtggggtaagggcattccttttacccacctagggctttgtaccacagtccattataagggcaggaaaatacaacatcaaatctgatcgtcaagccttgaagaacctttttgatcgtgcggtgtgcatggatggtgagtagtaccgtctggatcaagaacacgtgttaacaaaaggtttctcctttataaattactctccaggcgagccgccaggaaaaaaggtgtgtttagaggtacgtacgcgcactaccatggcctgacacaggtgacaaaatctaattctgtgtcagaaaaagacgtaaccatcagttggtcgatttccatataaatctgaggtggcaatccgtattcccataggagtcgccgtccgcgatcagttca

SEQ ID NO: 214426 - DNA, 534 bp, Cannabis indica
atattaaattagactaataataatattatagcttataattaaagtgttaaagattatggtacccttcaatatttttaatacttatatatattatcgtaaaatttctagtaaattctctaaaaatatgttagggtacacattttatttattttgaatgaacttctacataatgatatctttttcacatgtcttgaaattaattggacgaaattttttatgtaggtgcataagatattttgtacaataatttttgtgcataaagaatatttaaaggttagatggtctaaaatttttaaaactcaaacatttgaaaaaaaaaaataattattgtccgatcgataaactatagtggttgaagctttaactaatctccctaaagcatgatatatttgtcattttttaatttgggttggcactaatataatgtctaatataaaaaggacatgaaagagtactttttatgtgtaggctgcttgaatgactatagaatgattttttggtctagtgttttaaagcaagagagaaacacttgtt

SEQ ID NO: 214427 - DNA, 902 bp, Cannabis indica
tttttttaaaaaaatgatattttcaaaaattaatataaaaatatgtgtattttataaagaagttttttttagccctgaatttggtaaaccctaagtacacgcctagcctgttttagcacacattatgtaattctttttttcttaacacattttttgaataataaatcttacaactctgcggaaaaaaaattacaagaataagttaaggaatatttcttttctgtatccactaatcaaaaacactttcatattatatttcattaaaatgtatccattttgtgagtggattgtccaatatatttttaccttccacttaagtttagcatataatttacattaacctaagagtataatggtataatgggtacattatttataaaagtgagtatatcttaaaaatataaaaataaaggtaaaaattaaaatgaaaaaaataaagtatgtatacaatgtaattttctctgtcgtaaactcaagcacgaccctaagaataggcaaactaagcctgtacctaaggcccacctaaccttcaaaaaaagaatttctttttaaaattacatatttgttttattaattttaaaaataccatattttttctaaataaattcagttttttttttctatagctcactaaagttcaggggccagcttacttagactgatccctactcaaaattattgacaagcctcacttgtggaggaagaaaaccgcggtaacaagttaataaaagggttaatttcacaaatgcacaaaaacaacaaaaaaataacaaaatacagtttaacggaattttaaacatttttacgatttttttgattttatttacataaaatacggtctttttaatgtttgaaattttgttcatttgttgttaatttttgttatatgtatgttatttttt

SEQ ID NO: 214428 - DNA, 1198 bp, Cannabis indica
tttattaaatgatctactaatatagttgttcatggtcttactagaacatcttgttcttttcaatatcgagtgttcaacatgggagatgtttctgttgagttacactcttatcttttgactgatatggcaaattaataaaagttctatatttactttcggctaattaagatttttgtctcccaaactttaacatgtacaaaatcatactctttaaatttttaaggtcgttaaaattttttcttgaaattgaaattgtttgatttaaaaacttttgtccaattttagtaaggaaagtctaacatagataaaaatttcagagacataatttaatagatttcaaagtcttgggagcatgatttagtacataaacaatcgttaaattagtacatttgaatgaaattagacaaaaatccttaaatttaataatcttaatagttcacgaaaattttttacaattaaaaaattaaaaaatataatttaatacatgtcaaaatttaaaaaacaaaaatactaataaacctttacctttaccaaaaaaaaaaaaactacttatagttaatgaaattttctttttaaaaagaaaaaaaaaaaagagtaacataagatagaggcacgtgcaatccatgaatctatcacgtgctatttggtgtgttatcatctattttcattgtggctttgctctcagagaaagagaaacaatggaagccgtcaaagcttggagcttgagcctccaatggcgtccattgaagcaactcttcaacaccacctcatcatcttccttcagagcaccacgctcttcctcctcttccttttcttcttccccattcctcattcgctcttgttcttcttcctctgcccccgccgccactactaaccccaactcccgtaatcgccgctcttcttctgccaatactactactactacttcaagtcccgagtcagttcgagccattagattacaaaaggtatgttctttatatcattcattggttttgattgaggtctttttatggtaattggatgatgagtttatgtaattgtttttgaggtaatttataatgcacgcaaactgtttgatgaaatgtgtgtgagagaatagttttgattgctgatgatgctgtgtttgattttttgtgttttgtaaaaatataaactattaaaaaaatttattagcaaaataaccacattttgattgcat

SEQ ID NO: 214429 - DNA, 792 bp, Cannabis indica
atgatgaatttctatgaagcaaactttgacttccgtgagggaaggctaaagttacataaaagcgatgatttttcttaaaaagatcaaagggtgaaacatcattgggcgtgtgacagacttcaagtagttcttctattcttggaaggagggttgaagacatgtcgtacccccagtcatctttcatggataaaaaaaatgtgcatgcgccatccatgattcgtgaaggttcaggggaaatgcatgaactggtatacaataggatctctagggcagtctattccttccgatggattgaaaggtgcgtagtagcttttgaggtaaatgcttggaccccagtaggatgagcgttactctggtagagatttcctaactggtttttaatggcttcatttgctttcgttgatgtaacttggagctatagttacattgtattgacagaatcctctgtcagcaaactttgcaaaaaattatttgccttaatagcatacttcctgtaacgccctaatgctaaggcacgctacagtgctttttcaattacagtgtaatctttgctaatcaaagaattttcttgaaaaacgtgtcaacttaaaacttttatattaaatattaaacttcatattatatcaaaatatttacaagtgtcgggatcccttttaaatttttaaacataatatacccaaatacattatatccagtcgcactgcgactacaaaataaaatcccagatgtcccgagactgaacactccaagtcacgccgcttcgacatgtacaatcccatcctagctcaggtt

SEQ ID NO: 214430 - DNA, 514 bp, Cannabis indica
attgtcactaaaatcttatatatttaataaaacttcttaatatgtaaattaacaaaatgccgacaaaaaaaaattacaaaattatcctttcgagaaagaggatattaaatcctctctcagccaagcaatcttattataaatatgatcaacctacacactgagaatccaatcccattgatctacatggccaatttatctcttatcacccctacattttccagtaatgccaaaacaattgtcaaaagcaaaaactcaagggttaaagcaattcaaagagccctagaagtttattccactctcgggggggggggagtataacaagacgatatccgaagaatttgacttctacctagactacccttttgccaaactcttagacatgaaaagcaacatattcatgccaaaaaagataacagacctctactagtatctcgcaagttcatacactattgcgattaaaatccacacaatagggctctgaacatccgtctgtggctatatccaacgccctgac

SEQ ID NO: 214431 - DNA, 700 bp, Cannabis indica
aaattagggaaacttaaaaatcaaatcccataattttctcaatcgtataaaatcaatcccaaaaagatagggattctaaatggactataattatggagatattttggggaaaatatctctgagaatctttacttgatctgtgcttctatccagataatggaacttggtctacgtgcttgatctacttcatcattaagtacaggtgcgtgttctttgtccaatagtcttcgtttttgctatacggaaaagaaaccaagatcaatgttgagggcgtgagaaattacggatggggctatatcctgaccatgtcttcatgcgactaggcaaaaatgttaaggtttgctcttgaaaatcttatcaaagtaaattttattttgagcaacaaaccttgtcaaatattgactttcttagtcgtaatagtgggatcgatctctacttcttctaattcctatacaagacgatgcttgtgcttaggtccccaaagagatgatccatgtcttcatccccaccttaggtggaccttttttacttaaaattttctcgacctttaatcctttgtcggctgtatttcctttttttcctggtcaaggcaaggtagtatcattaatgtgcagtcttttgattctccttttagacacccaagaccattcccggtcaataaacttgatacataaatggtagactgaggttacaactttaa

SEQ ID NO: 214432 - DNA, 1097 bp, Cannabis indica
cacttccttcctcaaacccttaccttttagatgacggaactactctcctcctctgtggtcgtctccattactctcatcgtcgttgttactattggcaatcctcatattttcccgatgatggtaagtaataaagatctgagacgttagcccgatcaatttgtagaaatctaaaatgttaggggaacgatcaattcgcagagctcttaaatgatggaggaacaatctgttcgcacggtttaatttgattgattcacaaggtttgccattgtgtttgattgattcggttcaatatcatctgggttgggttttttcttatagtattttaaaagataataacaggtttggtgttggtgatttttttcaatagtgaagtgagtttgaaaatataactatggatagtatatggtagtgggtgaagaagttgaagattagatatttaggagaagaataagagatgcagaaggagagagggtcgaaggtttaggataatgggatatagtatttttaattttttttcttaaaaaattaatctttttattcatttaagtaaacaaaaaaataaaatatattcttaatttataataattttttaaagaatttattttatatttttttatttaatttatatctgttttattttctatttattttaattgttttaaattgattttttttatattttcaattttttttttattttttaaaattatttatgtggatgaatagaattgtgtcatgtgtacactgtgtccacgtagacacgtccggccctgggcataggcgggctaggcctgtgcctagggcccacccagcccaggggcccaaattttttttttctcttttaaaattatacatttttttactgattttgaaaaataccacatttcttctaacataagggtccaaaaattttatttttccctgtggcccacttcgtttcagggccaaccctgcacgtagataacacattgggtacacatgaacagttcattgtggcacttaacatctaaaaatagataaaaaatagcaaactactagcagaacataagttttggtaattttgccgccaaaaaatgaattttggaattaattgttag

SEQ ID NO: 214433 - DNA, 599 bp, Cannabis indica
ttattttaatttttgttttttttcttcatgatttgaatttttaaaaatacaatatcactatttttataaatttatttgtctatttagtctcagttttttaaatagtcgaaatcaaggaataagtaaaacattttttgtactttggaggtcctttttttttttgtattttcacataataaatttatgataaaaaataaaatttaaaattgttaataaaattgttaaatcctgctaaactaaccattgttcgttactataaaattaacccaaaagttaatacattttttataatacaataaaaatatatttatggataacttaatgtagtgaccataaattataaaaattaaaaaaaatcataaattaacccaaaattttttattaattagaataatgattgtgcgaagtgcggtgatgttacctagtaagttataaactacttgagaacttttgtaaatttgtggattaatataattgggttgtaaaaatctaattgtaacgtacttaattaagaaaagaaaaaatgtaaccaatctaataattttatcaatttactcgggttaacctatctaaatgtataaaatgattatgagttgatt

SEQ ID NO: 214434 - DNA, 789 bp, Cannabis indica
agccatcattttcttttgtttattttattttatccttatatagctaggtttggttattaggtaacaaataaataaataaatatatctacatccatccatctgtctaagtctaaccacagttttcttattattaaacttcaccaaaaacagaggtgcatttgattttttttttttcccttttctcaatccctcttttctttattgatgatgcttcataaaaaacaagtttccccccaaagaaagtgaggtggaatgaatcatgcagttttgggatcgagttctacaatttgattcttctcaatatatataagtatcgtgtaatgtgtgggttttacataataatgagacaaatgaaggatttagttcaaaatcaaatttaaaaggatatgtagacaatgttagaataatttttatatactaacaaattcaaaatattttatttgatttgatttgtaaaatataattaattatttaataattaattaaaatattttaatttgagttaaatttaattatcaaatatttgagttacctaatttaatttttagaattaattgttaaaatattttgacaattaatatagcagactttgatggaatgtctcacttatataaatataaggtcttggtcctcgaactcactactcattcggtgaaaacacagttaatctatctaaacagagtaaagagagcttgaaagcccaattacccatactaatcaatttccttttcttttatagatccaaagctctaatcaatggttgtatgtatttcattcttttattcataa

SEQ ID NO: 214435 - DNA, 663 bp, Cannabis indica
aattattcaaaaatttatgaaaaaactatcattaaaagttaaagctggtacaatctaacttttttttaaaaaaattattttgatcaaaatgctccataatatatttatttatactaaaatatatttacttatttattatatattacaataaaaaaaataatatttaaatcaattatttcttattttgttttaaaaataatttttattttttattttttaatattaacagatcagattagcctaaagtttcctacatgagtttttaattttctttacacgtgataaaaatataatttaaaaatactataaattattttttatcatatacgtataaatttatattttaggaaaaaaaaatattaaaaatatattagtgttgtcagaggaatttagataacaccaaattatgcgagtattcaaataaagttagaatactcaaaaacatatatgcgagtactcacttagaacagtgagtactcaaatataggctactaaataaatagaaacgaaaataaaaataaagagaagacaagaaaattattagtggtacagttaaagcttagtttgcttagtctacttttggtaatgatttcaacttaatttatttgatttggatcacccctttatatagaaagcaagtgtcctttaagatatactgatcga

SEQ ID NO: 214436 - DNA, 667 bp, Cannabis indica
ataatcacaaattttaatacaataccaattgtattattcaacacataaaaaatggtccctgttagcttataatgtaatttttaagagcttaagttgtatttcgatgggattgaaactgggatttgggtgggggtcgaggcctaaggtcctgtgtggggtttagggtctgaggttcgagaccaagctagagtacatgttttgaagtttgtgtttgtgaggtttaggtagttcgggttcgggctaggttttggggtacgagctcagatttgagattttagccaggggcagggttgttctggtctaggtcgggatcggagtttgggtccgagacagggtacaagctatggttcaggttcgtgatctgaggttaggttacggtgcgagttcccagattcttaatctaaggtattaggtatgggtttcgaagtccaaatcgaagcctagatttgagctgagatctagggtcgaggttggggtttgttaagctcacttatgctaaattattgtggatattgtcctacatagaataaatgatagagtattaagtcatatataagaatatgaattactccacgtatcaccaattaatgataagatgaaaccttataattctcatcctaaactatacttaaaaaattacataagcaatcacttgtggtggtcccca

SEQ ID NO: 214437 - DNA, 1195 bp, Cannabis indica
gtaaaaatgacatttcttatagtaatatatatggccaatttaatttccttttttctttttaatttttacaagtataaaagagagggaaagtgggagctaactagatcaattattaattatggtcgatataaagtaaatgaataatatttaataataattattccaaattaaagtcgagtggtgtaaaaacacttatatttatataatgtctcttgaacaaactaaagggtacgtaaaaaatatcgtttatatattataatattaatagctatatttatatatgtcatatgagatgagaatgcactaaattacaattcttaatataatatacgactttaatataataataatatgtgaaatattttacttttgtttagtgtttcaaacgagttaagtagcaacaccagagacggacctactcttatttatagcccccacaaataaaaatattgcattttaaaaaattaaatatattttttttaagttgataattataaaccaaaataataaaaaagcccccataaaattaaataaatatagtaagagtgattataatataagtataaatattttttaatgataaataaaccccaacaaaacaaaaattctgagtccgtcactgaataacacatcaatacaaagaaaaatatatataatataatataatatataatggggtttttgttctgttcttctcatagtattattcgttaattattaatacatgactttcattacaaaaagaaaatcatagttttatttttaattattaattattaaatatatgtatatatatgtacgtataatttataaaattaagaaattatttaacgtcaatgtcgtatataagtacgtaagactacgtatatctctagtctacctcgtgatgacaagatcatatatatgatgtatatttcagtattgaattaacaataattaataatataataataataaaaaaaaacattgaattaatgtaattgatatatgtacgtgtcaatgcatggattatggtaagttaatagttttatatattagggttaaatatataatttatatatgagtttttatatcatatatattaccaaatttgaggagtgtttagtacttatcattgagtaattttagcataattaagtaagagttttattaaataatccgtgtgaatctgtcacagtattgaaaaaatcaatac

SEQ ID NO: 214438 - DNA, 700 bp, Cannabis indica
atataaataatgttattatattttctaaaaaaaaaatgtatatgtacagtattagtttcttcttcatttttgtatactggtaatcttctcaaaatataactattttaattttcctagaaaaaagaaaacacccacaaatggtcgcaccacttttacccattattaatttcttaagaaaaccctaatttaattaatctataattcttaaaaaaaaataaactataattattgaggatgcttttattggacttcttttaacaaattttaagatcattcgtaagctatataaatataatttttctaaaaaagtgtaactttgatttcaatttattagcacaatcactacatattttgtttcgattattatataaaaaatatttagtaagctataatttgattcctttttattttctcgttattgattagtatagagtgataaacaaggtagagtttaaaaatattacttaattaacagcaaaagaaaataaaaactaatagaaatatatatatactaggtaggagttatatactaggcacgtaaatattagttttaggtaaagtttaggttttttttttttatttcttcttatttagattgtatgtgaaggtatgatcatacgaatgatttgttttatcaaattaacatttgtgcaattataattggttgatactatttccttttggttttatttaatagaag

SEQ ID NO: 214439 - DNA, 557 bp, Cannabis indica
gcatatatggtaattccaaagtttcaattagtttgggtcggataatctttgcataaattacaatgcacgaacatgtacgtatacagaaggcatacaacttgtgacccttgtgttgagtaatctgctcaaataatcaaattaattaaattagtatgtgctatttcatgtttcatctatgtcattgcaattttgtcgtacggttattgtgtctcatattttccgctcaatttgttaagtgtattcaacattttccagtgtgttatatatatataaatatatatatgtataaatgtgtaaatattattgattatttattcactgaaagttttagtaagatagcaattggtatggttggtgctttgtgttatttactctgaatccaagaacattcttttttggtgattaataatctggaaagcagttgtgtactaatacataggtcttgtaggttatctcaatgttgaaggacagactaggggtgcagaaggataaaattctttccctggtggattacaggtttttgactttctataatcttcaatactaaaaatttggca

SEQ ID NO: 214440 - DNA, 816 bp, Cannabis indica
ttataataaaaaaaatacttatacgttagatttaaaaagtcatttgtagaaggtatgagagtacaacataaaacaactctcgtacccattaatcatactataaatttactttaaacaattaatggacaaaccttaaaaaagttacaataaccatgagatagtaatcatcaaacttaaatttatttttatttaatgatattcaaatattcatataataattattcaaatgataaaaataaataaatattttatactgctataaacaagtaaaaatttagtccaacataactatataacatgttttaagaatctagagatacatgataaattaaaatttaaattatttaataaataatattaattataaactaaatgcatggcggatgatgtggtatataacactgctgacattttaacttgtgcctaaaataaaatataacttattgccatccccatttaatttgaaagtcaaattaagttatccaataaataaagaaacagaattaatatcacactaatattaacttattttccaaaaattaactgatttttcaagtacaatctagataataataattcaataattaattctaaaatggaaaataaaacaaaggcggctagctttgcttcaggggatagccaaaccaccaaagccaggtcagccatggaagacaaactccaatttaaattattattataacaaaaataaaaacactttactatattttttaaaaaaatataaactcaaaaataaataaataaataaataaataagctaaaatttagttaagatttttattcgaattttaagatgta

SEQ ID NO: 214441 - DNA, 587 bp, Cannabis indica
caatttaaaaagacctttcatcatctccttccttctaagtttaaccttttcaccagaaaattctcaataacccttgttgttctgtttgtcttaaccatattgactctaacactcatcccttctgcattgttccagggcagataagatatgaaaacaacttaagttttcttcttttttctctaataataaaaactgtgatattaaagatttcttgttaagaggttttgatgctttaagaaaagaagacttaactatttttttccaaattttatgggcaatttggaacaagcataataagttcattttcaaaaataacaagcctatggatctagatgtgaaattttctgtcatctcctttttgcaggaatataagaatgcacaaacaaagtttacttccacacatgtccatcatcaacttgaagagtcacccttgctgccttctcgaggaatgtataaactcaatgtagatgcagcagtttgatctcactcaaaaactcatagctatggagcaatagtccaagactctcacaacataatcattgttgggttttcctcttcagctcattttggtctgtcccccatttttg

SEQ ID NO: 214442 - DNA, 888 bp, Cannabis indica
cgatttattcacccgtactcatttattttgtgcacgtaagaagttatttgaattcaaatttcgattattcattttttgaagaattctctttaataactacatcatacaccatattcatatattgtaccaaaaatactaaaaatttatatagattaaaaaaaggaatcacaactatatgtatagtacataggaatagttgatttaattttagttattattcaggcatatatagtcacacttaaaaatgtttattttttctttgttgtaaagtaattgagaaaaacgtacatgtgatagatagaatcatatattgggatttagctaagaagaagaaattggtggttgtgatgagatgtattaatccatccaaattggatgagaaaaataaataaattaaagattccaataataatttgtggagagtgcttaggcttattagttgaaagcaatatacaaaggtcacaatcttagctctttctcactcatcatgaattagccataagagaattttggcttccctttcacactcacttacaccacttttgtatataatttctaatattccttttttattatttatcaaaaaagaagactttattaatcaaataaaaccattacaaatttatttctaatattctccaaagcactcattatttcacaattttattaggaaaaaatagtgaagaaacctcatctaaattatcaacaatggttagccatataaatatatgaaaataaaattattataataataataataataaaagcatcttgtttggtcatctttctagttgtacatagaagattccatacaaaataagtagctaggcaaaaccataattgatagaaactagatagatcgatatatatagccattatttttttcaa

SEQ ID NO: 214443 - DNA, 639 bp, Cannabis indica
gaaaaaatgaatgagtaaaatacaaaggggaaaggtatatatacaaggggacccgattcctataaaccaggaaataacaaacagacacctaaaaaatctattaaccacttaaaatatctactaacctataaactgactaaacaaccactaacggtccaattttcagtacatacaacagagtagacagagtatatagagtaattcttgttaatcatattaagaattatgaggtttaatctgaattatatgagtccatattttgcatttaatcctttataaaacaatgttatccgataacttgcttcatctcatattagacataattgtagtgtaggtgaaaagtgtgtataataattggaatttatatatcttgtttttgataatgttttcttttccatcttaggagtggagtcaatgcaagcaaaccaagttttgaagatatgatggagcgggggccaaggcaaggcaccgaccagtaccacaattgggtcagggcgtgccatagaagaagacacaaacagagtattaataactacatttatttataccctcttcactcactcctcaccttttctaatttctttcattcttctattctatatacctttcttcactttttatatatacttatatactttc

SEQ ID NO: 214444 - DNA, 674 bp, Cannabis indica
tttgaaaaaaaataaaaattaaactagaaagaggttatgtttgcttaaacaaaactacatttttagagaaaaaaaaaaatagactcaagtttgttcccgtaaaatttaatttttacaaaaattaaaattataatatatatttttttctatatctaaatgtattttttcataacaaattaagaataaatacctaaacttaactcttagttgcaaataaatacctaagtttttgctgcagtcaggtattggatgcaagatgactcaagtattttcatagtcaagacaagagtgcgtatactttgctgcagaccgttaaaaccagcagtaatatactagataattctagtttctggcgtcagttgtggcatttgaaacttctccccaaggtgttaaatttcttatggagagtctctacaaacagtctaccaacaaagttccaactttcaacaaaaaatatcccaattgatcctcggtgtcccttctgtttggcggcaacagaaacagctttgcatgttcttattcggtgtagatttgctcaaagttgttggagtcgatgtcatgtaccatctgttgcacctggtgcgatggtttttacaagctggtttgaggttggtttgaagacatagaacgcatcagaaagtcttgaagcgacaatgatcttgtggtcaatttgg

SEQ ID NO: 214445 - DNA, 530 bp, Cannabis indica
aggtacttcattacaaagatctgtattacatgtattgtttattttgactatgaggaggtggatttctttattgggaaacatatagcgtgacaaattattgttcatatatttaataattctttttgattaatgagattcatatatataaatgtgtatattgaattctttattcaaataattatttttgatttttacgtgattatttattgttctttattcaaataatctcacctaataactaataatatttttctttaatttttattgtatcactttcaaataacatagaaaaaaactagcataaaatttagtatacgtgcctcgcacgtagtttttgctagtatatatatatatgaaaaatcccctatttcttttgcatttgtaggttgttttgtttgggccttaggtaatgttgctggtgattccccaaatgtcgtgatctagtacttggtaatgggaccttgcttgtaagtcatctatatctatgtaatgtgggaaattatatatgcatcttgtatttataattgata

SEQ ID NO: 214446 - DNA, 983 bp, Cannabis indica
actattttatgtaaataaaattttaaaaataataaaaagtctatactatttttataattttattattatttttgtattttttttttaattgtgggcaaagttttttagaattttaatatttaattttgtgttaatattaatgccccttaattttatttttttgtttataaatttaagtccaattaaatcttaatatgtaaagttgtgtacacatgaccccaaaatttataaactaatataaatatgtcacacgtataaaattatatacaataataatttaattagtatgtaatgatgagatatttaattagtatcttaaatttttaaaaagtgatttaatcaaagaaaaaaagaagagatttaagcatatgaatacaaattactctttcatttattacacatcctcatcctctaagactattacacgtacataatgcatctagagaaataatgaacaatccaaatctaagaaaaccctactaactttattaatctttcacaatgacattttctaaccctgtagactcgtcattttatttttaatatatattagatattacttattttttttaaagtaaaaaaaaaaaggtaaattaaagtggtgcatatcttatcctcactgcttcgattttaagacaatcacacggaccacgtgctccccattgcttggatcttaaggcaattcggggaccacgtgctccccaccgcttcaatcttaaaataatttcgaagattacatgctagctataagagcatcatacttcatcgtgctttaattagatcatggatacttacgcttcatgagagttcctattccaaagatagtccaccacaacctaagttaaccttcaaagatcaaatacaatctctcacaattaaagagttaggtgaaagtcgaacccttaacaagaggaagccgataaaaattttcctaccactacaccacacaacgcatatagtatattagatattactcttgattc

SEQ ID NO: 214447 - DNA, 738 bp, Cannabis indica
gtatcaatcctccttaataaatagagaattgtagtgcatgttggcaatcataactaaaaaacttgttttagttttaaaaacagaaaaatatttttaaaaacaatttggcttgtttagaccttgttttttaaaaacagttttcaagaaaacaaatttaacaaaaaacaagaaattttgaaaacaacaaaatgttgttttctattttaaaaaccaattcactttggtcaatattgtttttaaaaatcactagccaaacgtgactgtgtttaaaaacttcaaaaactatttttgttctcatttctaaaaataatttttttaaaaaaagacagaaaacaatactaaacatactcgtattctctcaaaaaaaaaaatagagaattgtatttaaatttttcaaactttgagtattagcttactccttagaaaaaaaataaattataataagaaatagagccataagaagaacaagagaaagaaaagatcatttaattatttattgaattaggaaatagcgtattaaccaaaacgtacccagtaagtttatggtttagtctagttaacaatgttatgacgcgctttattatcaaaagttaaaaaatttggttactcttttcgtagtatttgttttgtccaaatataagtttagtactttatatatttgataatatttatctaatatcatgagtttgataaaaaataaaaatgcactcaactcaagattaataaaagaattataaa

SEQ ID NO: 214448 - DNA, 769 bp, Cannabis indica
agcgcggatatgttacctagtttataaataaaagcaaacattagggagcattatcataaaaacataaagagatcaaatgtataaaaataaaaacatgaagggatttagccgtcaataattttaataaaaattttatttgcagctcaatctcttactaaaatactcaattttattatttttattttgtattaaatataattataaatttgtactctcagaaaaaaaaatattactccttcttatattatttttctaccaaaaaaaatacatattcaaaataaaagtaaatacattctaaatattaagtgttaggctatttttagcctaagtttcaagtcattttttatagttgtttttattttttattattatttttgggaatagaattacgcttgttttctttaatttcaagtttctacgcttggaatgtatagattggacaaatttgatctataaaatagagaaaattttgaaagagaataaagctaaaacttcaagcctaagttagactatattctggtcaaattttagataaaatcgaaacataaaaatttagatctcttttttatctttccaacgcatcttgaatcagttcatttgaagtttgtatgagaaagttatgtccattttactgaaagaggtcgaagtagaaaaaaatgggtctagtggtcgcgacgggggactacagaaagcccgttttttcacttttctacagccgccacggcgaggttattttccgccgcagaaccgacttcgtacaggtcaagga

SEQ ID NO: 214449 - DNA, 869 bp, Cannabis indica
attttgaacttcaaatttcgtttccgatatatattttcgtttacagggtttagcatattcctttaacaagaaaaatatatcaaaagcatattcatttacagaatacttaagtccgatagcaaataacaatggagaaatttgaatttctatgcttaatttgctatttaattaaagaaaatataaaaaaatttctctttttatactgtatcaaaaatatatctatataaaaaaatattttaagttaaattaacttttttttgtcaattttttgctgtttttttttattttttttttcagctatggaccaatccagcaaatcttaataggtaatattagaatgacattactaacaacaaatctttataaaaaaaattaaaaaattacacatgtaggcacatgaaattgattattgttagtaatgtaatatattactcggatctaacaaattttttcgagaataaatgagcttcaataattcgtaattgcaccttagaatataagatacttattttttgtttactccttttacggagttaaatgtaataactttctcagtgaacgaattcacaagggaaagagacgaaaacctagacctaaaattatactcatacatctaagagcactttagtaaaagatattctctgtaaatactttgagagccgtaattagaatttactttgccttctttagtgatttatccgatattatctcataagagatcgaacctttataaattatgtgtttttttatttagttattattttatcttttcattgtgattaactcgcaattattttacttaattatttttacggtgattaacttgcatatttattagtgtaaatccatatcatatctcacatatttat

SEQ ID NO: 214450 - DNA, 860 bp, Cannabis indica
tctctgttggaatcaccactatctctaaccaaaaaccaaaaagtaggagagtggtggtttttaccaacactttaataaagtattctgattcagtttaaactaatttatttatttttttgactatattaaactaatttattttttatttattattaaaaaaagtatttatttaattagttaattaatatttaagttttttggcggctaaactctctcaactattgttattttgcacttaaccctccaggcttaaattttagcagtaaaactttctaaattattgaactgttagcaaatttaacatgacatccagttaactaccttcatagactacttatatgtacactcttgtacacacgacacatttatattgtatacctaatattattatttcaaattcatcttaaaattataaaaataaaaaaataaaatattaaaaaaaatatattataaattttttgaaataattttttttataccaaaataaatgtgacatgtccaatatacacataaacacttcacattattgtgaaaaatagatgtcactttaaatttgctaataacttaataatttagaggctaccaaaatttgagcttgcagaattaaatgaatgttgaatgataggtaagaaggttttgcggtaaaaaaaaaattctttaattttttattttttatcaccaaaaaaaaagaaaaagaagttggctggtatttgaaagaaaaaaatatgtaattctaattctagagtggccaataagaaacagtgagcaggagacttaacggtcaaattgacgggtgaagagccaagaaatggtcgccggagatcccggcgttgtcgtctccaggctgaagagagaagact

SEQ ID NO: 214451 - DNA, 678 bp, Cannabis indica
acaattaacattttaatgtaaaaggaaaatagtaattttaaaaatcgaatacatataatacaaatatatttcaaaactaaatcaaatattcaagtgtatagtctattcttacatatgttattttttttagatacaattgaaaacaaaattaaacatttttttacatacatttttattttttctgatgaaattgttattgttactttatttattttaatttgttgttggatacataaaacaacaataatctattttatcttgttgttagttatatgaaaagaaaatatgttttaataaatattaaataatataatattaaaaagtaaccaatcaaaaataactaatccaatccacacttttacaaattagatttgtgctattttgcacattggattgaatccaaaaaataaaatccgcacttattgcagattggatgtgctatgagcatatcgtgtggattagattggattggaggaatacccttacttttgtagaatcttaggttgatgttacgtgtcaagccacgtaaatggtacttttatttaaggtttggttttttgttttagattttggtaacttaaagtgttatgattatttgaacgatttgttttataaaagtaaactgtgtgttagtgtatttggtaagaaaattgttattgtgtctataaacttatgata

SEQ ID NO: 214452 - DNA, 398 bp, Cannabis indica
ttttaaaaattatttaattttttttttcaataatataatatagaactcccaaaaaataaacaaatatagaataaagagacataaataaataaaaagtagaaatggacaagatttttttaacttgttaagatcattctcttgttttgttacttaataggagaatatgcaaatatatactaatacagaagaatatgcaagagtgtaactttgataataatgatccatttgccagagattgtatggtagcatgtcgatgttgaatatatttctgctatccttcttctggtttcaatctcaatattgctatgcaatttataacataacttcatcccaagccttatctcaaacacaaactctactctcatccaaccagacttttgagttaggtttctttaatc

SEQ ID NO: 214453 - DNA, 606 bp, Cannabis indica
aaccgtaaatggattattgagacctcaaatttagaacgttaagctttcaatcttaggtacgtggcttgataattaattttgttatcatggattttagattttaatgaatttcaccactaaaattgtgtatataagcaaattagatttaatatagaacttgtgcttcaaactaattactagattcttttatcatctgggttctaaacttaccaattgttataattgtttggttccatacattgccaggatagacagagatcctattatctgaaaaagaataaataatgaaccacttaaccatcatttcaaattttcaattcttgtccaagcttggtaatagttatatggaagatcttaattttctcatggtaaaataatcaattataagaagtttaatatactcttagaacctgcattagtttttttttttagagaaaaggggtttattcaattgaaaataacatagttgggaatcacaataggggacccctccctaaacttgaaatcaagaacaagatcattacatctaacagacttagccaaaatatcagcttgcatattgtcttgcattagttttgtttagtatttctgaatcgtgccttttct

SEQ ID NO: 214454 - DNA, 374 bp, Cannabis indica
tgtattctattttttttttcccttttatctaacatttcctatctttaatttaaataaaaagaaaaaaaactaaattataattctaattcagccaacaaaaattcaaaatccatataagacaaaactaaaataatacttggtaaaatgactattttacccctcccttaaagcttgagttataacttaacctaagggtattttggtcattttctaactttcccgatttaacctacttctcaacattttaaactagttcggtataattccaatataacacaatttcaaccatcgtgacatttctgaccattctgtcgagttccacaattgtcacgcccgaaaatattttattcgaattatggtatctacgataccca

SEQ ID NO: 214455 - DNA, 892 bp, Cannabis indica
ttacctctctctgcaatttactcacaaaaacgaagaaacaaagaaacaaagaagaagaagaagaagaaaagagtgtttgtttgtttgtttgtttggggttttagccttggatcaaatcaactactactactactatcatcttattccaccctaattaccaatttacccctctctttactcatccttctctcttccattttttttttaaagggatcttaagattaagtattcggtttcattttattttaaaaaataatttttagagaacattattaactatatataaaaaattgttgaacactattaacactcaataacaatattttataaaaaaaatattgtcttaattagttatgtttgatatttaaactataccaattagtatcagtaaattgtaatacttttaaatatttctcctttttattaagtaataaaggaagtgtgtgctgcctaacttaactttttaattaaatttaaagtttgttttaattaatagtgtatcacctctaagttctagcctatgctcataaaaccaaataaaatgtatataatttcgtcatgtaatatattatcacaatttctaacaatattaagatttattattactattattagtttatcacatacaaatgaaaattatatttttatattattgagaggaggcaaagctatctcatcatgtgaacctctacgtagtttttttaattccaaacaataaatacccaaattataatcaaatttatccatgataataagatgatgatatattttcctaattctaatatattttttccactatattatttatttaaatgtagctttttaataattgtaaaaaatttggtaaagaaattataaaaaatgaaattaaatcggtcttttctagctttag

SEQ ID NO: 214456 - DNA, 523 bp, Cannabis indica
atgtaaagctcggtaaccagcagcaactagacatctgtcttgtgccgtgtttatggcatcaatactcttcatttgttctttcaccattacaaatttcttccaataccaacttccttggtctgtaggtttatatgtccaccaatcctcatccttgatgtagacattatgaacccatttaacccataggttatcttccttcttggcaatagcccaaacatatttaaaaagggccgctttgttccaattcgatatacatctaaaccccaatccacctgaactttttgcttggcaaactgatgcccaagcaacggtaggaactcctgttaaagtatattgtccattccatagaaagctacgacaaatagactcaatttcacttacaattttcttaggcagtaacatcacttggcaccaatatgaatgtatagccatgagaactgagttaataagtactacaggaccagcaaaagataaattcctcaagctccaagttttgatctgagccatcatcttttccaccaac

SEQ ID NO: 214457 - DNA, 840 bp, Cannabis indica
ttgttttaattttaatcttgattatgttcaaattaaattgtaagttattattttaattaatttccattaataaaattaatgatttattgatttctattaatgatttattttaattaaagcaatattaggttaaaccgttttagtagacacatagggataaaaccgtcaaagcagaagtctacgccgacgacttatgtttaacattttttatttaattttcattaaaaaaataaaatagtatttttattaattgaaaaatatatatatttattgattagatagagtttgcatgtgctgacacccgatttgacgccaccaacgtgtccacccaacgcagagctcgaagcaaaaacgacaatagcaaagtgggccccactcaccaccatctaacgccacgtgttaatccaagccacgcccccccaaaaactgtttggtgagatttaacggcacaacgtgttccgtatttattcttacttcacttcacgttacgacgccgttaaaacccctgtcgtggcgttaggtagcaaccaagtgtgggggccgaagacgactccaacggatctgctgacggcgaccgttaacttccctctcgtccacgtgtaccgttgcatatgaagaggaaactaacacagccgtctcggaagccattaagattgttccacgtggacgactttagaagctttgagaaactaataagggacacctcattacctttgcgctgtcttgtgggaccacttgggtcttggttgtttcgtgggaaagtacaaaaatgtgggaccaggcctcgactgtgtggactttgatgaactccagatgtgaatttaatttgtacacgtcatc

SEQ ID NO: 214458 - DNA, 704 bp, Cannabis indica
gcgaaatcggattagtactaatgaagtaaaaataagtgaattagattaaatgaacaccctattataaaaatactagacaacatgagtgctcaaagagaattgctaaaaggtacccttggtatttagataccttcttcgatattatactgctattagtataattaagtaccgaatctcatacaatttaaaaaaataatatttaaaaaatatcactagcactcaaatactactatgcctaatagcaatgtttgtgcccaaagcatttctcatatctgtatttgaaaagtcaaaacttttgaaacacgtcccactttttcaacagcatcttgataatttttgtaggataaattttaattacacgcatattactctaattactaaaattttattataatatataataatataaatatcccacgaacggggttatgaacataggtaaattataactcagtattttttaactcaaaatatgaccaccacaatgtgtttcatattttttttaaggcatgagaaattggttgtaatttgaaatataattttcaaataataaattaatttaaaaaggtgtacatcttatcattctattattatttcttaatctctttttattttattttcatataaatataaatgtttttggaatttaaaaacggttgaattgtattttatatgtgggaccctaatattgggttccaccgact

SEQ ID NO: 214459 - DNA, 191 bp, Cannabis indica
gaaaaggaaaatcaaaagttataactcacgtataaaacttaatattaacggttcacgcgagctaggaaaatgctaaacgaggcatcacgacgccttgagtaaaagtactcgaacctagaaatggatagagaatataactattacatacgagcaaattaaaatgtacatagtgataaaatcattaaagtata

SEQ ID NO: 214460 - DNA, 540 bp, Cannabis indica
ggtgtcattgtttcattttatgtgtccatatttaatttatttattctttttagaattatttgtcaaaaatactatatccaccaaaaaaaaattatttttccgtagatatgatatgagaggagagatatgtacattttttttttggcattgttctttaactttgccattaaaaatttctgagtctcaacctttatattttttcttttaaaagaaaaaatatcaaaggctcttagttttggttatagtttaggttttttataaataacttttaagaacttttagaaaaaaaagagggaggagaagaaaagagaaatgaatgataatttttttttgttttatttaaaatgaatgacagtatttttaacaaataattatatacgtaaaaatataaataaaaaataatatttaatgtacataaaataaaataatgacacatattaaaaaaatgattttacataaagtcgttttttaatacccctacagaatcattatccaatattattatatccatcctactagctagtactaattaattatatt

SEQ ID NO: 214461 - DNA, 635 bp, Cannabis indica
aatttagatctgccacataggtactgacctacacttaacggctaggtacctacgaatattgcaacaaaagtataacaggaggtatttttaccgccaaaaaataacttagatattaatttgcaacttgaagataaacataagtattatcgctacaaattattctactatatttgataaaagagttagtaatatttgcaaaaactataataatattatttatttaaaaattataatactaaaccatgttgtatgggtcgtgataattagagaatgtaactgggatacaattaccttcaactaatttgaattacacttaatttcaatacaatgcaattctaaatacacatttaattaaaacaaataatggaacatgtctttttatatatttaatttttttactatatttttacaaaatagtattaagatgtccattgaaactgaagttatgagatgcacctccacgcgtgcactttaggttgctttggaaaacttatatggagctcaatcttgtgctaagatggatgacactcgaaccaaaattcaaaccatcaggaaaggaggtacatcaatggctgattaccttcgacaaaagagagattgggcagacagttgaactcttgtaggagatccttact

SEQ ID NO: 214462 - DNA, 1254 bp, Cannabis indica
tttattttttatttttttatttcataattttatacgttgtagcaaaaaagaggaggcatctctttctccgagacattttagacataagtttttaaatttttttgaatagtttatcatgccaaaaataaaattcaagcattaccatgtgtataagaaaaaacagtcacgagtgtaacaaatatttgaaccctattttcaacacaatacatgatcattaaaaaaaaagccaaaaaattctccttaatgccaagctatgttatccgtgttttcgacaagggacacgtgaaatccaggtcagcaccaaagacccaccagtaggtcccaaggaagataaatttgggccaagcccaagtcacacaggaccttccagaaagcaacttggttccatgaccagatgggcttttgccagtgacaagtccatatccgaaagtagctccagtaccgtgatgccggaaggtcagacaacatgttcctggaagatcaatccagtttctcttttaatttaagcgcacagagtaagggagtaaatgctacttagatcacgacagaagatcgtatcaagataaaaggaaaaactacctaaaatagagatcaagcaattaattcatgaataattacccacaattataggacacgattttgaccaattcaatcgtaccaatctgtctaatcagcagatgggctggcttcacgagaacaacacaattatgtaatttcatgtaaactctccttgtgctcatcttgaaactgccaaaaccccaaaatgtaaccacatcacaaaaacacaaaacacgcacaaagatatttcccgaaatccataccggccttgagggtaggcacagggtcgaccttaggtataggcggggtaggcctgcgctaaggcccactcattttaggggcccacataaaaaagtacattttaaaaatatacatatttttaataatttttaaaatactatttatctttatagtaagggcccaaatttttttatctaatggtccatttcaactcagggcctgccctgcgtagacgagctaggcgtacgtctcgagccccaaaattatgaaaaaaaattattaatatataaataaaatattaaataagatgaaagtataacaaaaattgttttgtgtagtggtaaagaattttactttaaattaagagatcaatggatcaatttccaacctataattttattttttaaaaatatttaatgtgtagtaatgaatgattgaactttggagctcttaaga

SEQ ID NO: 214463 - DNA, 992 bp, Cannabis indica
atattttaaaatatgcccaatgtgacaaacataaatggtccaatggaagagacaacaatatataactttactaaaactacctaactagagtcatatttttattaggatttattaatatttgtattagttgtcttaattattgaataattatatatttatgggttgatacaattttagattgtatattttgcaaaagttactaattagacttctattttattaaataataaaatgaactctatgttttttatagttcaattttagattattttttttaaaaaaataaccaacttaaagataattcctagcaaaaagagatacacaagatgtaaataattttgttacaacacatttatattattaatttttattttaacaaaaaataagttcagtattctatttagtactattttaaaaaatatcacaaccaatttatcatttaataaaataatagatcaaatcagtatcttttacaaaacaaatttaaaatagtatttaccctatatttatatataaaaataaacttttttatatatatatagctttttgtcttagtagaaatttcgttgtaagttattaaataaataacaaatgataccattattgaacatcgaagcaccagtggtctagtggtagaatagtaccctgccacggtacagacccgggttcgattcccggctggtgcatactactttttgtttttccttcatctttcaaacagaaagtagaagaattaattccagcacatgaaactccaaacttcacccaatttttttttgtttaagtaaaagcgtgcatatatataaatgaaaaagcagttagaccttgcggacaatacaaaagagctcatcgaacatagagaatagtggcaagaaactaaaacatctgtttgggaaaacgcccacttagcgaaaatacattatctaaatatatgttcaaaaaatcaaaccgataaaaacttagatgtcacgtttatctgtttactacgtaat

SEQ ID NO: 214464 - DNA, 804 bp, Cannabis indica
caaaaatactcatttttggttatttttacattttcactgtcatattttctaaaaaatatctttactgtactaattttacaaaaataaaaaaacaacttaaaaacaactaagacaactaaaaaataattctaaaaacaacttaacaaacaacatgaaaaaaaaaaatataaaataataaaaagaaaaatacaaaaaaacaaaaaaaataacaaaatattattaaattgtaatgtccaaataatatgtttttgaattatgaaattcttttttttttcttagttttaacaatttgatttatctttttgtactactacattatttttcatgaaatttattgttacaacttcatactttcaacttttttttctctctcaatatctactactgcacaatgtgtctaaaaaaacaaaaaaaattatcattgtatttttaaaaaaaatgtgttaagaaaataaactaaatacatgtatctaaatctacaaagcaacatacatacaacaaaaaaaaaattgtcaggaataaattaaaactatacaccataaaaaatacatatgaataaaaaaataactaaaaaataattgttcaacacaaaaatattctaaaaaactacttaaaaacaacataaaaataacaaaacaaatgtagatatatacataaaaaaaatggtatgaaataaactaaaactatacattatataaatgcacataaactaaacaacaactgtacaaaaggacacacaaaaataacagaaaaataactatagaacacccaaacaacaatctaaaaataactataaaacaacta

SEQ ID NO: 214465 - DNA, 866 bp, Cannabis indica
aatcattcaattcattaacacgtgtaacttaccaaatttagttgaatataaatataaaatattgggaaattttatggtgcaccagcacccatgtaccccttttgtgttttttacactaataaagttttaaacttgattatatttataagagaactgttaaagggtaccagtggtgcttagcaagcaccttcctatgtgtcaatattgttattagtccaactaagtatcgggttccatataatttaatataatagtttttagagaatatcgctagccaatcgcaatgcgacatgtcgaaaaaatgttaggcaccactggtgcctaataatagctaatagcaatgctatatatataatagtgtataacataattatttaagacattaaaatttaatgcatcaacaataaagtttaaataatttattgcaattttgaaaagaaaaaaaaaacaatttgtttagttcatcaacttgtttccaatcaattgtaagattcaagttttttggccttgagagtatctatttcagtgttcatagcacatgaccagccaacatgacttaaagcagcttcaatagtgtggttcatcaagaatagattgaaattaggcttgagtcaggtaggatttgggcttgaaaatgccttggctttggttatcatgaggtgagtaggctgatatggaacaagtggttgtggttgttcaggtttaggttaaggaaatatttggcgaggctcatatagtggttcatatggctcacgtgtatgctcatggtcagcaaacataggtatgcccctactgaactagaaactaaacttggtgaattatgagcaggagaatcatcaaaatgtaccttatgaggaggagaggtt

SEQ ID NO: 214466 - DNA, 773 bp, Cannabis indica
atttttatgttattttattattagatttagttgttgcattaaatattttattattattttttatacttttaataaaaacattaactaaacttaaattctgtatcaaattttataattttacattagagcacaatactaaaaattgatataaatcaaaaaattttttttacttgtacaattttgatatcttatgatttgctttggtacctattttagggcccttgttactatttttttcagttaaactacatgagttcatttcaaagactagtttttttttcgttctttcaaaaggaaagacagtagtacagtatccttgggagcagcgttttggaagttctcgtacatttattagggaatccaaattattttatttttaggctgtctttcttttcttttcctttccctaaaaaatttagattatgtttaatatttttggcctaacaaaacactcaaaagttaaaggctggtgacggttacatttttaaaacggcatgaaaactgaaaaacgacaactaccagaattagacatcagcaaaatgaccaaaaactttgcaagattatcatagagttataatataataataatttgttttgtgttaaaacagttatttgaagattatgtttctttgttaccaaattaacttggagtttttcattaattatattcagctgaagccaatcgaatttttttaattgcttaacttggagtttttggagtttttctttgttgtgctttattaattttttttgtttaaatatttattaaccac

SEQ ID NO: 214467 - DNA, 406 bp, Cannabis indica
aggagatgaggggcggctgctagggtttctaagatagaagaaaacaagatggagagggaggctgaagtatttttggcttctagctttgaagaagagtgattttgttgctagggttttcatcaccaaaaaaaaggggaggcttttatactgtcataaaaggcagtagggctttgaaaaggaatatctggttttgaaaagggaatattcccttgtgatccgtacaaagggagaaagacatttttacccctggtttttgactgttggggtgttgggtgtaggggcactttcgaactgcataatttcctacaagggaatattcttttgtgatccgcacaaagggagaaagacatttttacccctggtttttttactgttggggtgtagggtgtaggggcagtttcggact

SEQ ID NO: 214468 - DNA, 728 bp, Cannabis indica
gctaattccagagaacgcgagccctcagagggagccagtgtacaaggagccatttgagaagcgaaaagagcggataaacaaacgcttttccaagcagacttctcggccaacatcaggtaacatatcgcatgtataaactagtgcattaagacttattgttatttatacttatcttctcttgtccttgcagagatgactttcctgaagtccggaccggttctcaaccgcaagccaaagactgaaacagcgacgacatctcctatcgttccccagaagagaaaaagcgatgttgtggctacccctaccgcggattcctctaagaagccagctaagcctacgcatgacaaggggaataaagtcgtgatcgatccagctgttcgagctcgcgatttcctagttctgcaggaaaagtttgtgggcgaggagttcatgtccaaggtagagaggactccttctaaggagcttatgcctcgctctgtggagttggcttcgcaatccatgaccatgctcttgaaggcctttgctattggctccaaggaagtcgaactgttaaagaggcagaatggcaagcttcaggagagcatcaagaagctgaaacaggaagcgattgacaaggacaaagagcatgaggaatttcgtaagcaagtcgaactccaagccaggaactcgaggtctctgactacatctacacgtctctttcaaagattccagacttcaacttctcgatc

SEQ ID NO: 214469 - DNA, 708 bp, Cannabis indica
caaaccagcacggattctaaaaattataatgatgaaggacacacctttttacctcagctaaatgccctgcaatatcagcaactattgaatctccttgccagtcaacaaacgggtatgccaaacaccgatcctagttcctcttcaggatcaacaggtatcgtgttatctcaccattatattactcatgataatggttcctggataatagattcggggactacccaacacatatgcaacaacattaaaatgtttcaatatgtttccaatatgtgtaagaccaggttaatccttcctaacaatgattctttgtttgttcatcaaagcggttccatagcagtaaataagtatcttactttgactaatgtactgtatgttcctaattttaaatacaatatcatatcggtcagcagcctcactaatagtggttctatttcagtaaaatttaaatctaacaatttctctattcaggacaagcacaaccagagggagattggcagaggtaaggccatcaatggactctatgtaatggatgcttcaaccaaagattcctatgctttctctgtgactgctgaactttggcactcaagattgggacatccatctcaaaaaaacacttgcccttctaagtgacaaaatagactgtaatgttagctctttacataaaaatgaaccttgttatattttccctttagcaaaacaaagaaagct

SEQ ID NO: 214470 - DNA, 560 bp, Cannabis indica
tttctttacaagtaatgcaaatcaccaagttcctacaaacaaatggttattcccaaggagatggtgttccaaaattttctttgcctgtttctggaatggttactactccttaaattatagcacctaaaagagtgaatgcttgaaatgtgtgacagccagtagtcccgatccgtaaggggaaataccggttaagttgtacaatcccacattgtctggggaaggtcaagtgggatgattctaagactgtgtaagtatgagactacacagttgaaaaaggcttaaatgaattgattggtactacatatatcaacaaagtacattttgttttcttgtagctcatcacaaaagaattctatagttaagcgtgtttgacttgggataatttcaagatagatgacatcttgggaagtcctcccaagaagcgtgcgagtaaggacaaagcacgctgaaaatacttgtcttagtttgtagggtcagtcatcaatctttccaagccagacataaagcgagggacgttaaaaaacgcaaccaatatggaacacaacacatgaaaattctgg

SEQ ID NO: 214471 - DNA, 642 bp, Cannabis indica
aaatttgttaaagaaacagataaaatttataaattaggtaactaaacaaataaaggaagcaataaaataagctagcttcaaatattatatttcacaatcagaatgacacgtatgctcgatttgagtctgttagtgaaaatgcttatttcttttttctgtaaattttaggaggatttgtaacaatgatttcaataatgcagcttatgtgcacactgtatgtatatatataagggagaaattaagattgaaattttgagaaatttttatttgtatatataaatatttcttctcacggatatactattttttatttcaatattttatttgaataaagtaatataaagaaaaaagggtagttacactgctacactaatgaaaaagggtacatcaaaagattagtcaaaaaagttaagcttaaaaagaaccaatgtctattatatagccaatatcgtagaaacctcattaacacaactcgacatatccactcaaagcaccaattttaagaacctttccttcattattgcaagatgtaaatgtacacaaattaaccagatcaatcacatagtaattcttacatacataaacatgtttctaaaatataaattgtgaagaggaagaagaagaagcaataatatcacacct

SEQ ID NO: 214472 - DNA, 529 bp, Cannabis indica
catctgaaatcatagaaaagtaaaatcaataaaataagattagcataacgatacaattagatttaaatctaaaactataaaaaactaaaataaaattatataaagcatgactgagaagaaaaaataaatataaagtgacaaaactatgaactagaaaaatcaaatcaaagaaataaaatgccacaactcataatgaaatttctagcaaaaaggaaaaaaatcacaaatgaatacctttcttgtcttgtgagagcatgttggtggcttgtattgctcctaatggtgcgactaacaaaggattcgtggagagagggaactccggttggcgacgcaacttagatatttccaacaaaaaaaatagagaagaaacaagtgagactgagattgacaatgagtctctttacgataaaaaaaataaataaaaaaggtagaaatgaggaaagatgagttattaccttcttcacgcccttgtgtgagttttcccggccaagaggtggtttcaatcgagtcaagaacgagagagaggcag

SEQ ID NO: 214473 - DNA, 568 bp, Cannabis indica
gccgcgtgaggattgagcaagagggagagggtatcagagagagagtgagaagagaagactttatgttagggtttttagtttagggtatactattctttttattacccttttttttttttttttatttttttttaattactgaaacttttgttatttatttatatttttgtcatacccttaagtcttggtttataaccaagactaaagattattttttacatatttttttgttgtaccctttaaatttgaaactttttttatgtattttttttattaaatacaaatttattttattaaacaaaaaaaatacatatttctttttttttgttatacccttaagtgtcgatttataaccgagactaaaggatcttttagttcggttataaaccgacaattatactcaatctatatatttattgtttttttaatttttttttctcggttatacttttagtgtcggtctactaactgacacttaactgaaacttaaagtcattataggtgtcagttgtaaacctagaccaaagagttgtggtggtttttagtgtcagtttttcaaaaaaacgtc

SEQ ID NO: 214474 - DNA, 610 bp, Cannabis indica
gagtttttacagggttaattatggcattatttgcagcgccataagggaacagaggggacagtgaaccctctagttctgatcaaattacttccgagagtgaacatgattagcggatcataaaaaaatgagcccttatttaaaaagaaatatatatttttcaaaatcaataaaaaaatataaatttaaaagatttttttttgaaactctatagtagatggaccccgacagagtaaaagaaattccattttggttcaagtctaatatatttcaccaactttaggtaaaactattgaaatttgtttccttttcatgttgtttatttaattgtgactgaaccacctttattgagagaaaaaatattttagggcaacaacttcaccgccaaagacgtcaccgccgccaccacctctcacctaaagaacaatagaagatgggccatcgaaggagttagatgagagaatggttagaactagcattctttggagattcttgaaggaggcgtacgaagacctcaagatcacgtgagagttgcttctaggaccaattttaagagtggactagtcccgttttcgattgacagaattagaatattttccatgaattgcttatt

SEQ ID NO: 214475 - DNA, 859 bp, Cannabis indica
actacaaaaatgactttttgcttaagttataaaattacacaaaaacattttgtgtcggttgtataaaccgatgtaataatagcagacgcaaatagtcaagttatttgcttcatttctaaaccgacgcaaacttttttttgcttcggttgagaactgaagcaaaaagtatgctctattagcgtcagttcttgaatgaagcaagaaacttagcttcaaattgtaaccgaagctaattagattattgtgtaggttacaacttaacacataattttacacaattttttttactttttgtgtcggctataaaatgacgcattgctgtaggtaggggaaaattgtagatttctttgcaattttccgcacctgcattttcagacattaaaatttgctttcataacaatatttatatggtataaaaaaatatttatatgactaacaataacatttataatataataatgataagatttttcatgtaacttagaaaacacaaacatttcaaataaataaagagtttcttagcttaacaacatagtataataattaaaggcctaatgtagaaaaaactatacatatttatacaatgagttattaaacagattagttaagtcaagattgtcaagcttatctccagaacaattcactaggagaataacaaagatttcaataaccccagcaaaaaaaaaaaaaaaaaaactctttacaaactgcgtgtaaaacaaacaaaaaccacatcaacattaaatatgaaatagtgtaattaagtacctggtaaaaaaaaagagtaaaacacttatgttatacacacgaacactaaaggaatctgtctaccagttttaagttcatattaccaacatca

SEQ ID NO: 214476 - DNA, 1014 bp, Cannabis indica
gccttctattttattaaataatatacagaccttatattttttaaaataatacaaaatagatactgatcagcttaattttgttgaattaaaacttaatattaatatgacatgatgctattatgatcattttagttatattttttttgtatctgttcatgctagaaattggtttcaggttttatattaaaaaaaaggacaaaaattgtgttcagtgtctattgttatcattttaaaaatataaggtttaattgataacttttacaaaatataaattctaaaaagatatttaccaaataattacattttagaaaaaatccaatataattttaaatttttaaatgattataattaatatggtaaaaaaataataatctatatatctatcttgtatatatttatagatcatttatttatatatcttgtatatatttatagatcatttatttatttttttttctacatttttaacattatttatttaattttataaaattttattgatttcatcactctagtgagctattttaaaaaaaatctcatattgtttagaaataaatgtggtgttgcacttagagactatttatagattactatttctttcacttttgcaaagttaatattacatagttttaatatgtgtaattaatgattcttgcttgcgtagttataatcttttaaaataaatacaacatatattcttgaatttttttaattttgtcaaaaatttctttaattatttgtaaccaaacaaaaatattttattaaaattttggttattacaatttttaagttatgttttttatgtaatttaataaactatagtaaaatacttaacaatttcaaaaagaattaaaaaatataagtatgcacaataatttataaataatgtatatatatctaaaaacataaatttatattgagcacttaattttatcattaatcattctgctaaatgtttatcattttaatagtatttttatgtctaaaaattaatattttatataaaaactaaaa

SEQ ID NO: 214477 - DNA, 556 bp, Cannabis indica
ttcataaagatgaaatacgatgatatcacactactcgtacaaacctcttagttgggtatggtaatccgcaacacttttaggaacactttaatatttgaaagtaagattggatttaaaggattggattatttttttcaacaaattttgtcaggggggttgaagaaaaattgaaaattaatccaacaccctagctattccacctagaattgaataactttatctcatgaaaagcttgagataattttatcctctccaatttcctatcttcatgtaaggaaaaaaaaatactattttctcataggcagatatgatcaactctcattcggattttttcttatatttcacgatccaattacatacaagagtctcctgcttttcaagacatgacttcaagactgcagctcagtataatttaagccaaaaactgtacattattgtctaacatatcatgttaaacttaccacaggattcggtcttctcctttagaaaattctcgtttagcttcctcgggttctagaatttcttcctcgctatcactgcatatcaaagcctcact

SEQ ID NO: 214478 - DNA, 997 bp, Cannabis indica
aatgagagaattaaaaaaaaaaaggagaaaataatttaagagtaattttagaacatcacgacactatttacttactttttttttttttgaacgaaactatttatttacttattttgaaagccgtcacgccactactttattgctgagctttatatatgtatagataggtgtaaaacttaaaagcatgtatgatataaaaagctttttttgacctgccacataaatttgagaagtcggtttttttttaatagtccaattttttcatcaataaaacagaacaattaataaaagtcaattcttattataaaaaccttacaatcaaaaaaaaaaaaaaaaagaataccaggcaaaatattaaacatatggacaatacatataattagtattataataaaataaaatattttgttagtaatacataaagaaatatatatggggtgaactaaaaaattttactaacaaaacacacaaatataaatgaaaaaaatatagtctaaacaaagtgtgttgtgttcaattaagaaaaatataattatactgatatgaggctttttatttgattcgaaagataaataaacaaaaggatgagaataaaaacaataatctgtacacgggttgagctttttgagagagagagtgtgtgtgtacattgatgttggtaaacatgtgtctacatatataattaagctttaaaaaaaatagccatgcaattgcaaacgtgatatctttaattaaaaaaaaaaataaaaataaaaaataaagagaattaatagaaaataaatagaaatatatattttatattaattaatatttatgaaattaataaaaaaattaaaagaagagaaaattaaattagatagattttagaccgcctcatacttcttctttatatatatattaaatttctttagtattaattaatcaaaaactgaaaaacaaattacaagaatttgttaagtgaaattgaaaaaaataaaaaacaaaaaatatacccaac

SEQ ID NO: 214479 - DNA, 576 bp, Cannabis indica
ccaatttttatgcccgtgtcacgactctaggtcccccatcaaggtccaagtcctaggtcccggtctgagttcgggacccaatcggggttcaagtccttgtccgagtctgggtttgggttctgatctcaatatgtatccagatctgggtttgattctcggtccaggctcgggtccgagtcccgagttccgatctgggtctaggtttcgaggcccaagtctaggtcccaaatgtaggtctaggtcctaggtcctgatctgggtccattcaggtgtgggtccttctcccagattcaatttcgattcagtgtctaggttcgagtttcggtctgggtctgggttggggtaggaatcctggtccgagtctaggtctgggtttgggtccagttctagatcccggtctgggtgtgggtttaggttaggtccaagttcgggtcctgggtgcgggtcctgggtgcgggtcctggtcttggtctgggttagggtctctgtccgaatcaaggtctcgagtttcaatctcggtctagggcttgtttgggtttaagtccaggttcgggtccagatccctatctaggtccg

SEQ ID NO: 214480 - DNA, 909 bp, Cannabis indica
attattattattttttttttgaataatttatagttctgaaaataagatttacatattttatttcatcacacgtgactatttttctaataagcaattatttgaacttttggaaccgtaaactattgaatttattttttaaaaaattcaaattaattttaaatagcaataacatacacaatcataaataaaaatagaaaaataaatttaaaatctctctatataccaaaaacggttagtagagatctacgaaaacacctatttttccaatataatatagaatatttctacaatgcacccctaaaaggatccaccgatacaaccgcctatttgttttcttttagtctaatttttctataatcgtctctacattgtagttatttaaaacaatttataaaattttaagagatttaaacaaatttaacacgttgaaaacaagatttaaacattctattgcacacgagactattattttatacacgtgtaaaataaaccgtttaaaccctattttcaacataataaattttttaaaattttataagatatatcttaaaatataaaaataaaaaaaaagtagcatagataaaccaattttagaggtgaattatgttgaatttttctataatatatatatgataagagaaggttgatggtttggtaagatgagtaattgcttctattattgagaaaatgatggctactttttttctctctctcttgaaaagtagaaattgtcatgtttcgaaaactaacataacacatactaataataaataataataataataactcaaactattcattcactcactcactcactcactatcctttctcactgcaaaaaactaaaaaataaaaaaagtaactcgtttctcgtgccacaacaacaaacgtactttttctttcttcttc

SEQ ID NO: 214481 - DNA, 695 bp, Cannabis indica
aaatccattatagtgatctgcctctttcacaagttcctcctcaaactccaccggcttcttcttcctctcccatcatttcaacctatgagactctctaattaacctcaaataaaataaaatcttaaaccatgacagaaaaaaaataatatatatatatatatgatccaaatttaatacaatctatcatcttcaagaaataatatatatatgatccaaatttaatacaatctcatcttcaagaaataatatatatatatatatatatattggagaaatctaaagtgatctcttttatctttacctcatagtataagaaagttaaatggaccattaacaatacagaaaagatatattgtatatttgatattggtgcactcttttacatctggtttttactttaaaaaaaaaacctacttatcaaatacagacgacatggtgttgggtttgtagctttcaaaaattttaataagttaattacaagctattagtgacactataaatatataaatatattgtatttcaataacaataatatatatgatgaaaaactcaagactataattattaaagatctaaaaacactaaaatataccaatattacttgtcgaattatatattttaaattagaaatacattctcttaaaaaaatatataataatatttttacctatgaatttatgacactattaaatgat

SEQ ID NO: 214482 - DNA, 617 bp, Cannabis indica
atggggaagagagagagatgggggttgagttatgagagggggtagtattgggttttagataaaattgtcacatattttcaattttcatatatattcaattagagaaaaaattatcccccaattaatgcatagatattcaaatttccctataaaaatgagagatttttttaattagatagaaaaatcaagcataaaaactcaaaatattctaattttactcatccatgagtaatacccattaagagtgcacccatatatatatatatactaatttttctgatgtgccattgcgcatttcacttgtggcttttttctgaaaaaaataattttattaaatttatatattttaaatgaccatataaaaatataatataaaatgaataaatatcacaataaatgtatattttaaaaggaattaattatatttaataataatttattattattatatagttttatattataaatcatttgtattctcattaaaaaattagatgaaaattatttaaacaattaataatacttttacttattttagaaaactaaacaaattataattttgttgtttaattattagctataagtataaagtagtaaatttgtatttttttttaaaa

SEQ ID NO: 214483 - DNA, 883 bp, Cannabis indica
  modified_base (831)..(831): a, c, t, g, unknown or other
atgcaaattttattcaaatagcgatattaattcaaaatatagttgcaattctacaccattaattacaattggaagatatatatcttaaaagcacaaattaattaattttgcataaattgaatctcacatttaacttgatagcatatcatattatatatcataaatcgacaaaatactgctattggcaggatgtagtaaatgacatacaatataataaatatactaaaatattaatagcctaacttacataagaaaaacatgactagacttatataaaagatactattaactttggaagaataatttaataaatgagatatggagatgaagcacaaaagaatcaatatcaatattaagaataaaaagtacaatagctacactctaacctcactaatatttctaaaatagttcactcatttttgtcacataaaataagtaaaactaaaagagaaataaaaaaataatagaagagtataattttactactctagaaatctgatgactttctcaatacatttggctcctatttatagcgagaaatatgctttttaggtgtataagtgagctattagatagtggaggaagtggctccaaaaactgagaagaaattggtcacgtagcaagcacacaacaactatacattgacacaagaaataaaaatggaaacgtggtgcactaccattctcttttttcggcttgaaatacgacttggttgaaggaattatcaaattgatcatatcagaacttgggcctatgtgaagaagttgcttactgggccgtacatccaaggaaacatgttcaattaacatgattacatgatgaatgaaaagntggtggctacgtttttgacttctatgttcatttcctttttagtcttccatgg

SEQ ID NO: 214484 - DNA, 1195 bp, Cannabis indica
ttttattttttttatctactaatagtataactatttactttaaaatacttaccagttggagatgtctttttatttatttttaagtaaattttaatttttacttattttttttacaaagaagttagtttgttaattttttaccaaaaatggaaacctaaattagtgtttagtggtagttgatttttggagcacgcatctagttaattccctattaaggcgggcgtgagaatcgaagagtgcacaaatttggggaagaataattttcaaagtcagtaattggtggaccgtgaaatgatcagttttgtgctcttagttgaatcatctgcatcagatgtgtgcgtatccatcactcttatgaacttttgcatgacatgattgagtagccaaaaaggatttcttagtggatatttaggtggcaataatatttatatgattatagaaatttggaaaattcaaaaacaactatatatgtatataataattactatccatgtttcaaagattatattataaagaaaacaaaagaaagcaatctggaaactgtgtagtcggaatcaaccaaacatggcaaatgattttctgatagtacataataatgaagcttgcactatcatcaatatacaaccaattaatggcatctatacatagtgtattctttttttccaataacacccaaaacagacccatggatggaagttttatccacctatccaatgctgccacctgttatattttaacagtgtgagatactagcaagtgcgtagtaggtgattattttcctatacatactttaatggacttttatataattaaaataaaaagtatattttttttatttttacactttaaaatattttttttttttgtatttttacggaattttacatagaaatctctattgcaactaacggagcaacctaaattgcaaccaaaatccgtatagcaatccacataaaaactaccggagaaaccactttaaaaacctaaactgtaaatttgaagaaaaaaaaaattaaaaaaattatatatagagtaatttcccttaaaataattatattacaattatatataaaagaaaagataattagaatatgttatatatagtataaaattattgtatagtataaaattattgtattcattaaccttctaaatttattggtgttattatgtatatattaaagggtaaatatta

SEQ ID NO: 214485 - DNA, 774 bp, Cannabis indica
gttgaagtcgaagagtattggaaacaccgaagagatccttccgttcgaaatttgatcagaggagtaaaaccagtattcttgaagtgaggttttcataaagaaactttgaagaagtgaagtctttttttgcttaggaatttttgtttctttgaaactgagttaaaaacaactttgattattcctgtaatatttttgttccaaattatttttgatttaatagacttagaattttgctgagtgttattatgcacagaacatgggttattttagaacacttgaaagagatttcacctcggcaaatgtctttttgttttacaaaatcctttgtatactttactatgcataacaattactaacatggtcttttgcaaaatgataatgtatatagaaagtgtattgtgaaaagcaatttataaattaattaaaaggatatttttgaaaaatttctttagttgttgattgagtaacaattcacacaagaataaaaaaatcctaacttattgttcaaaatgaatcaattgatatatagcacatagatttgacaatacaaaaataatattaacaatacctattaaagtataggtaatatgtataatttaatatgtcttcatcaaaaaaaacaagtacaggtaatatgttgtttaaaaaaaaaagtaaaaggtaaatatgcactatagagaggtgtaatgaaatagaaataatatcaataaaaaaaaaagaaagaaaaacttcaaagagaaaataagtagacttagcctagctgaccatacagtg

SEQ ID NO: 214486 - DNA, 612 bp, Cannabis indica
ttttatggtgcacctcacactcagaataaactgcacacctggcaattaatagatcgacttggctctactgctcggctccagccgtggctcattatgggcgatttcaatgattatctgtctctttctgacaaaatcggcggtaatatgtctcgtgctccatcagcgcaatttcaatcctttatcgacaatcatgaacttcaccctctcaccccgctaggtaatctcttcacttggactaatcgccaaaagcaaccaaatcatactcaggaacggttggactggtgcctatctaataatgcttgggatgccatctttcctgattcccaactaaatcatggcgatttttttggttccgaccatcggcctctcattctcaccttgcaatatatgaacggtcatcgtaaccaaaaaccccgcttcatttttgacaagctttggatgtccgaaccgggatttgaggattgcctacgcgatgcttggacccagactaacccgaatcctcaccccaatcctttaattggccttaaggaaagactcacaacctgctcctctcgcctcacgctttggaagcaatccttaggacccccgatagctacccaaattcgtaatgtt

SEQ ID NO: 214487 - DNA, 1067 bp, Cannabis indica
atttaattagaaaaatatctcatgttttcattatatggactgagattgttccatcggctgtatagaatatgataaaaaaaaattcagcaaaaaaatgataaaaaatttttgagttttacttaaatatttgtcatataaacttatttttgatatagtgtaaaaagatgtatttttttatattttctttaattaagtagctaatttaagcgtagaaattcaaatttctcttttattattttccatcggatcacaacctaatagtttattattttaaaattaatatttatagttaaatttagttaatactaggtaatacttattaataagtgttcgatatatatatatatgtttcggataaaaataattgcactatattttttcttagaaaataattgttgttgagaagtcaaatgaaaagccaataatattaatattgtatagaaaagtcagaaaggaaaatataaaaataaatagtaataatatgaattatttaaaataaaatagaaaacagatcgaccccctaactacttacatcaaacagctaaggttgtcggatatatttggtgaacgttttttttttaattattatttttatgaatctttattttggtttaagcaccctgattgaacatctgttatatttaatactgttgatttaatttaattaatactattttactcaaaaatgcaatttaatttgcataagatctttacaacctgattgatctcttccttaagatttaataaaaaattgatcaaagatcgtaactttaaattttaactaacaacatcaacaatttcaaaatatcgtattttatgataaaccgtttcttgatcctttaatttcatagattgttatgcctagttgagcacacaataaatcgaccagctttaaatttttcgggttaaaacaacaaacttcaaccaaaaagttagaacaaacaattaatacaagaaaaattgaaataatagaaaaatataaagtgtagaaataaaagatgaacaccaaaattttgaagaaattcaactttctctctctacaaatgtagagagcctatataatccct

SEQ ID NO: 214488 - DNA, 542 bp, Cannabis indica
cttaacatacatatatcaaccccttcagcttctacaccctccttttgcataaatatcaactgcttttaatggctgcccacttcagacaaacccgatcataaaatccctttttgacattttatcgaacaagctcgctacatcatttattctcccacacttggcaatggcatactaaatacttgctaaacttattgacacaatatgaaatcagcacgatcctgaaggtgaaggtacgagcacgatccaataaaaaaaaatatagaattaggcaaaacatgacacaatgttccaaattggtacgatacgaaaaatataaacttaagtaggacacaatattataagtccagagacatgacctgtaaatatgaaaagactagtctaaaaatacaaatatactagtttgaaagtccgttcaaaaatctgataatttgataataataatgataaatatttagttatcaattatatataaattaaaataatattaaatatttaaattctaataattataattttttatatgatcgtgtgtaactattgtt

SEQ ID NO: 214489 - DNA, 543 bp, Cannabis indica
atgaacgctgcgtttcatttaagtttgtacttctgccggcgcaattgggtgcgccggcaaaagtttcccacgttttcacttgggcaggaagttgaccgccaatttttttggcgcttttgccgacgcgtttatgcgccagtaaaagtgaaaaattgatgcaacgtgtcctttggtcaaagggcacaacttttgccagcgcaattaatgtcgccggcaaaagtcccacctacttttgcgcgcacgttttttcactgcgagggaaaatggaccgccttttttttctcgacttttgccagcgcagtttggcactggaaaaagtaaataataattaaaataataaatgaatagttttgtcggggcgctgtcatgcgccggtaaaaggttgccaacaattcccaccttttggcagtttggtgccaacctttgccagcgtaattaattcacttcgccggcataattgactattgccggcaagattaagcaccgtgaaagggtggaggtgggaaaaaaaagttgaccttctttgccggcgcatatgttgac

SEQ ID NO: 214490 - DNA, 503 bp, Cannabis indica
ttatggtctcttaatatactaccaaattagaagaaaggtatctatactttaatatctttcttcctaaaaatacccttacatttttaaaagcctctctctctctaactctcttactttaactaagtctcccgtctttaccccgaagccccaaaatccacaagctcaaccacacccgaaacccctgacaccctacccatcgtcagagtctcaacccatcactcgttttctatgtttttttttttttttatggttttccatttttgcaatatgttgcaatatttagcgattatatttacaatgatagaccaaatatgaggttagagatgaaatttagcaatgattagcgatattttacgtaattaacgatgtttagcgatgcttttagcgatgtatttgccatatgagactaaaaaagcatagtatatcgctaaacatcgcgaaaacttgagtgtgagttagtaacatttagcgatgtgattggcgatgtttaacgatttagcgat

SEQ ID NO: 214491 - DNA, 609 bp, Cannabis indica
tgataacttttattcttacacttttagaattaccacaaaatgatcttttttagctatgaatatagtaaaaattacattttacaataaaatgaaaaataaatatttaagtagttgtttgctagtattataaattgaaaaaagagaaattataaaaataaataaaaaaaagagtaatttgcagctaaaccttcccaactataattttacttggacttaaccctctaacctcaaattttggtggtaaaaccctccaaactgctgaaccattagcaaatttaaagtgtcatccatttatcttacttaactgctgacatggactgcctacgtgtaccattatgtacatgtggcacatttatattagtccacctaatataattatttaataattataaaaaaatagaatttattttaaaattaaaaagaataatttaaatttacaaaattattaataaataaataaataattttttatttaattttttatttaattttttatttttttttctataattttctctttctctctctttcccactctctctccatcacccttcttcttccttcccagatctgaaaagctcctttgaacccttaatttttcctttctct

SEQ ID NO: 214492 - DNA, 604 bp, Cannabis indica
ttagtgtatctaccattattaattgctatggagcactttaaagtgtcattgttaggcagattttatatagtttaatttagaaaaatgctaaaaggtactattggtgtttatcatctttctcattattatactgttattagtataattaaatattgagtcttatataacttaaaaaaatagattttaagaaatattactaactaattgtagggcgctcttatagaaagtgttagacactacttatgaaaggtgttgggcactactggtactcgatagcaatgctataaataatattaaaaattattaaatactaacaaagtgtattgggcattaaattgctaaatgccatttgaaattaatgtatgtagtgtgtaatgtaattatatcaaaaattatgtttattttagttttttgtttattatgtattagaaagtaataaccaataaaataattgtagtcataaatatagtttaatgattctatacttctatcttaagttcaaatctctcatccttcaaagtaaaaaaaaaaccaataaaataattaattaatacaaattctcattaaccaagaatatttttttggtatcatagaaataagtaac

SEQ ID NO: 214493 - DNA, 853 bp, Cannabis indica
ataatttttttttccgtagttacagaatgataaatactatattttaaattttatgttttgcaaaaattatcaataaaactctcttctcttaagtaataattaaataaaattctgtattttttaaaatagtacaaaataatattataaatttatttttgtcaaaaataaaacttaattaataataaacctatttagaggtgctacgacaatattaaatacattttttgcatttctttgttctaaaaattattttcaagttgattataataaaaaataattaacaaaaactactattcataatattattttatactatttttaaaatataatctaatttattatttaagaaaatagaaaatttattactttttataaattagagagttcaaaataatattatagtaaaactactatttaaccaccccaatccccataggccttttaccctccaatctctctcttaacaagaaaaaaataaaatagtaggcccccctgcaatatctcagattattgtcaatgacctgagaagtatatgtataattgtatatcgatatttattcttagtatttagcagtactataatacctgaaaaaaaaaaacactaattatattttaaaactaattaaattcagaaattttaagttaattaattagtaaacacatcatatatacgtgatagagtatgaaaaggaattctcacctactaataatttcatgtgcaaagaccatgcatgtttttatataataacaaaacaaaagaattggtaaaaaaactaaaaatgtcaacacagtacatgatatataattaacgagtaccactgcatctgcaactggtaattttgtggtcccacac

SEQ ID NO: 214494 - DNA, 1130 bp, Cannabis indica
aaacttgatatggagaaagcattcgaccgtgtggagtggaattttctctcaacaatccttaaccatctaaacttccctagcagaatcatcaccctcattcatcagtgtctctcttctgtttccatcaagtttagtattaatgggaacatttctaaggaaattcttcctactcgtggcttgaggcaaggagatcctctttctccctatctcttcttgttatgctctgagggtcttgctgctgcccttaaaatccaaaagcaattgggaaattttgatggcatttcaattgccagaactgcccctgctgtttcccacctactctttgtcgacgataccctcatctttgccaaggccacatactcttcttgcaatgcccttcaagcagcccttcagctctataaccaagccactggccaacgtgtcaattttggtaaatcttctattcttttctccccaaatacctcctctcaaatctcgagtcatttctatcaaacccttgggatttctaatgggccattcatgtcaaagtatcttggagtcccccagtgttttggtagatctaaaaagaatagtttcagcttcattatagaccgtgtcagttccaatctcagggtttggagtcataagttcttctcgaaagctggaaaagaagtccttttaaagtccgttatccaagctataccctcttatgccatgtcctgttataaactccctgcctctatctgccacaaaattgagaaactcatggctcagttttggtggggctcttttggaaatcactctaaagctcattggaagtcttggccttctctttgtcaatcaaaattctttgggggcttggctttcgatcctaattcaccataaccaggctttactggctaaacaagcttggagagtcctaaccacccctgattctattgcttctcaaatccttaaggctaggtactttcggcagtcctcctttcttcaagctagtaagggtcactctccctccttctcctagtctagtcttctctggggtagggaacttctcaaggaagggcttatttggaaagtgggaaatggtcagaccattcgaactctgcaggactcctggatccctgatcccaggtctcttaggtttaagaata

SEQ ID NO: 214495 - DNA, 665 bp, Cannabis indica
ttctgccaagccaatgataggtcttagtggtgctatcaaaagagctttggatatataccatcgggcttttggacaactcctttaatgaagataaatcggttatgtccttctctccaaatacaactgacaatattaaacattcattcactcagattttaggtatgcctattagtaaatgccatgagaaatatttggggcttcctgcttactctgagcaaaacaaaagtcagttgtttgctgatattaaggatcgaatttggaaaatgttgcatgcttggaatgataaactattttccattgggggaaaagaagtgttacttaaagcggtggtcaaatccattccaacatatgctatgagtctatgagttgctttaagctttcaaccaaattctgtaaggatatagacacaatgatggctcaattttggtggggtacaacttatgataagaagcgcactcactggaagaaatggaaatttcttgcacttcaaaattggaagggggtatggggttcaggtcttatgttcaattcaatcaagcttggcagatttttcaaaaccccgacacacttttggcaaggatattgaaggcccgatgtaatggacatctgactttttatctgcctcttctgctggtgtactctccatgacttggcaaggtatatgc

SEQ ID NO: 214496 - DNA, 523 bp, Cannabis indica
actaatattctgtttaacagaaggtaaggtgtttttcgagaatagcacactagatttggagaggctgcatttctggcctgaccaagcttcataggtattgatgcacttcaaaattgtatccacattctgcttgtttgcacgggcaaaaaggattgtgtcatcagcaaacatgagatgactaatggccggagcggatcttgagattgtgataccttggagattcttcaaaccttgttgccggatgaggagcttggacaaaacctcatggcataaaaggaagaggaaggggaaagggggtccccttggcgtaggccacgctttggaaagagcttcttttgagggaccccatttaggagaaccgagtaagagaccgtggagacacatttcataattaacccgctaacttgactgtcgaaaccattgcaccgtagaactttctcaaggaagctccattccattctatcaaacgccttatacatatcaagtttaatagccattagtccacctttgcctttctttgtgt

SEQ ID NO: 214497 - DNA, 1022 bp, Cannabis indica
caattgaaggattaggtggcttttacttgtatataaagtggtaactcttatcttacacttccagtttctgtaactactacaaaatgatctttttttaacataaatatagtgaagattacacttcgcaacagatagagatgaatttttaaagtgattgtttgttagtgtatattaaaaaagaaattgttaaaaaatttagcatagattcaataatagataattttcgtgatatgcaagagagacatgctatattttaattttaataatatattttaaattatttgtcgcttaatatataatatagtttgaccccctaaatttttaccctgactctgcccgtgcccctaacggacaactttgattgtttatgtatacattcttatacacatgacacatttatattatagtacacttaatattatcatttataaattataaaaaaatatttttaaatttatagtattttttatttttaaatttttataattaatttaattttaaaataaattttagaataataatattaagcatactaatataaacttacggtgtgtataaaagtatacgtataaatcgtttatattaacagttaacggataacactctaattccctagcaaattgaagaattgctgacaaaatgtaagttaaaggatgaggtactggtacaaatgaaataattgatagagagtatttagtaaatctcaaattattgtttaaaaaaaaattacaagtaattaatatttcaaccttttttttcctgaaacgatttttaaatcttataccaacaataacaaaccccttatttactaatggcttgactcttttgccaattggaaaaaccatgaagtttgataaatgtcgatccattaattcaatgagtttattatgaaatagcaataaaccaatctaatttatccaatagtatctgtttggatgttcattttattattaggacatcaaactaaagataataataatttgacaatactggcataaacttgtggctgttgttgatggtgg

SEQ ID NO: 214498 - DNA, 565 bp, Cannabis indica
tcctacaagcatccagtgaccaaaaacagtacttgaacttgctgcctttatgacaatgtctgtaacagtacttggattcttctatttcagcatgtacaagtaaccaggtgactaactataagcttctactggcgtacccctcacatacataagtgccttctcctagcacctccaagccttctcataactcatcttgatgccatagtcctgaaacatatccctctgtatgtcttttgccttgcacttagttccatctgatctgaacttgttcttaatcaggtagccaacaacccacggtgctgcttgacggttatcagcatgtctagaatccaggttacatgtggtcgttgtggagcacagtgacctcaaacatgtcataacatgccttcttcctccccctcactctccacttgtaatttgaatccttgcaagttgcgtaaaaaacattggtgttagacttcttcaccatgaacttaaaattcattttcaattcaaaccttcctactatattttttaattcagtctattttgtgtaaaacttgccgaagtgtatttcccctaatgg

SEQ ID NO: 214499 - DNA, 589 bp, Cannabis indica
ttaaaaaaataaattaacgttactaaattaaataaatacaaaaaaaaaaaaaaaaaaagacgcgacagacgctacatcttgggttattacatattaaccaaagacatatgtcacataataattgaagatagggtctgctctcgttggcttcgcgatctatgttttcgattattattatgaaaaaaatcaaatatccccgtacgtcttcacatcttcgctttaaacgtcttccacagcaaaaaaaaaaaaatatatatatatatatatatataatcgaagataaattgtgttaataatcaaagataaaggtcttttctggtttctccaggaaatatattgacgccttttggatgccttgttaacaaatacggatacataggcaatatgagcaatatattgggtgatgaattggttgatttgtataatattgaaagatggattaactaagctatgtgtctcctcatcaatagaaaatatatatatttttatgtacgtatgtaaatgtacgtagaaatacaattatatatttatatagaagaagcaaagcaaggcatgtggtctcaggaaaggcagcattatttttgcttat

SEQ ID NO: 214500 - DNA, 609 bp, Cannabis indica
attttatttgtatgtagaagaattagacttggatcgcaatttatcctcaacagttggtatcctttttcacttgatattcagttgcaggttagtattttcttggttgcattccaacacttcttccagcttgtgtattagtttttcatattcataatcaattgagatgaattgtccactaacttcgtaatttgaataatttatttcttcatcaaactatccgttgtaaaatatggggaatgaaattccgtcttttttctaagagtataaaagttaaagtattgtaagtcaactttcggcaaactgtaatgcaacagttatctgtttcgagccaactaatataaaatttcaaaaaaaactaataatactccatatgtaatagaaaagaagcttactactatcgacatttctctgttcaagtcatgtattggcaatttcgaaccttatatttataatataatattattattgtagcacaactattattcaattgaaatgcaaccaggttgcaattagaataatgacaaagtaagagggcatctttaagaaatatttgttgtttttttttttttaggtctattgatcaacaatcaattatacattaatagtaat

SEQ ID NO: 214501 - DNA, 560 bp, Cannabis indica
aagtttctcctttttgaactacaagttaccttgccttccaaacaaggagtgcacaaaatataggtcgggccaaccaaaccggccaacccaacccattttttatgcaaaagcgttatgtcaaatatgggtcgtatttcattggcccgaaaaatcatgactcgtgtatgtatggtttggttatgggttagaaaaatctaactctactcaatccaaactagaccgtgtccacactattacattacttctatatatagtttatataattattgtttgtattacatgtaacgatatgacaatatgtttatacatattaagttattaattaataatatattgtgatatcacagatattagtcaactcacttttgcaatattagaggcaatcaaatcaagcaattggttggcagaaattaatgtacattattttataaataaattatatatattatattattataatatagttaaccctagcagactaacactataaaatatacattacaaaagacaatctcaaaacaacaacaacgataatctaccaattgtccaggttcaccaaa

SEQ ID NO: 214502 - DNA, 878 bp, Cannabis indica
  modified_base (24)..(24): a, c, t, g, unknown or other
tgcaacgaaaaatgacatagacanatcacaccagatttcaccgggacaacaccaatgaagttatgagtgacaatttcatcaggttcacattgagctcaaaaaagcatgactggagtactattctccactatgcatcacttacatagaagagataggatacaaaatgtaaaaaatctatcttccgaacaaccaatacaagagcaaagcaacacaatggaagaactggttctacaaaaacacaacgaaccattctaccatcaattgataatgaaggatgttatcccaatttttacactctgatgcggcattgcacgatggtgacacatggaatcaattttgtatacctgctcgcaagagatataccaaacaaagcactatgtatatttgctcggacgaagtctcttaaccgggagtgagccatccgaacaacacgccaacacttagcagtttcagctttcgcatcgtgagtcactgaagaaatcgctataattttgggatcagatcacggagccccatcttttcataggttgatctgaaaagaatgttggaggaagctccattatccaccatgcatctggcaaccgtcattttcctaatttgtacagtaatgaccaaggcatcattgtgtgggaaggttacttgggcagcatctccctttgtataagagatggcagactctccaagcttgagtttcttagagcctctttcttcgatgaccaggatgtcgggtttaggctcgtgacaaagagtctgagcataacactccctaaccttacttgtctcgcctacaatgtgtaacttaccatatatttcatatgtcgtcgcattatgggtaccttacatgccatcattctatggataataactgagataataag

SEQ ID NO: 214503 - DNA, 1010 bp, Cannabis indica
aggggccccctggaacaccattgctgaatgtgctccgcatccttcgaccattctataactcccaaccagcttcctatctcagcaaacgttttccttgcatacacacaatcaaagaaaaggtgtgtgtgtgtgtttctatgtcaatctcacaaaccggacaaaggttcgaggggaggcttagaaacctgcttaagtgatctcgggtgagtagttgaacattgcaagcctgccaaaaaataaacctgtgctttcgaacaatgagcttattccaaacaactctactacaattcatttcctgagcttcctcttgtaagttataaaaaagtttagcatggaacttacctccattttcagcaagcaaaagggagatctcattagtactagttcggagctttattagctttttgaaatacaagctcacatcctgtttgattgggtacttccacacattttggtcctttaggtaaatagaatttatccacttcacccaaaggctatcttgctttcttgcaatggcccaaaggaacttggccattaaggctttattccactttttaccctcacaaaagccaattcctccatactttttaaggagacacaccttctcccacgaagctaagtgcaacttagagcggttcccagtggtaccccataaaaattctctagatcttctatcaatggcagctataactttgtttggaagggtgaaaatactcatccaatagtttctgataccgaggaggaccgtgtgaatcaattgagcatgccctgcaaacgaaagatttctgctcgcccaacactttaagttcttgtttatcttgtctagaattgctccacagtctccagtcttccatttggctggacgaagcttaaccccaaggtacttgagagggaaggaaccctcttcattttttacaaggtccaggatctgagctttgataccatccttaaccccaccaaaataaatgttggatttgatcttgtttccagagacacctgtactctggcag

SEQ ID NO: 214504 - DNA, 1220 bp, Cannabis indica
aatggtcgttcgaacgttggtgataggcggaacggctatgctatgaatgccctagctgggtgctgaattggtattcccagtctcttgcaaaccaagcgtgatttcatccacaggagtcgtcacaccataacctacgttcgacggctggtcaggattaatagctggcggaacccttgtgtttcctgggttctgcaatgcaggatccaccgcctgtggatttgtcggatcaatcatacccctacgagtttgtaccaccatcgtacttttggttagatttagactgaagagcgattcttgagttcaactctcaatgaaagcaccaaaatgttaacctcacttttagccaatgacagtgagtcgaatttagtaagcgacaagtagtttatcacgattgatatgtagtaaaacaatataaagacacaggaattttatagaggttccgccccgagcagttcagtaatagcctaatcctcattatttgtattaactcaagaacaaggagaaaggttcatttccttatagctcttacaataatatctctaaataattcatagataatatctcttaagtaaaatctttcgaccctttgcccagtgaacatgcatcactatttatagggctatgagcttggagaggaagtatttccattctcgttacaacagatataagcagaaagattgcataatgaatacaaaatacactgatcgtggattcggacaacttgacatatctctgcaatctgatccgcaagttataaagatttctttggtgactcacgatgcgaaagctgaattcgctaagtgttggtcgctctgcgcagattgctgatcgcttttcttcgagcatgcatacaaggcatcctgttcggactatattctccaagcagatactcggagtcgattctacgtgtcaccatcatgtgatgccacgtcagagtagaagaattgggataacagttaacataggagcaagatatgaagcattgataattaataaattagaatttaacaatctcttcaatatataaattcaatacgtaaaattttcaattttactctttgaacttttttattatcaaataactagtaataactagttacatgaatttcgtagctagtaacattaattctttaatttttttaataattgtattgtttgtaggttttgtggttaagtataaaggtatctaaattgaaaggagaacaagattttttccaagt

SEQ ID NO: 214505 - DNA, 664 bp, Cannabis indica
ctgaaaatatgctcggacatgttatcaattgcaactctgtgcatgaactttggagaactctcgaacaactcttcggcaccacttctaaagctcgcctcatacacctgatgaaccagttacagaacaccaagaaaggaacgatgcaaattgatgaatatcttttaaaaatgaagaatcttgcaaatggattaagagcagtaggcaatcaaatcaccgatgatcaattaattctgtatatacttgctggtttgggccctaaatatgcagttgctgccctttcacttgatcttaatggagcttctgcgaatatggcacagttcaagaagcctccatttcccaacagcaatcaacaaaatcgcaacctcaatacaagaaatcgtggtcgtggcaacaacacacataccagaggcagaggcactcaaggaggccgaattcccaatcaaggaaatagaccaatctatcaattgtgtaacagagttggtcacacagttcaaagatgttacaaacggtttgatctcagctacaatggtcctgaagataacctacatcctgcctaatccaacaatcaaccacaggcatatgtggcctcaccttccacaaccgaagacaccaactggtacttggatagtggtgcttctaaccatgtcacatcagacaactcaca

SEQ ID NO: 214506 - DNA, 1112 bp, Cannabis indica
ttttttttttaaaaaattatactaaagtgtaattatgaggcattaattcacattagattctatattttcggtatttaatttttcttttggttatagaaaactatacaaggaaagttgtaatgattttgtataattttggaaagtttattagaatattaaatcaaataaaagctaccatatatataataataaatgatttgattttcagggaaaaataaaataaaataaatgatacgttttgaatataaatcatatgacattatcattaaagaaagctaaaatcttttatgctttggatataagaaagtaggaaaatcgcttggaagggtacataggagaaattttagtaatcaaaataagattgatacttgattagagatattagactgtaaagagtacaaaatatgttccaaaaacacccaattttgaggaggatagagaaaacaacatcaattgaatatgactaaaatggtaaacaatatataaagagaaaagtcgaagacaattaagctgagtaggaaggaaaggaccctacggtctcatgattctaaagttgtttcaaattcaacctagaaattgtagcgactcaaatcagaagtagtaatattctaaagttattttggcagaagatagctttgagaaatatttaacgatgttatcaaagtttttaacttataataaatcagcgtggaaagcagtttagaagaggttattgaggttgtggaacgtaaaaaaatgaaaaggaatagcccaatagtacagagtttgttagataaagttcgatagagtttaaaaatcataatttttatgaaaaaaaaggattttttacccaatcagactatagttaataaaattcttgcaatgagtttaatttttcaattgggtgtttgcttaaggtgcttcttcttggatctatatgtttataatgttatgtgtacgtacaaatttgataaaaaattttgtcatagttttaatatttacatttatcaaatttgtatatacaaaatttataaccttatccattggagaggttacttgtgctaaaatattttgacagtctcaaaaaattagaaatatatcagtaaagtgttcagttgtttcatatttcaaaa

SEQ ID NO: 214507 - DNA, 679 bp, Cannabis indica
ctatttatcgtgcgccaaccatctatatatttatgtagttttggttgatttaaactttgttgacaatggataataattctatataacccaccattagaagaaataaaggcaagtgcaatttgtattcatttgtgtcattctttgggaatttttagtactatttggtcaccaaggaaaaaatatgtacagtattgggattatatcatatgtctttacagtgtcattctgtatgctttcaatagaagggttcttcattgcgaggaattgtaagaactctcattggatgatcaaatcaaaattattgttttagcttatttaagatagtagagacataagagttgagatagctgggagagtctagagagaataataaattctatatattctttattaattggttaaatgaaccaatagttcctatttaacaagtcatgaccactcttcacacagacaactaaatatgttcttacactaataaattactaaactaaagagtaatatttgttattattttctgttctttaatatttgtttaagaaaggggtgtatcagcttgacttagcaagtcttggaatgatggctggttcaagagtgagatataagaagggtagctcaatggttaggcatgttgtttactctcgtaaggtttgatgccacatcatctaattataaaaaaaaa

SEQ ID NO: 214508 - DNA, 550 bp, Cannabis indica
aggaactgcaagcttgaagacctgaatcaccggtcgagttttttgctatggcggagccacataagaggattgaaaattctctagctgagttagagaagggaaaagataaacgcaagtcaccagtgtcacggtcacgattccacagtcccagagggaaaaattccagaggaaggagtcccagaagacgcagtccacaaagacagcgaagtccaaagttggccaagtcccctccaaagaaggagtcctctccgaagaggaagggtggtccatgctttgtgaattatacagagttgacagtacctcaggaccatatctacgccatcaaagagaagaacggggtcttcaaaaagcccccccaatcaggggaaaccacgacaaaagagacccgaagaaattatataagtaccacagggatattggtcacactactctggaatgttggtttttgcaggatgaaattgaagagttaatcaggcggggtaagttcaacaagtataagaagaatgaggaaagtcatccccgagcggatgacaaagaagaaaatcacaat

SEQ ID NO: 214509 - DNA, 678 bp, Cannabis indica
ggatacatattttcaacctcccttgggacttcttctcagcggataatggcaaattattgggggaaaaagctgggcaggtgctttatgtgaaagctgatgaaggtttacctgcactccggggtaaggcactcaaagttttgattagattaaatgttaatcatcccctgtttgctggatgctatatcggtctggactcgggctcccaaaggtggattcagttcaaatatgagaagatgggcatcttctgttataactgcggtgtaatgggacatcaaagaagagggtgcactctatcttctccgatcacggtggcgagcgttagcggggttcctttccccatgtacgggccgtggatatctctggagtcgacatatcttgacgttttctcgggagctttcaccttcaatcagtcgtcgactccagtgagccgtgcgaaatcgatctctgctactcctggaagccagccgttggccgtgaccactggttcgaagggtcttgggaggaagacgtctgctcgtttgtcgaaccaggctgtgaaggtgacggctcgtggaggtctggttcgtggtcagatgcgcagaaaggtctgggtgcccaaagcaacctctgcttcacgcacgccaggtttttccttaaatggtaaccataaattcattggaaatcaggatggtggaaagg

SEQ ID NO: 214510 - DNA, 680 bp, Cannabis indica
ttaatataatttatagttttaattaattattatttgttccataaaaaaaaaagaaaaataaatctcttataaaaataatcatttaaaattaagtttgttttaccattgttattttgactaatataatattgacacatggcgtctaaatgaaaaactaacggagctgtgaattgcgtaccaacaaaatagtttgttttgaagatttaagtatttatgccacctttctcaagaaaaaaaaataaaaagcaatatttatgccacaaatttttgaatttgggtatttattagcaacaaatcaaataatttaagtaattttactgcaaatttccctaaaaataataataaattttttttatagaatttgttataaataatttaaaattttcaaaaattataagtaattaatattatatattttgaattttgcacttaattataatattttctttaatttcaacattttgaattgtgatcgggtcgttgattagggttgaaataccctgtagatagttaatataagtataaactacaacatttgggtgatatgaaaagtgactgataccaatctaagtcttttgactaggaaagtcaataagagcattaccggttagtgtaataattgatcttagaacatctcgtatggtaattggatcgttaattaggtctgaaatactctataa

SEQ ID NO: 214511 - DNA, 806 bp, Cannabis indica
agtttgagaaaatataaagagcacactatatagaatcttacctaagcggtgcgtaacaagtaaaaaataataaatattacatttttatttactactttaccacttattaatataattaatcactttttacattttatttatatatttaatacaactttatatactgttaataaaaatttattgcttttgttgttatttttgcacttatctatcaaaaaattgattaattttaccctaatgcattggtgcactattataaaattttggccaaatataatattgacttgttttttttagctcaattatacactattcattggaaatgataagaaaaataccaaaggaggtgttaaacattataaatggtgacatatgttattggtgcatttcaataccaggtctcgcaaattttaatttagtgaataatatggaaaactgctaacaaattattaagtgtcatatctgtatagtgttggacatccaaatattaatgttctattaataataataaaaaataattcacaaaaaaaaaattattatacataaaaaacccatagaacttgtaaaaaaaattgtaaaaaaaatataaaaaaaaataatttgtaagaaaattaataaaatgtaaaaaaaaaattacaaatcattcataacaaaataaacaaaaaaaaaataacattaagtttacaattgtgcatttgagtataatattaaaaattgatgtaaatatatcacaatttttttttcgtcaaatataatacaatttttacgtatcctattggagatgttcttgcaaacttatatataat

SEQ ID NO: 214512 - DNA, 660 bp, Cannabis indica
atgggacaattaaattcaacaccatgttatagggaaatttacaaaaatattgtaatttaagttaatctttacaaaaatactatcacacaaaaatcttttcaaaaatactgtgtttttataaaacaccagtaaaacacaaagcagaacaactcaaaacaacaatagaacaactaaaaaatactagtagaacaccagtgaaacttaacacagtatactgcagtatgaaacttataaaaaaacacagtaaaaaagtaaaaaataccgttttgcagtatttttgtaaaaaaatagcaaaagttagtataccatgcaaatttcccaatgttatatctttagagtgtataacacatatttttatatatttatgaaaatactcatattgaagcatgtcacccaacccaattatatgcttaaaaaaattatttaaattaattttttttcttattttctttttttgaaaagtttcttttcaaatttaaaaccctatttctttaacaacttttttttttctttcttttatataataagctatctttgctcaattttttttttctataatccacgaccacacatatttaacattatgagaaaaaaaaattattaatcaaattatcaaaatatgttcaataataatatattttacttttggtaaatataatt

SEQ ID NO: 214513 - DNA, 595 bp, Cannabis indica
ttatttgatatatttctttattatttttctttatatatcatttaaatatatttttatttatataaacaaaaaaaattaaaaaatagaaaatagtgaaagagaaaattattaaaatattgtttgaagcataaatattacttctttatatgtaaaaatgcactaattataatataaaactttgagtctattttagcttatttgatagagctttgttttaacaaaattttctttatattttaccttttgaattattttagctaattttatgtgtgttctaaaacacacaaggtcaggaaagctagacccgtacttagggcctaccgttcactcatattaagaacttaaataaaaaatattttttaaaaatatatatatatattttaggaaaattctataatgcaccccttaaaagggatacaccgatacatctctatctgttttagtatccgaaataattttttagtcaaattttttctcatggtcatgtaaattatacttatttaagacattctgcaaaaatttaagaaattcagaaaaagtttaacacaccgaaaattacgttcaagtagtgtgttgcacgcgtgactattttatt

SEQ ID NO: 214514 - DNA, 572 bp, Cannabis indica
tccaagcttggagccttgtactcctatgtgttttcgggatggtgttttactagtaatatagcatggcataaaggtggaagaatggtagtggcttggaatccaaattccttctccatcaacataatcaaatgtacaagccaattaatccatctacaagtatctactattgatggtaagagttttcttgttacttttgtttatggttttaatgatgaagagggtagaaggatattgtggcaggatttaaaagcaattacttctcatctaccttgggtagtaatgggggatttcaatgaaattttagaaaaagaagaaagagttggctctaaagttaaggagcataatctcactttgtttagagattgtgtttctttttgccaattggaagatgtaaaaagcagtgggaagtttttcacatggtgcaataatcagcaaggagaagctagaatttatgctaaactggatcgagtattggccaatgagaattggcaggatcttttctcaggtgctgaagcaatttatatgagtgaaggagtatttgatcatgcgccggccattgtcacatttcatac

SEQ ID NO: 214515 - DNA, 566 bp, Cannabis indica
cagaagacttatagtgctatgcggtactccttgaggcttcgttttagcgcaaaaaacattttttttcaaaatcggcgctatagcaccacaaatcatttttcgtcactatattactactttgaccttgctcagtaattcatgcataacttttgcgtctagactccaaatgagatgatttaacatatttcaaaaagttgggaatgatctctatcattttgggtttcataagctcttcaagaaaatgatgaaaacattgtcaaaaatgagctcaaagatctcagtccatcacaaaattatcttttaagcacaaacttacacacttggagaaaacacattaaatctatacaaaaataaacactaattcatctaataattgactaggaatgagtgtactaatgtgcactcatcacatccccaaacttaaactattgattgtccttaagcaatgaaaaaaaaaaactaaaactaaaaactaaaaactaaaactaacaaattaattgttggatgacatatcaagaaacttagaagaaaggtaatttatctcaaaatataaactctctttctat

SEQ ID NO: 214516 - DNA, 861 bp, Cannabis indica
aatatgatgttgaaaagtttactagtactataatgtcctgactcccagggatgtcacgtgtgtgcttttataaaatttacctgtactacgaagcacccatgagtcacagagactcagcaagaaaagcaaagcataacaacatacattcatgtacggataataatcggacataagcatatgggatcataattcagataaatctagataatagcagacaagtaacatagataatttcatatacacaagcatctagttttgctcaggtatttgtctaataagaaaagctattatcattactttataaagtgactatccccattgttgcctaataaagcaaccctaacaagcctgaccaggcatccaatgtcactgtcgttatctaatgaggtaaccgacaacaagaaacctaacaacaatttcagattatagtcatgacttatagttattcaataaaacaatctttcaaccattgtctataagacaatcttttcattacataatgataatcaccatatctataaaattgataataatcaattcacaaacaataataattgtaacttattttgacatgctaagtggtacgaagatactttttcttatctttaatccaaactcatacatgctatcaataccctaaatatcaagaaaatatcaaaaatagaattttggaaaaaaagcccctaaaaaattagtaggtcgtttctctaaaaacagtaggccatttttttggggtcactgccagaaaaaacggtaccaatccgatgtataacgatatatccaccaatccaagcttactttaccaagccttcaaacggaagaacatataaataaacctaaattagttgtatcatatcaatg

SEQ ID NO: 214517 - DNA, 531 bp, Cannabis indica
acatatcaattcctaatcttagtcgataatatctaaaatagaaagtttttagtaattgcatagtgtaattacactcaattttcacgagggctatgggaatttgagagtgtaattcgaacaccttaattaccttcaattacacaattacaatgtaattatatggttaaacaagcataccaaattgtataatcacctctaattacaaacaaattcaattacactgtagctttccaaacgcttccttaaagttatcctctcaacctcacactattttttttaagcttatcaaaatttaaccaaaagaaaatttcaagagtaggcaatgatacatgtcttcttaaaatgtcattttaattagtgttggatatcatattagtgtgttttaaaatttatcatagtactattgctattgcattttttattagtagagttagtagtggaattcaattaattagcattatagttttttccactaattctaacaactaagcaaagctctcactaagtgccactctaatggtatggatttta

SEQ ID NO: 214518 - DNA, 1066 bp, Cannabis indica
tagatagtgctatttaaagagattttagagtgtcatgtcaccgtctcatatctctcatttatatatatatatatatatacacatagatatatatagatatgaaggatatttaaatggttacatcaaatatgtaatcatcatagttacatttatttttaactattagatcattgttgaatggttgtgattgatttagaaattaaaagaaaaataaataataaataacttgtagcttgatactttattttcttataaaaacttaattaaaatttgttatatttaaaattaaattactaataattattaattaattttatgcaatttcttaataagtaaatatcttttagcaattattttttttaacttaaataattaaaataattgcaacaaaaattcttataacttaaaactattatgcacataaccttaattaataaaaaaaaaatagtatgaatgacctctaattagaagtaatttcatgctcaatcttattttttaacacttttaagtgtcaaattaatatgtcagtcaaagattggttcaagttatttagttttttttttctcttaaaaaatgtaataacaactataaattaatgattgttaactattttcgctcctcgttgaaatcatcttcatcaatctaaagattgtaaaaaaaaatttatcaaagtagattactaattaattgaaatcgttgcttccttttcacaaacaagcataacaatagcataatagtaagcaaattattaaaaatcaaggtgaaatctaacggtagctggttgaatagagagataggtttgtggcatagatgtagaagattatatcaaagtaaaaaaatcacataatgttaagttggaatcaattgaaacccttaattttaatttttttttttataaaagaaaaagataggtcaaacggttattgcaagctaataattagatgcaatttttaaaaattaattaagtattcaaaaatttattttagaagtggtagaagtttaaattttgtaaaaaaataatttcattgtaaatattatagtttaatggtttaaatattaaaaatat

SEQ ID NO: 214519 - DNA, 672 bp, Cannabis indica
ttgtactttaagaatctcttcatttatatcaaaatatatatctttttctgcattcgttcttataaaattgtgaatcccactcacaacagacaatcacaatctacttctgtactttcaaattatatgaaggcatttgctttataataggaacacgagccttcaatacactaaaacacccctcaatgacatttgtcaaagacaaatcaactccctttttcttaaaggattacgatctaaaaataatttttaaaaaattacttaatatttttattttaaaaaatctcacattattttttgttaatttcaatacttattttaattttattttcataatttttttaaatcatgtaacaattttttttttctattaaaatttcacaatgatttttttattttaattttttttgttattaacatttaaagtataatttatttttatttaataggtatgttttttaaaagtattaattggaagaaaaaaattaatataattaaagatatatattttatgttaaattaaaaaatattaaaataaggtgcatttataaattttcggggtacaaataaaactccacaaaacttataaatatactccattttaataatttttattttacattaaaatatatatttttaaatgtatactaatctttttatttttttctttcctaa

SEQ ID NO: 214520 - DNA, 655 bp, Cannabis indica
atttattaacttaatcgttagataatatataagaccatcgactatggagatgtaaataagtgatataaatgtaaagattagtttattttattaaaagtctactctaatggtgtgtcaaattatgatataaatttgtcacataatacaaagtgattcaaatttaatttacgatatagcatgatgtaaaatttatattaaaataaatattatttttttatatttaccattatatcatttttaatattttatcattaaatttttaattaacatgtttatttatattaaatgacttgtattattattattaaattttaaatttatttttacattattattattttctattttttaataaattattaaatgatatattaaattttgtcctaaaatttataattatgtaaaaaatatcactaaaacatttttttacctaaatataactcaattttttctaaataataataagataggtaaaagtgaagtgatagtagggcaggggcttttgtcttgttgaccaaaaaaggcaacatccgtactgagccgtagcactttctaaaaacaaattaatatgttttagaaaagcgaaaatgaaaagatagtacgcagtgagtgacactgcagcatccgttatctatctgtaattcatgatttgtat

SEQ ID NO: 214521 - DNA, 579 bp, Cannabis indica
ccaagctcgtcgaataagcctttaaaggtaaaaaaatgattgaggaggtcctttggattgtggaagtggaattcacaaaggatgaatcaaagattgaggtcttagctgctggagtagaagaggagcctttttcttcttgagtttctctgcaaggaagtcaaaaaatgcatgaattcagagaggacttcttgaatttcgtggcaacttcgaagagaggtgcagagaaagtaaaatttggtaagagtcctatgcccctactttgaggtttgggaatgcaatttaaaacttaaggtggtgtttggttagaggtaatgaaataaaatgtaatggaaaggaaacaatcttcattctatttctttgtttggttgcatattaaagtattagaatgtcataccaatagaataacctttccaccattttggtaaaatgactattctattttgaaatagaaagaaatattattccaatgcacgatgagaaaaaatttattattttttatcaatttttttatacatttaaaattttattgaattttattcctatttcccattctcattcctatttctatatttttatccc

SEQ ID NO: 214522 - DNA, 569 bp, Cannabis indica
attactaattatttaatatttatatgtaatttattattttattttttaataattaggcttaagaatgtgcacatttccatcacatgataaatatatttttttgctaagaatattatttatttgttaaatttataaaataatggtaaattaataaaataaatataatttttgaagggtaaagggtaatttagtcaaaataatagaagttctattccatttcatacaataccaaacatgataattcttattccgttgttgattccatagtcattgccaaacaaaagaataaatatttcattccattccattccattcttattcctattctcattccatttttacttagtaaccaaacgccacctaagttattaagctattaattaattgtaaaaatattattaccctacattcaaaaacgccccttatattttttttttatttaatttcagttttaggaataatgaaatgaaagagaaaataatgaatgtgccaatatgttggcaaagagatgtttagcaactaaaacttctcaaatttctctcatttttttcctagctggttagccaatt

SEQ ID NO: 214523 - DNA, 822 bp, Cannabis indica
tacagtgttatcgataaaatatcaataggatatcgatggtagatcaaaatggggtatttgattgtttgaacatttttttttgtttattaactgtatatcaataggttatcgacatattatctatggtttatcgacatgtttgagcaggattattgttaaaatgttcatcaataggatatcgtcaggagatcgatagaatgtcgatattatagcaaagaaattaaactgggttatatagttttcataacgatatgatatcgatggtatgtcgacaaatattgtaatgatatgtgttttatcctttccttggatgttgatgcaatatcgacatatttttgatatattgtcgatggtttgcatgtctttattttttaaagaataataattttgtcgatattttttcgatagtttttcgatgacattgctgctttattttccattttgcaaatggctccgaatcttatagttcctttctctaagcattttacaggtcgtgcgacatacagaggaagtggtgtttttagcaagttgatgaaactagaatttgagaaccacagtttgactgatagggcaaaggcagaccctttcagttaattttggcaggttggtgctctatcatttttgtcagtactattccaccaactgatgctgcataaaatgattgtgaatgctgagatggatgatgaaatgcggttttacattgcacaaaatgagatgaaatttggtgtggtcgagttcgtgctgattacaggcctcaacttcacaaaggggccaacagacaatgagaaagaagccaagccagggactaaccggttgataaat

SEQ ID NO: 214524 - DNA, 618 bp, Cannabis indica
gtatgatgtatcataatccttatcatcacttacatagataaataatcaaattatcataatcatcaccaattggtttttttatgtcttattagttatcttggaaatctgataaatatgtgtgtgcctcggccttaatttattttggaaatctcgtaaaaatatgagtcattttgtgttgtgtcaacaattttatagagtaagttcgctacagcctactggccgttgtgctcactattatacatacaaaaccacaattttgcatcggttatgatgttagtaaaattgcaaaactgatgtaattaaagggtgggttacgttcagtgacggtgacggacccataattttttctcggtggaagctttttattattaaaaaatatttatacatatattataatcattcttactagatttatttaattttgtggtagtttttttttactattttagtatataattattaaattaaaaaaattaatttaattttttaaaagcaatatttttgttagtgggggctatagcacccacattaaaacaattgggtccgtccctggttacgtttgcattcttatgcattgacaaaatatttgcgtcaattttttaagattatttatgtcga

SEQ ID NO: 214525 - DNA, 878 bp, Cannabis indica
gaggattttacagccaaaatttgaacttggagggttaaatgcaagtaaaacgacagttggaagggtttagccgccaaaaactctaaataaaactcgtaagtaatttgctgtgtaaatttagctctcggctgtagataaatagtaatgtcctcgcttcaagccttcattgggtcttctcccacagatttatggctcttatacacaagtacgtcactcttggatgcttcctggttcagtgtgctttatcctcatcgcacgcttctattctgaaattactccatgtcaaacacgtttaactgtggagttctttcgtgatgggctaccagaaaacaagatgcacattcttgatataggtagtaccaatcaatccatttaagtcatcttcaactgtatagtctcatagctgcacaatttcagaattatcacatttgaccttttccaagtaatgtaagattgcacaacttacccagtattttcccttacggatcacgggtctgctgactatcacataaatacttaattttaatttttaacgttacttaagttatatttttctggaattgtatctaagtcattatctacatatcattcttttattggcatatttaaataattttattttaaaaaaaattaaaatataattacctaaatcaattagtattgtcacatgattattaacttaacacttaacaattaagtaactataaaaattctaacaaaataacaagtattattattataaaaaaattaaatttaaatatttataccacaaattattttaatattaaattattatttaacatacggataaattattgctcataaaaaacaaaatattagagtaaatattacaattggatcccattagattaacctct

SEQ ID NO: 214526 - DNA, 768 bp, Cannabis indica
tcccatcctaaaatatgatatagaacctttagacatgcataaattctgtaagaaattagattcagctgaaagagagaaactccaaggtaattacagaattctttaaaataatctctcaagaggagaacttctccagccttgatttgtttgagtctccaagcgcctattcccgacgagcaactagtgttagcaccaccacactcctcgtgaagtacccttttaggagggaaacaactgaattccccaggggcgacagatctaatacgacatcgacgcctttgttcaataccataagattttaatatgccaccgacatatgctccaatggatctgaccttggactcaataagttcagcttcgaatgtgacattgggatcttgtggggtctttgacttatgaggcctagtagacataatgtcaaagtcaaggtcacctaatgaaaaaacaacagtgactttgggtaaaaatattggtctcgcgaggggaatagaagataaaaattgaggttttggccaagctgcatctcacaagaaacgacatttaccctcagttatctcttgtgaaaattgcctatagtgcctagcaactttgtcctgattggtttttattaaatggtccctaatcttttcatcatttattcaagaaaggattgaggtttctggatgtttggtttaaatggaagagttaaatccttagagcattctatttctaagaattctggagtttaaatttcaaaaccagatttggatatttctgtaaaaagaacaa

SEQ ID NO: 214527 - DNA, 580 bp, Cannabis indica
aactttaagaaaaaagtccatattttacataatttcctcattctaaaactaagatgaagtgagccaatcctcgactaaggtgagttaggcctataaggctggccaagagcccacccaattcaaaggcccaaaagaaaatatcattttaaaacacaccatttttagtgaatttttttttaaaaaataacacctattattttaagaaaaaaatttattttttgtatagtttttaaagtataaatttgcttaaagaaaatttttagaaaaaaattaaaaaatatgagaaaaacagcataaagtaactggttactcttacttgttactctaagagtcaatgattattacttttatttaattttctcatatttttaaacttattttttttaaaaaaaaaaaattaccaataaaataactttttttaaaaaaactaaaattacatatttgttgtgaaaacagggcctcggcaagaacacaatgatgcaagaaagatcaatgaaaccaatagacaaatatcacaattatgcaataaggattaaaccagaaatgactagcatagaaaaacataaagaacacaatgtat

SEQ ID NO: 214528 - DNA, 557 bp, Cannabis indica
tgaaattaaaataaaataggtgtaattaaatccctaaaactaataatcttactctttttttctcccctattattttcaaaaatctcagatttaaaccaattctatacagactacactaagatttatatacaaataaatagcaatatttagatgttgagcccgtcgggacttttgacgccgagaaaagagctctatcggccgggacgaggaaagagctacattggtcgttgactcttttttaattaagttattttaacattaatttttttttacttttttattgttttttaaataatttttaagttaatttaagaaacttaattacactatactcccacttcagagactatgtgggaatagccctttttcaagttatcgtgaacgagtatagtggtggtaattaaactttatcattttcgtttgtaggttttttttttttttttttttgaaaaggaattcattaataacaacactaaacaggattaggcaaatcaagcaagacaacttgatttgcacaagagggaataaccccaatccacatggcactaactttgtga

SEQ ID NO: 214529 - DNA, 862 bp, Cannabis indica
ctctctgttattcctagccccaaacctttcaagcttcgattgttcacgagctccgaccgaccaagacgacccacgaccgagaagacccatgacgactcgcgacccacgacgacccacgagaagcacccaagacaacccacgaccaccgtatttttttttttggtttttgacccatctagcgcttattttctgcatttttttttagtttttgacgatgtcgcgaaatatcgcgaaatcatgaaacatctctaaatgtctccaattcacaacaacgcttgttttatgatttttttcctggttttttacgatgtcgcgaaacatcgctagatgtcacgaaacatcgcaaaatcgtgaaaatatctctaaatgtctccaattcatagtatcgcgaaacacatcgcgaacatcatctctaaacatcgctaaatatcgcaaatcatcactaaacttcatccctgacctcagatttattctaacattgcaaatacatcgctaaatattgcaaaataatatcgcaaaaagctagtaaaccagaagaaaaaaatgcaaaaaacgagagaagtttttttgaaatgtaaggcgaccgacaacactagctccggtgatggattgtccgactagtagagtgtgtgtgtgtgtggtgtgagtatcctagaagtatatttgtttagaagtatatttgcatgatccaaatatgctagcattattttagtggataaattaaatttaagcatataatatctaaatttttctcttttaatattagttattgaaattaaaaatatatatataaagtttaatattaattacatcaatataacgataagtgacttagtataatgttgaactgatgattctgtaa

SEQ ID NO: 214530 - DNA, 659 bp, Cannabis indica
cttgatgagaattctgattttttggtaaagtttatgttagggggcattggttttcttttactgtcaaggacattgaagtggctttgcaattacctgaaggtgtgcctaatgctatcatgtctatggatcgccatttgatgctcactgaacttattggtgcacggggttgaatggatatttggggagagttttcgaattacacatctcacctatgctcatgcatcactcatgaggtttgatcttaccaattggctcccaaattccaataaaaccgtggtgtctcaagatttggcatcctttctttttcgtatcacctcaggggcatccattgatctggcttcttcaatcttggaccagattgtttcatttcggagaggtaaaaagcgaactcataagcttgcatttcctaatttaatctataaaaatttttcctctcaaaaagatgtggcacaatttcatgaaacacttgagccaccacttactgacaccattttccaaccctcagagtattttgatggagcttttccaaagcgtcctaaagctgatgctgctgctggtgcaagttcgagttctgctcctacagatgtacaagaagtcaagaatgaggttcaactagtgaacaattgacttgctgcgatggaggaggttcagcaagagat

SEQ ID NO: 214531 - DNA, 1121 bp, Cannabis indica
ataaaaggtcatacatgtatatatatatagtcaaataaaattcattaaatttctctcttcttctttttcttcttcttaaaacctctatatagaagaagaagttggctaaattttttttaaaaaaaaaatgtggttttgggaatggcaatatatgaagatgaggttattattaatatgcatattttttttgttattattatctttggaaattgatggattttcagaagaagaagaaagaagaagtagattattatttgaagttattgaagaaaagaataaaggtaataatatccgtacaatcagagtagatcaaaattcaggtgatcttcatggcaatttcaacacaatacaatctgccattaactctgttccttcttataacaagcattgggttttaatctcaattaaggctggaatttacaggtatatttattttcttcaatttctactttttatcattactgattttacaattagagattattaattagtataaaaaaattaatttaaatttgtaatatatttttgattaaattattttttaagatagtaatatgaactgatttttaattaaaataaaattgaatagtaatctgatttgatttagagttgttatatatatatatatatattcttttagaatttgttcgtgctaaaaattgtctttaaattggttatattaaaattatatataaaaaatttcaaatatatttatatatataaaaaaaatatagggtctatattattattttacaaaataaaagatagaataaataactttaaaacacacaattcaaaatgattcaaaatagtactaaataggtttttattaataataatatacataaaatctaaaaaccccatttaggcaagttttttattagaaaaagttataagtaaaagttttatggagctaaagtcaaaatttataaataatataaataggtctactcatggtaaatttcttggtgaattgctttaaaaatgtagttttttttatcataaaatatataaacaaaaagtcaacagcttttgtgtatacataaaattttgagaataaatacatgtgatatatatacaataacatatatattattgcttgaatttacatatatgtattt

SEQ ID NO: 214532 - DNA, 687 bp, Cannabis indica
ggataaagcggcaaaatgtttggaagtggtagtagattgggtgatggtgaaacttaaatatatgtaataattatgtaaagtaggtttaatgtgggttgtggatatgattttctcattttgtggaagaggaacaacacctgagaaaattaaaaggaaaactactcatcttcttcctcttaaatttctaattttaaaagaacttcctttcaatctcccactacatctctattaagttcattctcataacactattgctattaaatttgcagctattgaatgataattacatggaaaagtaagggagtgacaacagagtagattattgggctctcggtagaggagacaggggcgcagttatagttttctacaaacaataaagaagttgctctgaaatggtggcagtacactattgagaaaatgatggtctttttttctcatttatgacttgtgcgaaatgggggcttctatgaacgggtgtcttgtgtgaatagttatcttggtctatgaataattaaatagaatgggtttacttaacgaatgagtgtctgttaaagttaattttgttttgggtatattctgctaagtgcacagtttaatagacattttatatattaggtaagatatatatacagagagtgatgggtagaactacaagtcaagatgggagaatcacaagggtgtttttca

SEQ ID NO: 214533 - DNA, 536 bp, Cannabis indica
cagagttgtgcacataggttggtcgaccaaccctatttttaagggtctggccggcctatgaccttctatggacggcaaggtattgctcgtgcaatctcactatttgcctgccagctttccacgtgctttccagcaactacaagaaaaattacttttgccagtgagtttccttatcaataaaagtatatatacgttggcagtatagttttgccggtgagttttggcggtgccaaaatatgtgaacaatgattcgtcggcataacgtattttctcaacgaatcaccttaagtcaccgataaaactatttataccggtaaattaagtggccgacataagcttcttgtcggcaatgtgttattggatgaggggtgtatgacaaagtttagccagtgagttatttcatcgacaaaactttggtgccaaatttgcacctaatttttatttacctgcaaaagttttgttggcacattattttgctggcaaaacttcacgataaaaaattattttaattttgctgtcgctatatagttcattgg

SEQ ID NO: 214534 - DNA, 530 bp, Cannabis indica
attttcttttcaataatttatattttaaactaaagatcaaacaaagtttgttctatactttaaaaaaaaaaaaaaacttttgttctaagcataccttaaaacatactctttaaatcttacaacacataaaaaaaaaagaaaaaatttcttctgttgcaataagacagacaacatgtaatttaattaatttctgtttgcaagcacaaaaacaagttgtaaaatttaacattttttttttgaatgttttaaaattatgcttttatacaatggtggaacagaaaaatgaagataaaacggtgtaattcttgggtaataatacatattgtaccttaaaaaaaaaaactaatgccttctagatttctccacgtcaacagccaggttctaccagaattttcccaattaatcttttccaaatgaacacttacgaacaatccagagaagccgcataattattcttatatatacttcatttcacctccaaacattttcatatcatccacaaaacaacaagattaattcaaatccatatt

SEQ ID NO: 214535 - DNA, 1310 bp, Cannabis indica
acaacttatgttttggaaatctagtaatacagatgattgggaacatgatctacaattatagaatcttaattatcctaatggatcgaatatttgttccctttaaatgttaattttggaactaaaaagttgtacttttactagtgaattaacagtactaaaggataaaaaaagtaattagaagggtaaaacagtaatatgtcaaaattaattacgaatcgacataagaagggctaatcactggaattgattatattaatggacactgtagtaaaactcagtaaatataattctataattactaagagttcaattccatatttatagtggagtaatcatggaattaataaacatgattatgtggttgatgagattcaataaataatctagtttattagagcttagaattataggtccatagtgcctgaatctccaccttgaaacattgtcaagggtagggatagaagttgtatattgatgttcagaaaaatctattttaatttgtcaaaataataattatttatgttaataaatttaggaaatgacaaaaaatttatagacaaaaaacaccaccaatatctggttaagataaaggtggcgccacctacactgtgttaagacacattaataggctcccctaatgtaggatgtccccattggatttgtttttgtgttaaataattaattcaaaagataaatatttattcaaatttgaatttgaaatgtagttatagatatttaagttggtcgagatattccctcaaaattgttaaaatattctctcaagtggttgagagattccttcaattggttattagatatttaatttaaacctaaatatctataacagattcggttataaatatttattcaaataattaaatataatttaatttattgtttgaattcaaatattaatttaaataaaatctttattggttttattttatacataccaaataaaccttaaaatatatacgcaatattttaaggaagtctaagggattaatctgattaaatcttttttcattatcaactcttagagttcttgcttgtgtattgagaataaccaagaacattacatacaaactatatcctaatagcctacactattccttgtgtgtggtgaaagattcagaaaattacagtgtaagttcttcgtcatccaaggatacaatatacgaaaagattcaaggatatcctaataagcttcaagaggtaaattttatttttgacttatttatttaagatttaatatatatacatatgctgatcataaggatgtggtataatgataatcagaaattattatt

SEQ ID NO: 214536 - DNA, 826 bp, Cannabis indica
cccttaagggtttggacttccaccacccaaacagccactgtttaggaatattaggattgtttttactcaattttttaaatctctcaatttaatacctaaaaacacctttctggtattagattttttttttagtattttagagtaaaatatctttgagatgatagttgtggtggttgtagttccgaaaactagtattggaggagaaaacattaaatcccaatgtctattaaagtaaaaatatgatcattaataattttattaaggtacattaattttttttaaaaaaaattatggctttagcttgtggaagattgtgagttatttgggttgccgtggtggccagatttgtgatcagtattggtgatcgaatctgaatgataaggtaaaaatataatctttaataattttgttataaatttttttagattggaataattttttgattagtgaatgtgtttatgttaaactattagttttgttataaatgtatatatttttttttaataaatatgttaaatattgtgattaaaagaggaaaatagagattgagaatgagatatgagagtattaaataaaagtttagaaagtttctaaaaaatatattagtgagatatagatgcatataggttgttgttgctaaataaaatatcatagttcttgatagattttatttaggcccatttagtttttgggcctattcaattaataacagttgttcattttaaggttaaattcctctcttttgggccttgtgtgagagttgggagccatagtagtgggtacgacatactgaacccagcaccccctcacatgaaccaccccaatt

SEQ ID NO: 214537 - DNA, 505 bp, Cannabis indica
ttttttaaaactttgtattttttaatatgatatatatttttttatgagaaaaaaaatataaggtatttttacaatacatttttatataaaaaaagtgtacttatatattattatttatttattcgggagaattttctactctaattttttttataattgtgtatattataattattaagacatcttataaaattttaagatactcagaataattgacaatatataaaacaatgttcatatattcaatctcatacgattataaaataaaagaattacgcgtacaataaattatttgaaccttgtttataacgtattaatctttttttaaatttctcaaaattttactaaatatcttaaataattatgacatatacgatcataaaaataaaaacagactaaaaaattatcctaaataccaaaacaaataagtgtgcatctaggtaaaaattgaaaaaaatttcaaatatatatacatatctttttgctctattaatttttagtaaaa

SEQ ID NO: 214538 - DNA, 555 bp, Cannabis indica
agttagttgtctcctggaagtatgttcccgaaaagctaatttgtccatttggaaaaagtctcgtggaatgatagtttccatccgggagggagtttccggatgactatcatgtccactccgtgtatagtcttcaggaaaggtagtcttccccagaacaggtattctgaatggctaagggttcctcctagaagagagttccaaatagtcaactaaaactgtctcttttcctatccgtgagtcccttctgtatacgcttcagtactctgtcccagtagtgtatgtctcatccaaaagcacgtttcttttgctgacgtggagattcttaagtttgttcagtcggaattactaacttaacaactcaatagttgcagccaccgaccttaagatctttatcctcaccctatatataaatacaacccacacttatcatttcaatgaggtagagttcagatgagtttcgagaggtgatcttgagagagaaagattgagagatagagagagagagagagagtatataagaaagagagagtattgtagttgtagtttgtatagaag

SEQ ID NO: 214539 - DNA, 1224 bp, Cannabis indica
tacaacgtacacaatcaatgaaaaaagatggactaagaaactttcataatattgaaacaactaaggggtctactgaaacgtccttttaggaagatgtactactatagacttacccaaatttaaatacaattatgtaacttattttcatgtgtgaattctttgagaaaatttccctaaagccactttaagaaaaaaaaatgaggataaaaatcgtcacggtaagggtttttcttcgtcactaatgagcatcagtgaccacatgtcgtcactaaataatcataatcgatgcttcatagctgaaagtcactattagagacgatattcactgataataaacaatagtgacaactaggggtgtacgtcggtcggtttgattggtttatgctacattttattaatgtaaagatcgagttacaaaaatctaagtgcaacacgcctaattaagaaaaagaaaataataacccgtctaatgaaattggtcaggttaatccatccacacaaactactaatattttttaaatttttttttatttttaaattcaattattatatttaactatatatataaagatatctttaatgaatgaaatttagcaaattaatacccaaaatatttgacttgccaaaacaatgattaccttaaaaaatacaactataaagcataattattattatgttatattaatatttttatattattatttattaatatttatatattttgagaaacaaaactaaaaacctcacaataatttcttattattattattattattattattattattattattataaactaggcaacagtgcgaagcacggtttttatactaatcaataaatatttttttaggttaatttatgatttttttttatttttatcatttacggtcacttcattaagttatgttgcaaatattttttttattgtattataaagaatgtattaacttttgtgttaatttaaagtagtaacgaacaatggttagtttggcaggatttaacaattttaaatttcatatttttgtcataaatttattatataaaaatacaaaaagctatctctaaagtacaaaaaatgcttaatttatttccccaattttaactatttaaaaaattaagactaatttatgaaaaattaaaataataacaaaaatatttaaatagacaaataaatttgtaaaaataatgatattatattttttaaaattcaaataatgaaat

SEQ ID NO: 214540 - DNA, 753 bp, Cannabis indica
gctggtgtctcttacatctcgatcttacactctggcaaaagatggtagatacaaccacgtgagacgttagaactggacaacccctaatcgactaacaactatatcttacacatatatttattttcttatactttatacatttacattaattaataaatttgttaaagtttttttttttttaaaaagaaaaaaaattaattaaaaaatctatatatctatatatatttatctatttatcaatcaatcaatcaatatatatatataaaagagaaatataagacggtaacataacactttaaaattagtttaaatatatctatctatttcttccttaaatctcttatttttaatattttattagattataaaccaataaattaatattttattatttttctaattttaataatttttttgtaaaatataaaatatctaattgatcaaagtgttcaccaatctcaaatacgactatatatattcacaaccatgtaactatatacgactatgttcttagttatggtcttttttcttagtttgtgtcatgtaactatatatgactgtatgtgtttttttatttacttataatttattgatgtactaatatattcttaagctgacataatttaagagttcaaaaaaaaaaaagaataaatgtataaacattaatttaatgataaatctatttatatatctatatatataaagaaggtatacgaggcggtgacatgatactctaagatatataaagagaaa

SEQ ID NO: 214541 - DNA, 526 bp, Cannabis indica
aactacacaaaaaaagattaatacatgctcatatagtttttacactatcatatatttactaataaacaaataaaaagaaaaacttaaaaaaaaataagcaagtaaaattcatttataggagaaaaaaatagtaaaaatgtacaaaagacttaaaaaatggtattttaataaagagtaaaagaattgagagattttttaattagcaaaaatgaaaagaaaatcaaagattaaaaaaaaaagaacaagaaaaggacaagtattaataattggtaaatatataaataaaacacataactctaaatatggtaaaacaaaaaaaaaaattaaaattactaagataatcttgttaagtttgtaaaaatataaaaaagagtaagaactgtagacaaataaatttaaagtatcaatacttattttagttttaaaataaaattattatttttcttaagttttataataatttacaaataatatatatgcaggaaataacatacatatatacatattcatttcttcttatttttcc

SEQ ID NO: 214542 - DNA, 1151 bp, Cannabis indica
gttgtgtgtatatataatgtatgtatctattatctatatttatgtaattctataagtgatagattaaaatgtttctggtataaattatcaaacttctcatttttcatatctctatctctctttctttcacaaactttatatattatgtatgttttgtttttggccacattatttccaatctactttattatttatttttattgtaattaaataaaattacatatttatgtttgaaaaataattaagtgtttatatccttaatttttactttttaatagtaagttatatcttgctctatcttataatttatattgtaaaactatctctttaattttatatataatcatatctctaaattatttatttcttaatttttatttttttctattaactttttattttataattatgtagatatactaataaaaattatatataaatatgttaagcaaattgagttgatttaattattttaatatatgatatatttgtataaaaaaattctcacactcaaaaaattatcaaaatattaaattataccattttaaaatattattttgttgtattgttaaaataaaatggtaaatatttctcatgagaaaaaattaattgttattattagtgttatccacttatcttcggaaattagccaaaacactaaaatgctcaaaacactaaattaaaataataattatacatattttatttcaaaaaatttaaaaacacttagtaagttactcaaatttaatacatgaagtaaaataataaaatcgttacaattgtcaatagaaattatactttaaataattgaaatttctttatcttttttcaataaatctatatatataaataaaggaaagcataagagcagtaatgtggcatcttttccttccatttctttattttctctattttctctattttgttatgttttctaatttttttctattgaataataagaaaaaaataatgtaacctctccattcttaattttttataatctattagtattcttttaaactattagtattctcatctatatatagatattttattacacccaaaaaaaatgatataggtatagtaattttgtaaacctatataattgattaatctttaacaattcaaaatatatgcatacatatttatat

SEQ ID NO: 214543 - DNA, 915 bp, Cannabis indica
atgtttgaaagttattttttttctttttaccaattattaatgtttttgtctattttttttaactttaacttttttttttcccttttttctcaaaaaatctctctcattttgtttactcatttttctcttttaaaatatttttttttaaagtattgcctacattttcttaccatctttttctactgtggttttttttatttcattttttttaatcataaatgggtgactaatcaatagttatatttttaatgtaaccattattgttagttgttacattttctcttgcctttaataataggttactaataggtaaacatgcattcgtgttaaagaattaaattaattatgattaactatatacttaaagaattaaattaattatgattaactatatttaatgtaaccaagcgctccttggcattagttccattaacattgtcattgtgccaagtaaattgatcaccatcaaaaataagttcttgaaagccacaaaagtctatggtatttcgaaaaaagcataaatttgggattcattcttcaagggacccccaagcttgtcagaatgggagattgtttcattgaaatcacccttgactaaccaaggcatcaacggagctgtgtctttaagcttctttaaaagttcccatgttaaattcttgagtaacaattggagaaccataaaaacccgaaaagtggcaagaagggccatcattaagagcaatgtagcaatcaataaagttttttccataattcataatggttacatttacatcagattttttttttaagaaaaagacatccacttaaacctatttgtagggacttcaataccattagagaaattaaatagcattacgaaatttagaaattgaacctaaactaaacttagactctaatagaaatagagaaattttc

SEQ ID NO: 214544 - DNA, 594 bp, Cannabis indica
attaatgcatgtattaatagtgcataatattagataataagacagaaaaaatccccaattacatatatatatatataaatatatattttggaaacttgacaccaacaatggaaaaaatcagttattgaaaaaaacagagagagcattgttgtatttgtagagttagatttacaaggcagttaaaacaagaattaaactaactaatcttgattaacaaacaaaacagaaaaactaacccttaaggactaaaacagaacttataactgttaactaacaaaagaataaaatttaagaaaaaatagagttattttactaattgaaaaaaaaaagattatattgggaaaatagataatttggtactggttctgtactggtagctagggttcagcggtggggaaatcgaacgttgccgatttttgaccgttttcttcttttttttctttgttctttttgaaattcttgaccttctttaaaaatagtgacagcagagtaaatcaagtccacaagctattgagtaggcaaaaagcccatttatactgggcctaggcctgttctacttctcctgtgtatgaaaaagtgtcaaaaagcccattt

SEQ ID NO: 214545 - DNA, 917 bp, Cannabis indica
ttacaatgaaacacccataatatttgcagtactcatataattctaataaaaaaaatagcaacaaaattatcttatcttacaatattaattatttatttttttaattaaaaatatataaatttgaatagaaaaatgaaatcaatttttctttagttaaatcgatgagctatcctggttcaaggagtccaacgccggtggcgaacgtctgcgtcgtaaattcatgagtgattctaatcactttgtcaaaaataaataaataaataaataaaagctttttttagtgaaaaaaggtaaagtaaaatatttttagtgcttttttttattaggatcatatgtataataaatgtaaatgctaagaaagttttaccgcgaatatctcatttaataaagtatttctaaaatatttatcacctaaatttgtaatatagtttggccccccctaattttttatcctggctccgcccctggctgaaggtatctgttatgactgagatagaccactacttcggtgtagtgggttatttcttgtgtgattggtgctcaagcatgagctcactttatgatcataagtgagatgaatcactgtcgatgagtagtgcagaaaacttgcaaaatattctatataggggcaaaatcacatgtttttgaagagcctggtttgatgatttcaactcgtagaaccttgttaaaggaaaaactccaagggaggaaaaagaaaaaatagagattggattaaatccatgctaagtacagaatcccatacttaggaagagtttagccactgaaagaataccacacttggggcagagtcccactttcagagggtttccttcaatcaactagaaaatctcttccagatccagcgtcctacttccagagagatttttgtaattaatgatgtttttcttttctttttg

SEQ ID NO: 214546 - DNA, 110 bp, Cannabis indica
aaaaaaaaaaaaaaaatcttacaatgactataagtgagtaaaataaaaatacacctatataaaataggagaattttcaaaaatacgtttcttttatgttttatttgcaat

SEQ ID NO: 214547 - DNA, 508 bp, Cannabis indica
aatgagcctataaatatgtagtgttcctcaaaaaatactatggttaatgtattctctctttccccatcataaaaaataacaatgacttcagaatagtgttttcgctcattttattattatcatcattttattttttgatttaataaaggttctataaaatatgatttaggattttttatattatttttaaaaatatgattagatcactaataatatatatttcttgagtgttttaaaaattttaacaataaaatttttaaaaattcatgaaaaatttaatagtcaaagacatggttcaaatagtaacacgtataacttttttattttatatacttgtaaaataaattatttgaacactattttttaaattttaaattattttaaatttttcaaaattttacacatcctatcaaaaaaaattaattaaaaaattatcctaaaattcgaaaaagatgaaaaatgaatcggtacattccttttattataaagtgcattgtagaagcgcttg

SEQ ID NO: 214548 - DNA, 875 bp, Cannabis indica
cttgtgtatggcagctttttggagcctcaaattaccctcgaaagtgcgcatcttctcttggaaattcttccatgaggttttaccagttgctgcagtcctttgtaaaagacacattgttgatgatccaaaatgcttactctatcacaatcaattggaaacaataaatcatgctttgttttggtgcaaccgtgcacaagcagtatggaatcaaacagatcttgttcttgatttccatttgtcttcatctatgagcattcaagattatctagtccatgtttcaaccaagctttcaaaagatcaatttgaacagttcaaaatcatcctctggtgcatttggtttgaaagtaatgctgaaactcatgaaaagaaagctaagactgctgcattattacttcggtttgctacttcctatttaacagactacaagaaagctaatacgaattcgatcacagcatctcatgctacacaatcttagccaaatcatcttttaacacaaccaactactagaggcccctcgtagctgtaataaaccgaagtggttggctcctccctctggccgtttgaaattaaacacagatgcagcatttgatgcagcaaagggacgtattggaattggtgcaatattacgaaattcactcggtaacatcgttgcttctttcattaaaccaatctccggtaatttcaaatcagaagaaatggaagccttagaaattgtccacagccttcaatggctccttcaaagtaatctggatgtccactttgttgaaacagactctctcattgtagtccaaggactgcaacaaatggctgaatatcgttctgcttttcatgcaattttaaatgatatacgaattcttgtatccaatttcccacga

SEQ ID NO: 214549 - DNA, 601 bp, Cannabis indica
atggcaacagaataaaatgactcattttattcaaatctttagcccttgattcttgtctatagcagagcattatcaagatttgcacatggatcttctcctccttcgattgtgttcatcacagtctttgtcagtgagtctaatggcagtgaaagcatccttaaatagcaggtttattgcgcttccattgtccaccaatattttggccacgaccttgtttgcgattggagtctgaatgaccaaggggtcatgatgcagaaagtgtactggcattgcatcttcctcagtgaaagtaatgggttgatccatgagtctgggcctctgagccgaaagctaagtgacttcctatatctcattgttatgtttcagggccccagcgtaacgcttcagctcatttctagtggttcccccaatatgaggacctctagagatcataacgacccttccatttatccaggggcaatctgggtgcctgctgatggggcatccctccgggaggtacctgcccctccaatactactgtgggccctccctgaggcactaggactccagtttgggccgagttcaggtgtgacaacctgtttttgatccacttgtacaagtg

SEQ ID NO: 214550 - DNA, 755 bp, Cannabis indica
cttttatctttagacaatgttaaattgtgtttcgtcaaacgacctgcaaataagctagcccactgcttagtcagagattcttgtttctctccaggtcgtgtgcttcaattggaagattgttcctctgaagcacgttctattgtttttaacaatttgattagttaataaagataccgatttaagttaaaaaaaaattaatatatgattatctttttaaaaatatattatatatatatttatatatatgactattgtatgggattcatcaagaaaatttcaagtgtgcaaaataaataaataaaatcatagttagtgtttacgtgtacaaatatttggaaaataattgtgtaattactaagtacagtgtattacatatatagttcagtaattaattatattatattttaaaatacaaaatatgtttggatataaaaagagtaattattacctatgaatttctaatattttatttggcaaaataattagtaattacatgaaaaaataatattttttaataattgatatttaaaatggaaagtttttgtgtaccctttaatggttgaggttctttattgaataattggcgatcgatacaagagaattacattaagagcaagggacaaaagtatataattcctcacattgagagactcatatcaaacatgcttgagctttgtagaaccctttgtttctcttttttatattctcttaaagtgaaatctggtcggaagtaatgaaataaaataggatataaa

SEQ ID NO: 214551 - DNA, 560 bp, Cannabis indica
tatatatttgtcaattataaataggagaagtatctcacataacattttttaatctttttttttttcatttttacaatctgagtacgtgggttgcaatttaagttgctttgtatattttcgtataaatacaacaaaaaaatactttaaaatgtataaataaaaaaatctcttataaataagttaaaataataataaaacttaaatataatattaaaatattataattttatatttaagactattaaaatatggaaatctaaaactacatattaatttatttattgaatgtgatataaaaaatttaatatttataaataaatatttaaattctaatagttttattattttttatatgattttttgtaaaatattattgaaaaattaaatgaatataattaaaactataaaatatacatataatttagtaagtaattcattaattgtaaaaaaaaatatagaaaagtaaacacgaattcgagtctgatatgaaaatgggttggccttttaagaaaaatagcccgataagagcaaaacacgacacgaatctgatcacgacacga

SEQ ID NO: 214552 - DNA, 575 bp, Cannabis indica
caacaatagctaccaagccagattggcatcactccttatgagactttatatggaagaccatgtaaattgccattgtgttgggcagaactagatgagcatatcactattggaacccagataatcactagtaccacagaaaatattaagggaatccgaaaaagacttaaggttgttcagagtcgtcagaaaagctatgccgatctccattgataagaagttgagtttgatgttggtgattatgtcttcttgaaagttactcctatgcatggcataacaagatttggggtgaagggtaagctagccccgaggtatattggacctttcgaggttattaagagaattggggaggtcacttaccgattaaacttaccaggacatttgggacatgttcataatgtgttccatgtctctatgtttaggaagtatactccatatctgtcgcatgttattgagtatgaggctatccctcttcaggaagatgtgacttatgaagagcaacctatcaaaatcttagcgagagagctcaaagttttaatgagcagagagattccaatagttaaggtcatatggaaaaa

SEQ ID NO: 214553 - DNA, 809 bp, Cannabis indica
cagtatactaatagactagtagttacccgaaaagaataatattacacaatataaatgaacatatactaaaatatattgaacactcttgagttgggcattactattgatatttacaaaacatatataaatataaatattaattttaaaaataataaactattaaattttaatctaattacgcataataaaaaacaaatttgaatttatatatgggaaaaaacagaaaaatacaaaaaaggaaaaaaaattacaaaaatactttgggccggcccattaaacatttatacagtccacatataaatatttacaaaaataccacatgcactaagtcttcagctgtacagagcgaaccatgaaggtgaaaataccgcgatcgtttcaaaactgcaaaacaaccaaaatgaaaccaaaacgataaaaatacaactattaattctggcgaaataaactggaaaagaagacctgcaatgatctaaacagaaaatgacgaaaaaaaatcagaaaaactgtgaagaaactgaaattacacatttgttttctgttttattcgatcaaaataactccccctaatatcgaaatctatattcatgaaatgtagatctgtaacaaacagatctggagctcccaccaaatccaaaacaatgtatgatgtgaaaatttttaaaaaaaacctcatgaataatacatgtacgttatatacagttgcattttgattgattactggtttccaatataaatatattttttttagaaacataataagtagagtaaattcgaattaaggtacaaccagttacgtattaagcttg

SEQ ID NO: 214554 - DNA, 1064 bp, Cannabis indica
aacctagagccaacactaaccatgactaattaaagaataggctaattaagatttttgtcacccgaactttcacatgtaccaaatcatgcctactgaatttttaaggtcgttaaaaatgtcctttgaactattgagattgttagatttaaggacttttgtccaattttagtaaaaaaatctaacataaatgaaagtttagggggcatgatttagtacatgtcaaagttcgagggacataatttggtagatatcaaagtctgaggagtatggtttagtacataaacaatcactgaaatagtaaaattgaatgaaattagataaaagtctttaaatttaacaatctcaatagttctggggaaatttttaacagtcaaaaaagctcaagggtacatgatttggtacatgttaaaatttagaagacaaaaatcctaattagaatcatgattgtatattcaaataaatcttattcttaaaataggatcagtgcacaaaatttatactaattttgttaattatctaccatcgagatatcatctatttatactggacaagtgatattattttatgaacattagaaatgtatataagatgaggagcgctaattacaacctcctattacaacctcttagtcaacctctacgtgcgaaatcattataaacacaaatatattatatttgaaattatgtcttagttatgtgagtgtgtgaggataatttgggtacaatactcataaaaagaggtatatttgaattaaactttatttgaaagtaaatttagttaatgttaaaaaaaaaggtattctttaagtacttctcccaaaaaatatggtatgtttgaaaagtattagaaaatatgtgtattttttttttaaaaaaaaaaatgaatttgggcccgcctagctagcccaccccaacctagagccaacactaaccatgactaattaaagaatagctaattaagatttttgtttcctgaactttcacatgtaccaaatcatgcctcctgaatttttaaggtcgttaaaatgtcctttgtactattgagattgttagatttaaggattt

SEQ ID NO: 214555 - DNA, 527 bp, Cannabis indica
tttggtttcaagagagggccgctccaaggaccaaatattattacttgtttctgcaaattgtagtgtccatacaggcctagttagttcccaaatttagtggaggaatataaaccctttgtttgtttgtatcaaataataagtgaagggaagaagtagaacctcattgttaattggaccattaatcgtacccttttttttctgtttaatttgtattcttcaaaagatgacctttcacaatcaattgaaacaggcagacagctttcctaatattacaaccatataacatttcactcttattttcttcttctctttttactcttcattttgttgaaaagaaaaagcattgatcacactgtcagaccattattcgtccgtacaaagtcaaaaaatttatcagcaaagtattttctagtagtttcacgttcagcaaagttgctttcaaactttcaaggacgtaatgattttaatttttacttggaaaattaggatttgaagccatggtacattgtaagaacttcaagtacaaa

SEQ ID NO: 214556 - DNA, 513 bp, Cannabis indica
aaaccctatataatcattacaacaaaagccacaaaccacctttgacaactacgaatagcggcgaaccacctttgacaactgtgagtcactgtcaatgaccacaaacagtgaccacaacagctcgtccactatgaaaaaccacgaactcgaagcactgtcgatcacaaacctttgcacttgaggagagagagcgagagagagagagagagagagagagagagtgatcagtcgtttaaagaaaaaaaacacgagattagtggacgtggaactctgatctctcaagaacaaaaaaaaaaaaaagacaaatggtacctggaagtttcagggggcgtggagctcagatataaactccgttgactcgtccttcgtcggaaaaagatcgctagcctggcatgttgcacgaaaatagaagagcaagggaaggacgttcatttatgcggttgagagacaccatggtagagcctgtttgatctccatgttggtaggccgacgcttagagagagagagagagag

SEQ ID NO: 214557 - DNA, 432 bp, Cannabis indica
tttacaaaagatacaatccaaaataaaatttatcctattacctaatcattccatctaagttttaatattactaaacaaattaaagttaaatactactaaataataatgacaaatattgttgtcatagcctagtctaacaattttacacttctactcacaaaaaaaattcaagttcaaatcccccggaagctcagccgcttcccatccggtcgcccgggacttatacccctcctgggcaacgggtcccaaggagacctcttcgagggtagccacgcgcttaccacttttctttgaggacttagagccggaagcagacatttttctattctgtaaaaaagggtaaaattcgagcagttaggccccgtaccaaaccctaaatcaagaaaaagggaatgggggtcccctaactgctggaaagaggcccccctccgg

SEQ ID NO: 214558 - DNA, 816 bp, Cannabis indica
tgtatgaatttcaaaatatatattttagatcggttgagaattttgtcaatattttatgaatttttaggtataactgcaaaaatatagcattttattaaaaatattattttgatggaattattttagaaaaaaattaaaaaatatttataggaaaaccagtgtaagataactatagtcaccctaaactataaaataagcagaaacaatatttcattacgttatttattaaattgtttagaaagaaaatcagaatcattttattttatgtatataaggatacaatttgactatattgtaatgattttttttttttaattttatagtttttgaaaaggtatatttatcttttaatttaattttaattaaaaaaataaaaataaaaaaaaaagtaaagctatgaaaggaaagacatgttctctattaaaatgggataactttaaatagtcgtttaaagtattctcgtcagtttgtataaccgtcgcttatacaaccgtcgtaaaacgggcataataggcgacaattcaaaaccgtcgctaatgtgggtttcccgacagtttaaaaccgtcgcctatagtatagggcacggtttaaaaccgtcgcttataccctgttataggcgacagttttaaaccgccgggaatgtaaaaaaaaatacagatttttctgccatttttttcctctattagctttataattttacctaaattaaaataaaataactaattaattttgttacaataacaactaactttaaaacacattaaatttatataataacaaaataaatatatataataaataaaaaactatataaat

SEQ ID NO: 214559 - DNA, 610 bp, Cannabis indica
tcccctaaatatcggtttctcaagtacacacctatttttcataaataataataataactaataaatagatatttattttcattatcagttatcacctaattcaaactttaaatcacataatattttaaatcataatttaaaataatacttctatatattatataaatcacaaattattatttataatcttttaaataatagatatatatgaactataccaaaaaaatatgtcaaactatactataaagtaattttacaagtattattattattatgctcaccataacaacaacactcacaaaataaataattcctttgtcacaattactacttacttcctaagcattatgcacatactagagtaattcatcccataaagaaaatattcgtcactataaaataaaatttatttgtcattaaaatccttaatttacaatattcaaaatactaaaaataaaaaaaaaaataaaaggaagtaaaaatagaattaaattcttaaaatttttttccttaaaaaaatggatattacaccattctcattgctttgttattgatggtagtttagaggctcctcaattatgcagggagggtggcctacattaccatccct

SEQ ID NO: 214560 - DNA, 531 bp, Cannabis indica
gtcgaataaacttaggactcaacctgtgaggcgaaatcatttaaataaggatcacaaggtttatgaagagagatatttcaacattgttgggatgtcatttcgataaaacattcaacatctcgtagtacaaagatcttgtagctgattgtgatgaattatctcgtaatatacagtcatgcatcacctcgtaatacacagccagtgatgcatcaccttgtagtacacagtcagtgatgaatcaccttgtattacacagtgatattcacctcgtattacacagcagtgatgaatcatctcgtaataaaaaagtcaatgatgaatcaccttgtattacacagtagtgattaatcacctcgtattacacaatagtaatgaatcacctcgtatgacacaacagtgatgaatcacctcgtattacataaaagtgatgaattacctcgtattacacaataatgatgaatcacaaggcacagtcaatgatacatcacctcgtaatatacagtcagtgatgcatctccttgtattacacaa

SEQ ID NO: 214561 - DNA, 647 bp, Cannabis indica
ggtgtcaccatatctggacgtgagctcctgttcggttcttcctccccatatttttcaatattatatgtaccacctatgtacttttattaatgttattattcattcaatgttattttatgctataatatataccacttatgtatttttattaatgttattattaattcaatgttgaatgttatttttaatttcaaattttttcatttcaattatggtctttttaatttacgaaaactaaacttaattaatgaatttcacctattagtgataaacataattttttggtcacaactttaattatttttttcaattatctaatttctttaaattaacaatttatgtaacattataactgatataaattaaaattatcaaattaattaataagtttttaatttatcaatttttaacttaataaagtttctcattattattaactaataagtaaattcgtgacattttaaaattaccaagttatttaaatgaatttgtgttacaattgaaatcttaactaattaaattatcaatttttaatttaaatttacttagtgatgttgtaattatttttcaaaaataacctattaccaatatttttataataattaatgaactatcaactaattctttaaatttatcctattatcata

SEQ ID NO: 214562 - DNA, 619 bp, Cannabis indica
ggattaattggttataatttctttctattcttcaaaatataatataggaaaagaaaaattaataattagaattaaactataatatgtactcaattcaatatatctcatgggaactagttcttataaatatgatatatgccaagcaatattatatattattataaccatggtgatgatgatgtaacacttttaaggtaagtgccatccatgtgaaaattaagtaaaatatattaggaaatttgaatttatatttagtgtgtatcaaattttttttttttttgacgcggtgatcaaaatcacacatgattaaacaaagcagcaatccacaatcggcggagacacctgctcgaaccaggatagctcatcgtctaaccaaaggacatgctttgccaaaccatgtgctgcagaattcttatcccgagccacatgggacaaactgcccccagaaatttagacaatcaagctatatatttttaaacacaagtttactaaaattaaaaaataagcacattttatatatattcatacccattataactctctttcttttcttctatattgatggtgatttaatggggttcgatgatggtccatgctacctattttttatttttatttt

SEQ ID NO: 214563 - DNA, 946 bp, Cannabis indica
tctctccaatgctttcaaaaaaagtactctctctaaaatatatagaaaatccttgaaagtttaatagctactattaacatgtgctgtatctaaagtagaaatatatttttacaaattgtgaaccacttttttatctttactccaacttaaattctcaattttttttatcttatatatataataacttaagcacttagtttgaatcatattcaatatatttctatatgagttgaacatcattcttaatatatattgtttgtattagagtttgtgagaatttagacaagaacagagagaaaggaattgagtgttctttattgattgaattaaaagatcacaaaagaattattatatatatgaacaagaataacaacttcctaactaactcaactaaaacactcaactaattgtgtagttagttaatagtattaactaactgtataactaaccaacacctttaacaactcctcaaactaagtgtggttttagaaacgacacacaatttgtctctaagctctaaaaatctagtgctcgagatcgactttgtttgacagtcagcaatctaagtagtagcagggacatgtttgacatgaatgtgctgctgtagaactatatctcagacaaagtataaatcaatctcgatatgctttgtacgagcaggaagtataggatttgtagcaaggagagatgagctttggttgtcacaccaagcagagggaacaactacttgaggaatgtgcatctcgtgaaggagagactgaacccatgttacttcagcaacaacatttgcaagactacaaaactctgctttaaacgatgatatgctaatagtgaattacttctgagatttccaagcaacaagattgccaccaaaatagatgtagtagctaaaggttgagcatttatcatctgaattagatgctcaatatgcatcgcaaaacacatt

SEQ ID NO: 214564 - DNA, 668 bp, Cannabis indica
tcaattctctctaaatgattttaaaagataacaatttaatatataatatgataatgttttactaattataattttcctatgttagttgttgtttatcttttataattttttttgtcttttcattattattatgaatgagaatgattcgaactttttttagaagaagtatagtaattatttattttggagtactatataaaattgacttctatattatttttattgataagctaataagattatattgaggtgaattttatttagggcataaaatcacaacaccaactttaagatttgtagaaacatttggaataggctcagaattgtctttcccttcccctttgcctttccctttgctgaaagaacaaatggtttcatccaaaaaataatcagagaaattcgacatgtctttcttctcagaaatttgagtgatattcttttattgcagctgtaacaataataaaaaagaataataacaaaacaaacaaacagagcaacaacaaataatgacaacaacagtaaaacaactataaaataatagacacatacatgcttcagtggacgattaaatatcatattattcatatgatgcaacttcaactgtttaaccttcagctttgacattttactccaattgagaattttaaaaatcccaatgtttgaataca

SEQ ID NO: 214565 - DNA, 1292 bp, Cannabis indica
tatttaccctattatatataataatttaacactacacaaacatgtcccaaacttcttattcttattcttattattttgtttgttactccaaccaaatagcacctaaaatgccacttaattaatgtcagatgatcatagaggctacgcattaataacatcagcatcagtaacggtatgcaaattaccctaaaatgccttttataatgctcacaactacaaaatttgtccttgtttaaaatgaaatcatatttgtttaactcacctcttgcatatcagcaagactccggtcatgtattttcgttgatcctggaagatagacagaaccaccacctataatagaacattcttggacacgggatatggtgagtagattttgtacccttctagaaagctctgtaccagatccttttaactgaacatgcatatagtactagttataactcaccaataaaaaagggcaaccaaacaaggttgccaaaaatactatttaaaagaaaaagaactgcaaaacgccacctgtctagcaattgcagctaatttctccgcaagttcagcttcccctttggttaaaggcagacgacaaccctttccctccaatgcctccattattttcattaccttttgccaccaaaagaagcaagataaatccaaaacatgtgagcaactgcttaagatgcagaatcaaataataacaatcccaaacacaacatataattgtcaacctttaaaaggcgtctttgaagaccttgctctttttgtctcattctttggattcttggaagggtgtctgcttgaaaatgtctttgaagctgcagtaaaatcaaaaacaaaattgagacactttaaagtttacatgcactagatacatatatataagaaatcgaggatgataccatcttcacattgctttgagtcattctcaatctctcagcatctgaaacaattacttcatcttggagctgcaaacaattggaacatcactatccaacacaccaagcaaaaaggacattaccaaagatagccaaaagaaaaaattaagtaacaatgtaacatggctacccaaaaccacccaaattacgaatcaaagatggaattattgaacaattacgccaacctaaacgaggcagcaaccaacaagagtatgctacattctcccttttttaccgctaataaataagttgttgacccaaaattcagaataagacaagtggcaccatcaagattcatgccaagtgtttagggcccacgcaaaagatacttgttgtcttagaagtggtccggaggaactctct

SEQ ID NO: 214566 - DNA, 1080 bp, Cannabis indica
gcccacacttatgcttcacctagactttatacacagatgctaagcccattataattgatcaccaacaatatgggctaacacagcaaagaactatccaatcaacccaagttttaataaaaccaataaaatttaatgtaagcccaaataaaagtctaacaccaaaagcttcgcctaccagcaacaccgctgcttacaccataccaccatcattattgttaggtgcttctttttcttaacaataagtgttctcttttttttttttatgaaatatttaagtgttcttagtgtaatatattgtacaacattttttttaaatagtaatcataccaacaaaaataaaatactattctgtgcaatctttctttattcaaaaaattaatgttaatatttattgaattttgaatatttacttaaataatgtttgtcttttactagtatttttctaatacaaaaatgcaatagttataaaaatatttatatatataaaaatgcaatggatgaagtcaaaatggtgtgaaaatcgaagagttttgcaagtgtgcaaaccaaagaagacacaacatttgacggaacgccacgtagcgtgcgtgacatttcatggcaattaatacccgaaccttttctttctaaaccgaccgccaaaagtcttgtcggtaagatattttatttttatgtttctactattttttttccagccatttttcctttcatttataaacattacaccattggtgtaaatttaccctaaaaatactctttttttttttaaacaaatccctttgtattttttttttttttatgttgagatagttttaattttaaaacaaaatgtctgacataactatgatttaaaatgatataaaaaaattaaaattaaatatctaaatatcaaaaaacacgataaggtgtattagtgaagttttcaaaaaatactacatttagtcttctttttttgaaaaggtatgttacgataaattaagttggtaatttattgaccacgttctgtgtagtttcaaggcccctaacaagttctgccactgggtccgccagtgtatcacaacaactttcttcaactttctt

SEQ ID NO: 214567 - DNA, 541 bp, Cannabis indica
ttttttattattatattttaataaattacctaattttattaataacaatcaattaaaataatagttagcaatccaattgagatatctttatgttagaattacattcaatagaattaaaaaaataaagtcaaataatcagttgtttaatttttaaatcgttcgacaaaacaactaaaaataatataaaataaaaagattgttgcatcataattaactttaagaatacttacattcagtttcatctaccgtctagaagacacaacatagtaaaaactattgcatcaggttcatttaaccttatagcttgaacactcaagtaactgtattactaacaaccctttagagatcttgttattctcacccactaaaagcgatttgatggtgagccatcaaagaacaaagaagaactaacaacgaaacaaaacaaaataaaaccatgtcacaaagacaaaactaaaatatttaaaaccatgtcatgaagataagactaattgcagtagcaaaagtcgaatcacaatagcaaacacaacccccaccaagc

SEQ ID NO: 214568 - DNA, 798 bp, Cannabis indica
agagtttaatataattgacagatatacgaattaggtaaaaaaaaatttggtagaattttttttctttaattattaacttataattttaaatttatatggttttgctaggaatgatttaaatgatattttattgttaaaaataacattttatgatttttttagtatcaatatttataaacttataataaataaaaaaatatatataaaaattaaggagaaaatatatagagttatttaaaataattttagactatcacctaactatatctcttttatacatagatagataaatatatgttaatgatattttgttgtagattaagcaaaatagccaatattgatataacaatgattttattatttagttttcaaatattaactaggatgaacatataagtcagtttcttattaaagaaattgattgtcttcaatgatcagtcaacgataacaatattaaatatctcataacataaaattaataccgatattattgaggataaaccaattgtattgctcaccaaattggtgagaatatgtgtttatgagtgatgagaatttcctttttttttttttaaaaaaaaaaaagcatatttatacatctatttcaatctgaacttaggtggcgtacgtacgtttgactgcttgtaattacattatattgctttcttttttgaaggtaggaaggaaaaaaattacttttctaattgccaattgggtacagtttttgtctatctcattgaaaattgtatagtcttttgaaggagtgacaggaaaaaatggatttcatttcattacact

SEQ ID NO: 214569 - DNA, 1071 bp, Cannabis indica
aatatatataaatgcagcggtgcagatatttaattaattattaactaaaactaatataggtagtcaatgaacttttgtaattagaatctttatacatagatgcatacacacacaagaaagcaattaattgaaactggagaattaattccaggcgaaaagattcatatgtgtatatttaatcaatttttctaagtacattttcctgaaattgatgtttgatgtttcctatttttatatttatttataaatgttacttagcttttcattttcaaagtctaattatcattggacaagtggctatagttagcggtattaacgttaataattaaattaatatatattaattgtataagtctatgctaataatatacgtatacgtggttttatatatttatcgtttaattttaaatattgtaataagtttagttagctatcgtcacgttgacaatatagcctatagctaccaaagttattataatataattaatatgtttttaaataaataattacttattaattagcacgaaattaacagccaatcgagatcgatggagtaattcaataaaatgatgtcacttaaattgaaatacatgttctatgatttggaactttgtgttggttaattgaaaacctctgtataattatatgtacatttatatatattacaagtccatgaaaataaaaactatatatatatattgatttgttagagtatatacatatatatatatttacaatagtttattattacgtgcacatatttattttaatttttatttttgttatatatatttttagaattttataaattaaaaaaaaactaacttattaaaataaatttgttaatagtgtatattgaatatacctttatatatttaaattaatttaaaataaataatattaatatgtacatatatatattcataaaactagttttattattaaatatattcttaaaatattttattgttaaatagacatattttatacattaaaatatggaagattatacaaacttccacgttgaaccgtagatatataatgtatgttattctatatatatatacatat

SEQ ID NO: 214570 - DNA, 643 bp, Cannabis indica
acgtgaactttttggggatttttaccgcaaatttccttgtttttttttttgatatattactttcatgcataaattagagttgtccataaatttttgttacctgcttaaactaaactgaaaaaacttgataaaaaatataaatcgaaaaactcgacgaaaatataacccgttcaatttttatattgggcaggttgaaaataatattaacccgcccaattaatctgaactaactcaaccaacccgattaaaaggatttttccatgtatatttaatattttattatatatatttatatatattatatgactatttaaaaaataaaaagttgaatctaatatgtttttttttatggtggttgatttgaattttgaattcaatttatctatatttgtctcattattacaagtaactaaaatataactattgaatgtaaaaatataaaaaaaatattagtagtcggtttggacgggttaatccgatcaaaccgatcaatttcattggacgagttattttttttttcttaattggatgggttgcacttaaatttttgtaactcgatatttacattggattgaataaaatgtagcataaatcgaccaaaacgatcgacatacacccttaatataaatagccgtattttttt

SEQ ID NO: 214571 - DNA, 596 bp, Cannabis indica
tagatatgcatgcctctcatactcttgaatctatgtttagtttttttttaattttatttagcattcatgatctcgttaccctttcctatatatacatatatataaattttagaattcgatacacgcccttcttttactttaaacttttttaccttaaaatttcgacctagttgggggttttgatctatctctcgtaggatactccctaccgaaggtaacgcctatcgttggctcgtttggtttttttttttttaattgagaaagagaaatcgagactaatttggaaagagaatctgtttgtgagaatggagttggaggaagatatggaggtttaagctgacacggtgtttaaagctcttgaaattgacatcgaatacaagtttgacgttatacggttcattgatttcactcgggaagaaaactcaggcaaaggcttctgaagttgagttgtgctttaagtttgcttaaatgcttacctttttctcgtgagtctttaaagcttcttgtttttctccattatgttgattcttgctcttatatgattgcttaacctaaaccatgtattgattaaaactttgattgcgtttttttttttt

SEQ ID NO: 214572 - DNA, 560 bp, Cannabis indica
taaaaaaaaattaaaaaatttactttacgtaaacgtaaactaattaatttaacgttaacgtttacttttaaaccttaaaacttactactactaaactaaaaagtaacgaccaaactaaaacctaaaacccaactaagtaaaccgaaaacctacctaaacctaaactaaccaaaccaactaaactaaacttacgtttttaacgtttttaactactaatttacttactagtaagtaaaagtaactctaactacagtgcctaaggccagttcttgaaaaatattttaccaggatctagatttactaccatgtatgtttcattaacaccctaatatgaattctaaaacaatgaaataaacacataagggtttaaggaaaccttacattggttgcagtggaatataatgactccttccgttaagatctctagcccttgatttatttctgtagcagagcatcaccaagatctgaacttggatctctttctctccatccttcgttgatgattctccttcttgttgtttggaatctcctacagtattacacactatgattgagatacc

SEQ ID NO: 214573 - DNA, 646 bp, Cannabis indica
accaatcaatccatttaagccatcttcaactgtgtagtcccatacctacacagtctcagaatcattccacttgaccttccccaggcggtgtgggattgcacagcttacccggtatttccccttacggatcacgggactactgactgtcacactataatcggtatgatgacagtttcatgggttcagatcctaatctcacacgaaaccagccaaaagctggtgcaaatgcatttgttgctaccccagaaattttggacagcgatgcttggttcgcagacagtggagctagtaatcacattacctcggatgtctctaccatgaatcaaaagcaggaatatggtggtaaggaaacaataactgttggcaatggtaataaactggccattaatcacattggtaatggttacattcatactaaacatggtcagaaattacttcttagagaaatgtttcatgtgccacaaatagctaaaacctaattagtgtttccaaacttaccacagataataatgttgttattgaatttcactctacctttgtttggtgaaggaaaaaacaacaaggaaggttctgcttcaaggaatgcttaaagatgggctatatcagctggattcaccacaaactcaagcttctgtgtcttctcagt

SEQ ID NO: 214574 - DNA, 884 bp, Cannabis indica
gatccgatgcccatccaatagtgtaaaaaaaataatttaattgtcaaatttaattaattattcttttattaattgagattggagtatttaacaagaatatgagttaattattaattattgttttcaatttttttattttttcattttctttgtaaaaaatgtgaggtgtgtggtgactaacacttttttaagaaaaatataaaatatttaattcttggttttttttttttatagagacccggacatctaataattccagtggcagagcattacacaggccatgtcacttggcgcggtggtagttattactactcgaagattaaggctaaatttgaagaattcaaactatgggatagggtgagggaatcccctttcaaacagttcttcgagagagagcctttataattttcaggagcattgattcatcagttgatattgcacaaaatcaaacctgacaagccacacgaggtacatttttacgtggggaagaagagatgtagatttggtaggttggagtttggtttggtgaccgggttaaacttgttgcccgaacctactggtgagaaattgaagagaaaggaagttcagaccggttgattatggaatatttcaacagtagtccttccatcagcttttgccaactgcgcagagtttttgagagctgcacaaaagttgatgatgtctacaagttgaagatggccttgtttgttatgggcgtcctcactggtaaggaggagaagactgccattcctccttttgtcataagaattgttgacaaccttccattcttctacaattacccgtgggaaaagatttcgtacaacaagctgatggaaacttgtaatagagactacttagatatgaagaataagatgcttaagaag

SEQ ID NO: 214575 - DNA, 508 bp, Cannabis indica
gttatagaacactactttttatttttactaatttaaaattaaaaacaaagtgtattttataacactattttttaatttttaaaacacaattctttatttttatttctatgattaaattaaaaaataaaatattataaaacgctcaatgttattgtttggtactgttaattttaattaaaaaaaaaaaaagtagagagagaattgtacagagaaaatgaggtttgatcactcttaaaactttacgctaaatcattctaaaggtcccccatttttagtttgaaaaactttgcattatttggcttgataactacacctttcggatttctttggtcaagactcaagagcatctttagccacaaaggtattaatatggtgttgatcaattattactaaaataatagaattttagtactatatgtaaaggttttggtataagttgtgttcaaaaaaaaaaaaaaataaagaattaatgtagaaataaatgaataattaaaaatcaacaaaacta

SEQ ID NO: 214576 - DNA, 576 bp, Cannabis indica
aaaaaaaggaggatggagaatagcattatatcctttactaatgaacaaggggtggtcatagacaatttctatgaggtggtcgatcactatattggtcacttccagctatacatgggaaccgaatccagacctacagctagtctcaaagcaggttgtatggagatggggaattgtttaaatcttgagcaatagctgagcctaatcagaccatttacaaagaaggaaattagaaaagcttttttcagtatttcggatgtaaaatcaccagggccagatggttatggagctggtttttttcaagaaaatgtggccggagctgggtgctgacttcactcatgcgatggagagtttcttcactaaaggatccgtgccccaagagtttcatgccacaatgctcaccctaatcccgaagacagaaaatccaacaaaggcagtggattacaggcctatagcttgctgcactaccatttataaatgtgtttcaaagctgatttgtatgagactttcacaggttcttcctctgattgtcagccagaaccaaggtgcttttgtacaagggagatcaatcgcgcataa

SEQ ID NO: 214577 - DNA, 1199 bp, Cannabis indica
aaagaagagaattgcctcatataatgtgtacaccacagaaggtaaggttaaatcaagtgtgagaaatagcttcaagtggattaagaacaagtttagtgacatacgctatggtggtggtgtatgagataatgttttaatttatatatttataggaaaatcttaattaattaagagtatctctagactctatatataggtgatgtttaaattaccttcttgatctttttagatccttttcctttttgggggttgtttttttttttttttagaaatattgtacaatgttgttcaaaacaaaagagggacagatcaaaatccctaatggtattattggaaatatgtatcaaatttaggagaaaaaaaaataaaaactcacaaaacaatgtattaattagtatgataatgatagatgggggattgtgcttgcattgtaaccacatgcaatatatatttgggcatgaaatagatatttgaactgatttagtttgtatttattggtgatgatataaatatatataatttgacttttcttatctttcatttgtttttcattctcttaaattacacaccaaaattatgtaatttgcatgtggatcttttgtcaaaatagaatggtcttactttttcttttttcttttaaataagttgaaaaataaccgatccaaatcaacaacaatttcatcagctcgagtaaattttcaagcaagattgaatttttgttcgcgaaactatttaatattcacataatttatcatcgtatattaacaaggttcacttgatgagtaattaacaatttcactcatgtcatcataaattaattaattaataagatatttaataataatagagggcaagaaacaagattggtttctgaggaaacaaaatataagtaggtagggtatgagtgtatccaaatttagatcatatacacatgctaattaatgctaatacacaccctgttccacttccacttattattattggtttttctctacacaaaatctgatcatcatattcatatgtgattatgttccaatatctaatcatcataggtagattaactcaatatatgtaaatttaccttcccatattaaaataaatagtatatacatataatatagagtcttcacattaattaatggacattaattcttgactaaatttcaaaacgaacatcgtgattggaaaagtggtgatgg

SEQ ID NO: 214578 - DNA, 598 bp, Cannabis indica
agagttgttcttgctgttaatggtgaatgtagtctccaccactatttattggacagttcactatctttttcaaccataatctttttgttaaactcaacgatcactatttcttgctttggaaacagcaactgatcaatcaaagggaatcaattacttcttttcattcaaggtgcaggctctaccaccaccaaaatttctctctgatgaagattgagcctcaaacatgtggagtgagatgtccaaaattaattgcttgtgtcttggcttctctcttctttgtctgtgtgcttgctaacatgcatggttaggtgataagtcgatattttgtcttataaatatgtttaatttgtgtattaatattcttaaattgattttttaaaatattaattagtgtaattttaatttgttaagttattttgaagacccttttcaaaaaaaaaaaaaactattttgaagactaatcatgtatttggtacttatttggtagaaattttagtcacattttgaataaaaataatagtagaagttcgcgagttcaattttagttaattgcaaatttggaagaccttggcagtaaaattggacttggagttgaaca

SEQ ID NO: 214579 - DNA, 606 bp, Cannabis indica
gtcatcagatctgaaaggatttctgattgaagaaaagtgacgaagaagaacttagctgctgcatagggaatcttgtgcgtacaaccaagaatcttggttgttgttggtaatacatcactaattgttgtaaggattgtattaaattcctaattgtaaactggaaatcgtaatgcgaatcttgtgaatttagtggatattattaccctggttcgggtaacccaagcactagtcgattgagatttgttctcagtgcagacgaagcttgtaagtcgtagtgttctaaactgcttacacttcaatccgattcttgaatgtttaagttgaaattaatcgatctaatcttgaacaactcggtaacttatatcatgaaatttggataaattgttctttcaacaaatataacataatctttccatttatattagaacatcatcaacctattactaaacattaaattaagtgttattctacctttaatgcagtaccatttttaacatcatttttccgttctagctacaatggatgacatatattatatgacgtgcaatgtagtattacaatattcattattattattataatgagggatttttttatttttacact

SEQ ID NO: 214580 - DNA, 832 bp, Cannabis indica
aaaatatacacttagaaacatagcatacacaaacaaaacgaattttatagaaattttcaaattaccattatactacaaatacaacaagtaataagcaactataaccaactttaatattactagactagccaaaagattacccttgactagtagtaacttattatgacactttactcataatgaaactgaaccctatggctaaaacagatttcagtatataaactaacaaaatacaatgaaactgaaccctgccgtataagtacaatgaaaactaccacttgaaccaacttccattttccttacataccatctctattatataaagcataatcttactcattaatatattacacttgatcaaacttaaccagtatttgataaatttaaaaattagagaagctatatttaacattaataataccccacaccctcacaacgagagagtaaaatttttttttttttggaaaacaaacaaaacttcagaataattatgaaattgttattaaagtaactcttatacccaacttctaaggtaggggtgtaaattcaatccgtattattttattcatagtacaaccgatttgtaattgtgtggattttatttttttttatccaatccaatatgcacaaaagctcaaaacttatccaatccaatcagtaaaagtgaaaaattgtaacgagatattattaccgcaaaaaattaaacttaagtatttatttacaactggaagttaaatttagatatttatgccaaaattactcttttttttttattttgaaacaagttaattaaattattttgacccctcattgcaaaaaaaaaaaaattaat

SEQ ID NO: 214581 - DNA, 507 bp, Cannabis indica
ataaaatgttctacagattgttgatttggcaactttaactggcgcttgcgtagttgctcttggaccatcaattgcaggtatatcataagctactgcacttctaagtttttcaaatgtgtttatttttgtaacaagaaggtataatttatagatttgtaattccttcctaggaaattgtttcgatttgcatattggatttgctacaaagcttatctgatattgaattaaaaatgttgttggttctttacttctttaacaccaattataagtcgagttatcccataccttttccttcttgtaggtatctttacacccagtgatgacctggctaaggaggtagttgcagcttccgaagctggtggggagaaactttggaggttgccaatggaggaaagttattgggagtcgatgaaatcaggaatagctgatatggtcaatactggtggtcgtccaggtggttctattactgcagctctcttcttgaaacaggtaaatatggaatgaaac

SEQ ID NO: 214582 - DNA, 729 bp, Cannabis indica
aggatgagttgtaaccattgggggcaagcaaaaaattagagtttttaaaatatcgtgctttgagaatggaatgaagaaaggagtccggatttgaccaaactctcgaagcctgcttggctagaagggcttgattataatgagtgagagttttaaaacctaaacctccaaagaatttagagaccgagagagcagaccatttcttccagtggattttcctaacatttgaagtaaagtcccaccaaaattttgataccaaacattggatagtctgacaaataaattttgggatcttgaaacaggacatggcaaaggagggaatggcctgtatgactgctttgattagtgtttcttttcctgcccttgagaaaaatttatcataccagatattcatcttagaagatacattttgattaatgaccttgtaagttgtacatgcagaagattttgtaagaaaacttactgatgggtactatttgtaggcaactgatcacccttaaaaaaaaatgagtgatttagtcattatttttaaagctgaggagaaacagagtatatgggatgtcgattgacaaataaaagtaactgattcaattcaatttatacatatttatatatactaggcagttaaaatacaatgtatgtttggatatgaggtggtaattacaaatgaatttctaatatcttgtttgacaaaacagttagtaattacacaagaaaatagtatttttttag

SEQ ID NO: 214583 - DNA, 992 bp, Cannabis indica
ctattaagtaataatatatctcttaaattaataatttcgttacataatcatattttattgtataaaataaatatatatttaaataaagagattttagaggggttaaaaatttaaatataatataaattaatttgttgtaaacacgttaataacaattatctacaaaaaaaaaaaaaaaaaaaataattaatttataaatatttatataaaaattaaaaaaaattgttggagacacattaataataattacctcaaaaagataataattgatttattaaatttatatttataaactaatcaaatttttaaaaaaaatgaaaagaataatagatagtgatatttatgaatatttatgcataagtaggtatatttatagtttttattaattaataataatcaataatttgaaatatatgtatatgaatatttttttaaaaaaaagtatgaacatgaaaatattaagcagagaatacataaacttattgtaattaattttagattgtcacggtctaatttctctcatttgattgattgattgacatttttcaagaatgtgaaaagaaaaaaaaaataatataaattaaagatatattttatataaaataaaaataataaaatagaatgtttttgaagtgtaaataaatttcattattttcaaccaaaaatatatttttttaaaacgttgattataaatttttgtccgtgcatattactatttcaaggcatcaacctaaataaagccaaattaaggccaaaaattctgatagatattacagagaaattttttctagagtaatttcaaaatgcaaccttacttcagaaactaaatcaaaatattaatgacacaaaatattagtagaaaaaaaatttgttaaaaatgaagctcatgtagccaaggtaggaaaaaaatggcttctctcctacattctcctcatttgcagaaatgcatggagcattatactgattgaggctctgaggaagctgactgagag

SEQ ID NO: 214584 - DNA, 554 bp, Cannabis indica
aaacatattataaaatggtataaaattaataatttatgaattgaatattgattaggtaggaaagggtggagtttggaagaggtggggaaaatgggaggagggtacaacccacatctacaaacatcattgccagagcatctaagaatctatgacccagcagtggaaacatcagagtcatcacacagggcattcacaacaacattccctcgtgggttcgccatagagattcagaaggtctactctggtcctccacagattgtttacaagtttcgtcattggggttatatggaaggacccttcatgggccatgctcctaccggaaaactcattgaattcttcggcatcgctattatgcaggtaattcaatacacaatctccaacactacgtgtatgttataaggaactgatatctctttctcacttgattgtgttattataatgtatattgaaagttcttgtattaagaaagataacactaccataaaaatgttaaccttttaaatggtcaaacataatccctttcaagaggaatgtaagtgaaattcaaacttttg

SEQ ID NO: 214585 - DNA, 766 bp, Cannabis indica
ttgaagttgaaaaaattgcttcaaagataatttttcttgttaaaataataaattccattttatcctgatttaaacaattaatcacaacattattattggtataaaatgctaatctatttttctatatttatttatttcgttgttaattttggaccaattggttagtttattattcggatcccttaaaggtgatttcaagttattttgtctaaaatttctgagaaagcgtgatcttatataaattatttttttaagtgattcatattctcacttttgtatatctttagctagacaactagcttgttgactgaaagttctcttacatcgacgattatcattgtatgattcagatcactttctcttaaaaaaaataagaaatatgttaataataatttaatttatctattttttttttatatttttgaattgaatagttgttagagattttttttactttgatatcatgttagaatattataaaatgcatgagattctatctcaaaactattagtttttttttatcgacttttaattttggatgagatactcgctagagtttgactgtagctctgatatcatttagaatttagaataagatgtatgagattccatctaaaaattaattaattagctatgaaataagtagttcatcaatcttatatattctattatctttacacatatattaacattatgagattttttatctctaacatataatacatactaccaaatgttatataactagtatattctattttatgag

SEQ ID NO: 214586 - DNA, 755 bp, Cannabis indica
aattaatattctaagagcactcgtagaaaagataaaatagctaatggctaaaaaactttagctaagaaataaaaaataatgaaaaataatgctctatcaaatgagctattataggtcaaagatttagttcataaatagtacttagctacatgtaaatataagcactattcgtgtagaaaaacattattcattgagctataaatattatattacttttctaaatctttttaaaatgtatatgtgtgtatgtgtaatattattattgttgggccccaatctttcaccttcttggaccgtcacctcaccttgactctgacattagtataatattgttcgttttgggcctaagtcctcacaattttatttttgtgtatctttctaaagtgtcttatactaatggtggaatacatatattctagacaattcttatattgatactccaataattaaatttatttaaaaaataaataaaatatatatttaaatgaataatttttaaatgatatagagaaaatttaaagaaattaatatatgatataatataaatgtatgggataaaatagaaaaaaattaatgaggtattataaagagttaagaaattgaattgagtgctctaagacaattgatgaggatacaattcttgctcttcttcatttttttcatttatttatttatttcatttttttttttaaaagggttgtatgtataaaattcttaagatgcaatgattgactttatagtttgttttccaaatc

SEQ ID NO: 214587 - DNA, 620 bp, Cannabis indica
tttttttttttctttttcatttaataaatgctacattttctcttgtaaaatagtattcaaaatcgaataaattaataaaaaaaaataataagaatcaaaatttataatatattatttattaaaattttttaaaaataaaattataataatttatcttatttacctaatcagacaacataatcgaaatgtttaaattaataaaattgttcttttaaattaaactataatatataataattattttataaattatattttaaaaataaaattatcatcatgtatattaaaaaaataaaaataaaaataaaataaagttcattacctttaatagcattacttacaaaaaaattagtaggaaaatattttttctttcatctcttatttaatcaggctctttcttttgtaataatgtaagtattattgatttctattagggttcgtttggaacgctgtattaggtcgtattgtattgtattgtattatattgaattgtattttatacaatatttttatgtaaaaactatatatggtattaacttttatggacacctaaaatatataatattttagtataaataaagttttaacatagtattatataaaaatattatacataatcc

SEQ ID NO: 214588 - DNA, 852 bp, Cannabis indica
agagcgatagattaactcctaatccttatttataatgttactattaatcttctttgtatcatcgttaggtgctaatccttcaatattattcatgttgcgagagttttgatcagtatcaccagcggccttcccactaccactactcccccaccgccgttagttctttggccgccgcccttggtgataggagcttttctggattcagcacgcctcctaacaaaaaatcaataatatacatttttgagagtgatatagagttaaaaattagtaaaattaaacttgagaaaaattttcatactaataattaataaattaggagcatgatggtgagtttaaagtgctaacgaaatagtggcggtactactaaggtagataggcttcggccaagtcagcccctaacggcggcgatggtgttcggcacaaagctgcggagtagtagcgtcagagccatataaagattataataataataacaattaataatggagagaattagaggtagtgatatataaagaggggtatatataattagacaaagttacactgggatggggtatgaatatgatagggttaataattggtggtcactggtgagcatgtgggagtataaaataataatatattttgtaattatattcatatatatatatatagagaattgttaaaagaaacgtagtaagtattagttttaaagctattcttattaagtattagtggccttagtatttttagtacatatcgtattgattacgatattctctaaaagttaatacaataaactatattataacttgaatactaattagactaatactatataatatgtagagggtactagatactacgtagttg

SEQ ID NO: 214589 - DNA, 839 bp, Cannabis indica
ggcaaaccattaagtcatcttccgaaactaaggatgagaggggaagtcgatgaactcaagaaagaccgttttcacatagcttaaaaaagaccgtctacacgtagctcggagaaaaaccaactacacatagcttgagaaagacgagctacttgtagagagccttgatctctgtacagacctcattcccctagtcatcagaagatcccatttcctgaagctgagatctttttcccagcctttggatattcctcgataccagaaagaggttggcgcaaaagtcttttggggtaggtttgggccttgggttggctggattctcagatagaaaccatgccaacttccttcccagatcaacctgaaaccatgtcaatcttcctctataattcttcatcagcctgagaaagacctttaagattgctcacaagatctataccctcagggatcacttgtgaggatcgaccatggcaggctacgttgttccccgggtttggattggtcagaagctcctcaggcttggaatcagtcgttttcggctccagttgaggctttaagtctttaggagcaaatggaaattggttggtgcgtcttggtaagatgagtttggaaagatgaacttctgaactcagaagggacattctaccaggaaagagatgatccattctgaaaatggatctcaccaaaaatccagaggtttgtgaaaaattacaagattgagctgcctttttatacacaaagtacagtgacaagaaagctaaagattgcaagatgggtagaatatgaagacacaattcataatgatcatcgaaaccgtaaaaatgccagaatcaaaggatgcattt

SEQ ID NO: 214590 - DNA, 905 bp, Cannabis indica
ggcacgaaaaaatataggcttgggcacgacatgacacgatattacaaattggcacgacacgatacgaaaaatatgtctttaagcacgacacgacacgagaaacacgaaaagcatgatatgtaagcacaaatagactagcccgaaaagcacaacacacgacaagcccaaaaaatacggcacaacatattaaaagatattataatttattaataataataagatatggatttatcaattataaataagttaaaataataataaagcttaaatataaataagttaaaataataataaagcttaaatataatactgaatattataattaaaactattagaatatgaaaaaataagattatatattaatttatttatagggtgtgacataaaaatttgagtatttatataaataagtaaatatttatattctaatgatgttaataatttatttatataattttattcaaaaattatataaatataactaaagttttgaaatatatatatatgtataatttagtaattgtaaaaaaaatttgagaaaagtaaagcacgaatttaagtccaaatatgaaaaggacctggcctgtttaagaaatatgagtcgatatgagcaaaacacaatacgaaaatacttggtctacaggccgtgtcaggcctaccctttaaaaatattagtacaacatggcacgccccatatttttttgtggcacggcacgacatgaccattttatgaatagtacggataaatacgagtcaaaccaacacataatgcacgaacttacagtactatatatatagtgtaataaaattatataatacatataaaattataaattttccatatttagtataaagtaagaaaaatttgtcccacataaaaaacaaacaatttttttaatgactat

SEQ ID NO: 214591 - DNA, 628 bp, Cannabis indica
tacaaattaatttctgaaattttgaggcttaaatttcaaaatagattattttattttttaaattatggtcagattttaaatttttttttaatttcattaatattgatatattatttaattataagattagaaattttaatattggacatatttaaaattaaatgatagctttatcttttaatttgaaatattatattaaaattatcttataagattattaaataattaataaatttaaaattaacttagatatttttatagacatcctaactataatattttcaaattcaaaaatagattattttgtgaaatatttaattctttataaattatatgttagaaaagtgatattttatatcattttacttatcaaaaatttataaatagtattttaaattttaaataaccttgatatttttggaaaaatttgaaaaaggcttaatttcagatattttgacatataatttggttaattattattgtttattattttattcttaaaataatattttctatgctaattagtaattttttttcccccgaactttgacatgtactaaatcgtgcccccctgaacttttttggccgttaaaaattcccccctgaactattgagattgttaaattta

SEQ ID NO: 214592 - DNA, 561 bp, Cannabis indica
gttgtttgaacattggtggcgggtgtaacagttgtgctatgaacgccctggttgggtgctgaactgttattcctagtctcttgtacaccaggcgcaatctcatccacaggtttcgtcacaccgtgacccgcagctgatggttgtctaggatttacagcttgcagaacccttgtgtttcctagattctgtagtgtaggatcgaccgcctgtggatttgctggatcaaccacgcccctacgagtctgtaccactatcgtacttgtgattaaatttgcaataaagagcgatccttgattctactctcaatgaaagcaccaagatgttgacctcgcttttagccaacgacagtgagtctaattttgtgagtgacaaggtgtttaatatgattgaaatatagtaaagcaaataaagacacaagaattttaaagaggttcagccccgagcagttcagtaatagcctaatcctcattatttgtgttgactcaagaataaggagaaaggttccttttgttacagctcttataacagtatatatacgattatgaattcttagacaaaatc

SEQ ID NO: 214593 - DNA, 580 bp, Cannabis indica
atcactattttctacaaattttatacacacaaataaaaacttaaaatatacaaatttaaaccttaatcacatggatatgcattctgtacctaattttttgttttgtgatattttctgatttaaaaattatttttcagtgaaacaaaatttgaattttggtagaactttgtgtaaaatctaaatatttctaatgaaaatttaattatcagaataaaattaatttttattaattgtttaattaattaaaattagttttagatattagtagcttttaaatttgaaaatttgatttttccacaaactagccttatggttatttttgaaatttttaattattcttgtttgttttatttatcttaattataatattagatattgcttattttattattaaaatatgaaatgattttattttgattccaaatattaataaaacttagaaataatctagttaaaattttaaatttgctaaccatatcagttttttcaaaattttattttttgaaatacattttatcaaattaaataataagattaaaaaaatgttaagtttttgacattttatcttattagatattta

SEQ ID NO: 214594 - DNA, 624 bp, Cannabis indica
gtaagaaaaaaaaaatggaaagataatattcaataaatgtaagttaattatcaacatttctttcttaatttggacaaaatgtctaccaagtttactatattgggataaacgtgcaagactattagcgcatgtttagggattctagctaaatatttaattataaatatataataaataaataaataaaagattattttttgtatgtactttttatatatatatttttgtattttttacccccataaatttaatttttgttttagttttatcatcacatattataattttgtccatataaatttgtgttttccatttttatctttacatatttttttatttatactcataaatttactctagtctctataaaatttatatttttctttgtaataaaaataatatttttttaagtgtaatatttatcaaaaaaattttgcccccctaatatgtgtggtttgctccgccactctatgcatcacaccgatatttttattactcaaagatgattactcatcaattttttcacttccatgcatcatattaatttttttactgttgaatgtgattactcagctattcaactttttactatgtggaggcctgggaaggaagctcttctgccta

SEQ ID NO: 214595 - DNA, 576 bp, Cannabis indica
gaatcacatcttagtattttggtttagccgggaggtatagttagacattgggaatgtcgaaaatgttcaggattttagaatttcccaaattaccccttagtggcttttagtgattttagtgtttaaagggcaaaatggtcaatttgttaagttgtattttgtctttttgtgggatgtattaaatcaggtttttaattgatttctaagctgaattatttggataaaaccaacgtaatttcattattttgcaaaaaaataaaatagaaaatcatcacaaaaagtcacattttcactctcatctctctctcttttcgaatccaccttgaacaagctagggttcttgttttctgaccttcatttcagtgttttcagcagttcaaagtgtaatccaagccaaggtataagttctagtcacctcctttttgttttcttgaattgtaagaaaaatgacattttgcatgagttgttgttttggttgttgttcttgctgctagtgtttcttattgttttctatggtttaattatgcttagatatgtggttttaggcttgtgatggtggctgatttagtgtttgag

SEQ ID NO: 214596 - DNA, 944 bp, Cannabis indica
gttatggtctctcgcaatcgtcacaacacacatagtttcacatccgactttgacatcgcagttgattttaacccaatcttctagcggcagagaccaatcctgagtcccaatagactgtggaggggaaagaaggcaagagccataatttgtgtaacaagaagaaataaagtcaatatagtgtttaatgttacccattgatttattatgtaccttgtcgttgcgggccctccaaatcatatctaccacaatcgaggcatagaggaatagctcatcagtatcaactcctatggatttaagattccaaagaaaagtaacccagtcccacattcgggctcctgaatccagaacaggcataaccccccaaggagaagatcgccaaagatggaatgcaaagttacaatacaagaacaagtgctatgtggtctcctcagcctccccacaaataggagaggaaacctcctcaaaacccattctcttagcaagaggggctcgtaagggtagagcatatactccaccaatggaccttgtgtcgctccaaaatctttgagttccaaagtttgttccatagtgccggagcaatgttgcacaagggagcccggtcaagggcttgaacaagataggcagacttggttgaaaatagaccatttgattcttttgtccagatccatctatcccttccctggccactcggattaccgtctcttaagatgttactaacagtttcctggtcaaaaaggttgtggagcttgggtgtgtcccatttgttactaacagtactcttagtaacacgcttttttcattaatttcttcaaatcaatttaaatttattaatttatagtgtatattttaatttattggattctttattttcgctataatatttttataggttcttacaatcatttaaatagctgcttattatttagtctacatttatactttaa

SEQ ID NO: 214597 - DNA, 829 bp, Cannabis indica
gagacactttgtgccaatcactattccttgagctaaatccaatagcttaaatatgtctttatgttttatgatatatcaaattataaagtcaacaaataaaaacatctgttatgcttatctttcatggtataatattgtcctaagctttgttgctctcttcctctgaacagggaataattatttttcaagatgtatttgacaatgaaaacagtgttaatggtgttcaaatcagagtggaaggcgtatatatatggccattttagacaacttcgaatagtagctaacaggtaaatctagtggctttttgtcatgttggtcgctacattttattttcatgctttaaatattgtatgatccctcactctcagggtacagtttagactcatttacttttaatgtgtaaatattttatttgtttagttttatgagctcttgcagggtttgttttgctctttatgagttcttattttgataataccattcaatttttgcagtccaaaagatggagaatcaaaccaagaagaggactacatgttatctaatccatatcatttggtacatttattgcccatattattcgcaatatcttgtcgttgatgatgattttgtacttcaaatagcttgatctattgttttatgatgaaacacatttttgattttacttggtgttgtttgatctaatcctaattatagttatgtggaattctttctgtaaccaaaggatgagaattttgagagcgggtctctatcttccaatatggttttagtaagtattataagttgcctttttgcatgggtatgtgaatctcattactatgtttaggttaag

SEQ ID NO: 214598 - DNA, 999 bp, Cannabis indica
tcaatcattactcaattggatggtttgtttggtacgctatgccttacctgtttgttgttctacctttgactgtttatgccttaattgcataattttgaatggttgcttcatgtggggttgagttaaactttctgtagcaggacttagttaatgaacttttcgaggtgttattcaatcgatgataaacattgtaagaaaggatcatggttggttttgaatgattttaaatcttttaatggcctattcttctgttgggtaaagttgactgctttgctaataggattagattcctcaaaacaaaacaaaacaataatatgaactttctctgttatttgctctttttaagttattttaatcctgaaatacacaaaaagcttgttttgtcttacggataatattgtttattcagtaagtagtacatgtcaattttgtacctagtttaaaaaatgaagtttacagcaacataatccagtgaaacagggattattgttcccacctttgttatgttatctacatgtctttgatttagtaaggctgtaagaattctatatttgctttcatgtgtaccttgacttgaggcctgttgtgtataaaactacttctaaacaaacaaacttatgtacagtcctcaacttctttctagcatctgactcctaaggaatagaaaaacaaaagcttctttatgtgcatagtatttcaattagttatccaggaagctcttaccatcctgcagatttcatgagctgtcagaatttgatgaaacgagacgaagttgtcgcaggcgcttggctggacacaatgagcggcgaagaaagagctcaggtgagtctcatcaagaaagctcaagcaggaaaggtacagccactcagctgaaagatatggtttgtggacagattgagagaggggaagaattcagatatcagtccaagaaaacaacagttacaagcatttccaaatcaggtagtgatgagatgactattgaataacatcaatatcatc

SEQ ID NO: 214599 - DNA, 1267 bp, Cannabis indica
attggtttctcaataattttggtattatttcttaagatacatgtttattaataaaataaaatttggaaatattttttagaaataatttaagtttttaagtaaacttattatattttttaattaatttaatatttttatcaaatttttttagtaatattttagaattaatagaatattataatttttaaaattattttttataataaaatgtggcaaaattttgtatttatcaaagttcatggagtaaaaatattaatttataatggtaaagaaaaaataaacttatcagaatgtgcataattattaactattatattttaggaagaatttttaagtcatatattttagagtgtcataaaaagtttaagggcaaaaatggtaaatattttttttccgggaaaaaaatgttgcttaaatctttaacaatttttttatcttttttatatattaaaataataataataattacattatgaaacaaaaaaattgattaaagtactcttttatatatcgatataaataggggatttattgaaacacagatagaatttattatagacttaccctcaaatatatatggatacaagttaactcttcagcttagtttttataaactttttttaacttttagaacttggaaaagaaattattttaagagtggataaaaaaataaaaaatatttctttaattaaaagtcaagaacttaagatttctagtttctccaaaaaaaaaaaaaattaagaagttttctttttaaattaaaataatttatacgtattttaactataaataaaagtagaaatttcacgagacattaattttataaataataaatatcataaatatattttcataaataataataagtataataaatatatatttatattttttttaatagtagacaaacaaaataaaaataaaaaataccataataatacccattaatatttttttaatgcagagaaatcatacgaccaccaaaaaaacttaagacttttgacttttgagaacatttatagaaatgtagaattattaaactataccataaaaatcactaatgaaacatttattgtacataataaatgaaatccagacaatctaaacgcaaccctaaagaaagtaatcttgatttatagaataatgtaaattatagaatatcaggtgttattattgtgttctttaattttgttgttacatttatgtaaagaaagaaaggaaagaaaaggaacaaaaatagtattattagtaatatgaacccaatcag

SEQ ID NO: 214600 - DNA, 982 bp, Cannabis indica
tttttttcttattattattttgtcataatgtaggaaaatttaattatttaatatacattaaataataatataatattattttaatgatttttgacatgcttactattaaaatattttagaacaaaaaagtatcaaaactaatatagaagagagaaaacaaaatattatatttttaggtgagatgaaatttttttatacttttaaagaatatattacaatataaagaatattacaattagagatgctcttatagtttatttagtatacattaaataataatatattattattttaataatttttggacgcgcttactattaaaatattttagaacaaaaagtgttaaaatgttgtggaagagataaaataaaatattgtattttttaggtgatgtggagagtagaaatgctttcatagtttatttataattattttgagattattttttttgttgttttatagtttatttatatattgtaagtttatttctcgtcatttttttagtttttttcttactttttttaatgagaaaagtatatttttataattttaaaaaggtaattttgtaaataaaaatttgaggttgcaaaattataaataaaatattaaaaataattttttgaaaattctccttttatttatttttaaaagaaggttatgtaatttgaaaaatatatatgtcatagttcaattttttgtacagatgtgatataattgaaattgggtgtaattttaaataataagtttttcgtgattgttgatttaggagtattctgtgagtggtgtggtcttgattaatatattggatcggactggtcatatagtaagtttgggggattagcaattttccaaatctcactcgcaatatattaatctcaaaaatgcacaaactaccccacaaaagtaacatgtatacgatttgtaataattacaataattactgacggtgacgtttggtaaccttttgtttttttaattttaa

SEQ ID NO: 214601 - DNA, 584 bp, Cannabis indica
caatagtaagaaaatatcaataatcttctatgttggttgtgtgaaaaagaccccaaatatccaaatgaattaagtcaaatgcagtaggagccatattattagccaaattaaagggtagtctttttttgcgcagctaaatgagatacatgacaaggaaacaaagatgagtcagaatcattaaaatgaaaaaaaaattcaaggatttagtaacccgtaaagagggacgcccaaggcgtaaatgccatttgtgtacatcattacaagatctattggtttgaacaaaatgacaagtacaattattttcttgttagagaaaaaaaagttatccaacgcgattagcaatcccaatctgtagattctgactagtgttctgaatagaacaactagaatgtgagaataagactaaatattttggatcttgaacaatagatgtgaccgacaagaggttaaactgaaaatcaggtacaaaaaacacattagttaaacaaaagttagcattaatgtgaacaataccaaatatagtaacagggatttttataccattaggtaaactaatatgcaaagcactagggatagtatcaaaa

SEQ ID NO: 214602 - DNA, 611 bp, Cannabis indica
tcaacattagaggcttcaaacagcttattaaaataatccaacatcactcctcccaaaccggattcccagtccacccacaccccatcatctctttgaagacgctgaatatgattttgcctcttccgtgaactagccaagctgtgaaaatatttgctattcgtgtccccagaccgaagccaaaattgcttggatctttgcttccaataaacttctcgttgcgttaagatctcaaacaactcctcttgcttctcacggtgcaacttaaccgaagcttcatctctctttttcttcaaaattctaacaacccttttacaattactcaatctttctttgaaattcccggtaaaatccttcccccaaacttccaaggcttcgccacaacttttaattttatcaactaaatccctcccattcaaagcttcccaattactccgaacaacctctctacacataggctcgcgtaaccaagcattttcaaaacgaaaagagcgagtatgcaaacctgaagagtaagcttccagagctaggataatggggcagtgatccgaagtagatatctccacgttatacagtttagccaagggaaaaaactgaagccaagaataagaaac

SEQ ID NO: 214603 - DNA, 780 bp, Cannabis indica
ttttttttttttttggtaggttgacatgcttcgagaaaatccaattaaagccaaaaaaagatgacttttaaaagccgcagtaggtgggtctaaaaccgtacgtacttagatatatatatattaattgtaatatttagtcaaagttcaaattataaagaaaagtcaacagttggaatgagtcaaagtctttgatcataaaagatgttgacccataatgaacaacttccacagaaacagagtcatttaattttgagctcgtttacatttgaaacttgatcaattaatggaaactacttttgcttaattattctttcatatatttattaaataccatattaattcactttcatttttttttatagaatatcaaacacacacaagttcaatacaatttaacatttaaatatgtaataatatgatttaaggcccttgatgaatttcagctgaagaaagaaagatttcaagaaagagagagttttgcttaatttttaacttagagataataccaagttttcttaattaatttatgtaatattcagcattagtcttaaaaataaactaaaaatttcactaaagagaaccattaacaacttatagcaaaatataaattcgctcttatccttataaagtaagtttataatctaggagtaaaatggtctaaaatcataatcctaataaatttcgacattccaaatgtttaattatcttacacgactataattttaagatactcaaccgtatctaaataattctaatggcaaaatcgtcgcattttattat

SEQ ID NO: 214604 - DNA, 666 bp, Cannabis indica
cactctttttatcaagatagaccacactataaaatttgagttttaagtttgtcttgtttaaaaacatgtcctttatctttaatgtatttagaataaagtttttatataattaggtttagaataattgataatagtgtgattaatttgatctgatcactaatgaaatagttgttcatactctaaactttgacatgcattaagagaaaattcatgaagtgttaaaaaatcaagtcccaaattttgacacaattattagaaatttcacattttttatatctcatattaacactactaatgaaaaaaaaattaattagcaaatttttcagttcatacatccaatgccaagaaattatagtccataatttggaaaaaaagttttgattaacatattggactaatgttactagtttattttctacaataaatttaacattttaatacaaaattcaaacataaatacaaagtactttttttaaaaaaaaatcccaaatgaaactttgcttctttggagaaaaacctctaagaaaaaaaaaaaaaacacaaaaattgtagtcattcacctttaaattttactaataattgtttttttctttttggtaaaagatacatttatttataaaatactagacctcacagttgttacaccaaatattcataggaatacta

SEQ ID NO: 214605 - DNA, 673 bp, Cannabis indica
gaaattttgtgaatgtgtcatactattatcattttatgaagctttttgtgttcatatacgagtggtgtatgaagctttctaagaatggttctattcttgcttatgtatatattggagttattatgttatgttgcatcttatttatttgttggtcgagaccctcaaatagatagcaaatgtgttatttttttcatcataatactttaagaatataaaatttgtgcaatttcttaaaaaaaatgcatgatatatttagtagaaaatgagattataatttgtttttattagaatgtgttgtttattttatgttatctatgtaatatctttaagatacataaaaaaaaaatcttatacattttagtgtttgaataatcatttctatgattgtttattacattgtttgggatcttaatttttttctctgtttttgttcttgttcagcccatagtcactgctcctctagctccaccaaggcacacaaccaatcaagacccactccttcaaatccacatgttagttttttttccataataattttagttgtacatttatttgaaataatgtatagttagtaagttttaattttgtcatttatagaggctccaattagtgttattcaaatgcaaaccgaaagttaagattgtggataattctaagaaaagagattcatata

SEQ ID NO: 214606 - DNA, 415 bp, Cannabis indica
gaattataaattttcttgtatattttctcacttaagtcaaattaaagagatatatttttttatcatttcaatttttttaccatttcttaattttctttacttaacatagtattatggaaaaattttattttatagctttcatgtcaaaagttaataaaaatatgattttttgtaaacaaaaaactattttgctggaaaaataaaaaatataattcatggaaaaataactggttgggtatcctaagaagataaggtaactggtgacctaattaaactgtttttttttttcatatttttcgaattttttctttaaaataacttttttctttttaaaaaaaaattatgtttttgtacacattataaaatgtgcaattttcactaatattattatgaaatttttaaaatttttaaaaaa

SEQ ID NO: 214607 - DNA, 693 bp, Cannabis indica
ttttgaatcataataattaactcgatgaaacaataattaatatacattagtattaactcttttttgtataatactataatactaatattacatagcattagcaaaatacttgaatttttatgaattaatatcaaatgagttttatttagggcacaaagcccaacataatcacccaatacttttaatactataattaaaaatattaaaaagttagtgaaacccttggtagaaatcgatggtggagatgattgagacaaagtatgaaattcatcattacaaaataataataatcttaaaaaaacaacaatttttgttgaaaagttttattaatatgagatttataataatttttttataacagtatatttaattaatcctgaaaaatgtaacaaacatagtaataataacaacaataacaaattacgagagtaaaatgataatattattagtgttgaaaaatatatctaacacccaaatattttaataaagtagttacataaattatcactctctcctttaaaaatactcccatatctaaaaccatttctaatcgtttttataattatgggggttattaaggttttttatcatttttatctaatttgttactgttttgataatataatattatggtgtggaaggttctcataagataattcaagatatcaatctctggatattgatgaagtcaat

SEQ ID NO: 214608 - DNA, 675 bp, Cannabis indica
aactctaaaacaacttaacaaaccacataaaaaataacggtaaaataacaaaaaataactacaagcaaccaaaaataacaaaataatgacccaattgcaatatgcaaaacaaaatcaactcatcaatatacttttgtattatgaaatttttttacttaattttaacaacttgatttatctttttatactacattatttttcttttcatagatcgaatttgttgttacaacgtcatactttcaactttttctttttccatttttcttttttgagttactgacagttaaaatgataattaattttttaaaaattaaataaataattacattaataatagaaataataaaattttatgattttaaaatgggatatataattaataggtgaataattaatatgtcaatatctactactgcacattgtgtcaattgaaaaataaaaaccttatcattgtattttaataaaaaaatttgtcaaaaaaaataaactaaatatatgtatctaaactacaaagcaacacacatgcaactaaaaaaaattatcaaagaagaaacaaaaaatataatgccatgaaaaaaataaacatgaataaaaaacaactaaaaattaacttttgaacaaaaaatattctaaaaaccacttaaaaataacataaaactaacaaaataaatgcac

SEQ ID NO: 214609 - DNA, 637 bp, Cannabis indica
gtaaaaataaaaaattgacgaaaatatgaattgttttttggaatgatttcataaatacataaaaacaataaaaaaaattacaaaagtataattccgcttaattttaaatatttttacgattttttaaaattttataaatagaaaatgcagtcttgtcttttaatgtattttaatgttatacttttgttattttgtacacactgtcattttaaatttttttctttttttttgatgggggcaagaattttataaaaatctcaattttttaccaataaaaattaaaaaccataaacataaaacttccattccaattttaaattttaattgaaaaaaaaaaatcaaatttttaattgaaattacccttttgacccttgacttttgtcaaaaataccatatggttagtcaaacccaaagtcatatatctcatttcacccaaatttcaatctttgataatctccggcagcgcagtggtgtggtggtgagattgaatcggaaatgtcgttccttggaatcgatttcagctgtgctttgggatctctccgccatggccaatttcccgagaaagattgcttgcttcccctcatttctaagctcatcggctatgccctcgtcgccgcttccaccactgtccaaaact

SEQ ID NO: 214610 - DNA, 630 bp, Cannabis indica
gtgtccgaatcctagagccaaaactagtatcaaggcaagaactccacatagcttcagggtaacaatcattgcactcttagctctgtctggacgccctgcccctaactcatttgatacccttgtgctgttgtaacaacaataccaaaaatgcatgagataaaagaaatgttgaattgtgaaagattaatgtaagtttgatttatcccaaacctggctgcagcactaaggccatacgtaaagttgaatgatatggcttgtgtgtttacactgaagatacaagatagttagccaagaaactactcatcagtcgcaaagagaggagaaaataatcagaatggattaagatgtaacaagaaaattttgtagtgaagctaagcataccatattgcaattagtgaagtggttacttccgagttaggcatcagtcctgctaagaacaccagaatctcaaacgcccagtattccaagctgaataaacttaacataattagactgtgtaacatgtctaatttattaaatattcttataactctccaaaaagaaatagatttgagactttggtatatccagcatctgatcaataattaattatttcagtacgggcacttaccacaccatagctgcagaggg

SEQ ID NO: 214611 - DNA, 553 bp, Cannabis indica
taaataaaaatatatttttgatggaaaattaaacactaactttgaagagaaagacctaaaattgacaaagataatagcttgaagtatttaaaaaatcacttcatatatttattttttatttttttttcaattttatagtttgagttgctctattagtttctatatgagttattatatggatttagattacgatttaaggtggcgtttggttagaggtaataaaatgaaatggaaaagaaataattttcattccattattttgtttggttgcatttaaaactattagaataccattccgatggaatggtctttccatcattttggtggaatgactattccattttaaaatagaaggaaaggtcattctaatgtaagatttgaaaaaaattaataatttttttatgcattttaaattttatttcattccattcctattgtaattctcattctcattcctatttttatattttcattcctcacaatcaaaagccatctaatttgtttcgttaattgatacatgcgttactatttgaaattctataaaaatacaaaa

SEQ ID NO: 214612 - DNA, 435 bp, Cannabis indica
ctctctctttcttctctttcttcatagtattcgtctgttgagactgtactattatgttgtttagtgaatgggtttttgtttaattttcagagggtccgtcttctttgcttttttctttcttctttttttttctgttctttttctcagaagacaaaaagaggactccttttctgatttcttcttctgaaaattgtgagtaggttgatctgaagcttaaactctgtagaggcaaatcagtccggaaagttcttgtaagagaggccacatcgtacccttcagccataatagtggttggtatatcaaaaacccatcacagaattctgtcttcggcttcagtcgccaagcactgtgctgcaaaactctccagatgtttcactgttttcgccgttgataatggcaaagttgtctttaagagggaagctactggtacggaac

SEQ ID NO: 214613 - DNA, 616 bp, Cannabis indica
acattctcttctattatataccccatcttgctagtggcaataccttgcgtttgggttaggcccatttccagatggagaattggacagatcaaagcccatttatctatatatatctatggtatgatctaagaatagaatgatgatagtatgacaaatttggtctttgtagttttagtatttttgacaagtttattttatctagtaaagatttataatccttaactcataatcatgtaacaaccaaaatctatgctcaaatattaaatgataaaataataataaaatagctaaagaataaattcatattaaattcagtcttgatggccattcacttttattggtgtcaagtataaattttgcctaaaaaagtagtgaccaacattgaagcaatatgaaggaactttctatggaataccaaagctgagtatcatgggccaggtgcaattgcttgggattttatatgtcaaccaaaaacagctgggggcattggattcaaggatataaggtcttggaataaagcggtaaatggggaagtacatttgggctattgccaacaaagaagatagctgtggatgagatggattaatagtgtctatcttcatgatagtgattgtgg

SEQ ID NO: 214614 - DNA, 585 bp, Cannabis indica
ctttataattatttaaactgatatagaagttatcttgtgttcaatttctggtgcttctatatgggtttcaattgttttttgtttttaattattttcttaatttttttgcacaggttctgttaggtgatgcattgtttcgtgagagagaatatcgccgagcgattgtaagaatatcagcacaatttatatttatatatatagggcatttgctcctactgtacggcgatttctaattttcatacttgttatatcccaattctgattacttttccggtgtcaaaaataaaattcaaaatagtctcttttatgcgcttaaataaaacgaacactgtgcaactgaaggtttgaattctattttcggcactttaaattattcttaatttttagaaaacagatataatgccgagtataactataatatacaccctcatataaaaaaaaattagtttataatttctctatataccaaatacaagaaatgccccaatgaatggagcaaaccttaccaatttttttcatatatatatatatatatatatatatagagagagagagagagagagagagagagagagagagagagag

SEQ ID NO: 214615 - DNA, 596 bp, Cannabis indica
gcaacttttttaaaaccaatacctgcagctattttggattgacaaacattttcccaagcgatttgcctggctcctatcatcatatgttgtcatttccatagaaaagccttgcaaatgctttctatctctttaatgaccttctttggaagaagtatgacctggctccaatatgtatgaattgctaacaaaactgagtttacaaggacagctctgcccgtaaaagaaatatgacgagtactccaagctctgattctctgagtcatattttcaaccaaactggagcattcttttggtgataatcttttaggactgataggaatttctaaataggtgaaaggaactccacctctttggaaacctgaagcatcaagaattcgttgaatctctgaatgagtcataccatgacaatagatagccgatttggagggattaagttgcgaacccgatgtctgagaaaacagtttaagaccctgtagcaagtaaatgatgctattgaaatcaccattgcaaaatagtagaacatcattcgcaaacacgagatgattcaaagtcagctccttgcatctatgatggaaagtgaaatcggttttctgccc

SEQ ID NO: 214616 - DNA, 296 bp, Cannabis indica
ctgattggcattttcctaactacacttgttctcttcccatcttcaatccttgctcgaaacttggccgcaggtacgcattaatatatatatatataaataatgatttgttaaaattaatttatatgacatatatgcatatggttgaggttaattttcttgtaataatgatgatgcagatgaagttcctaatggccagaatgatcagcagccaataagcaaaggaaccgatggtgacagtgggaggcctttaaaaccgccatgtggcaaaaccaaacctggttctccctactgtaatg

SEQ ID NO: 214617 - DNA, 749 bp, Cannabis indica
ccacctaaaacactcaattagagcacaaaattgtgaaatttagtagcaagattggctttaaagaaaatattaagagaacgaatcttattgaaagatttaaattctatagttaaattctattacacaataatttttttaaaatgagtaaacaagaattatgcagaaaaaaactcaccaacaacaatatcaagggtcttaagatatctaaagtctatataactaatatcttggtactcaatcatcaaggttaaaattctcaaagtgatcaatttgaccattgaattattattatatttattggtgtaaattgaaaatccaacaccattaataacgtgcaatttagtggataatttagtatattcttaaagtaaaatggtataaaaatttcatatcaatttaataaaatagtgcactattacaaatgctctcagccttcttctttacatcacgagccactatcattatcaccaccactgtactaccaacaccacactaatttacaatttacaatgctacatcaacatttgactaatgaaacgacaaaatttttataaattgaaaacttgaagaacaattttcaaccggccgtatattttaaaagtacaatctagtaacgtcatgcgtttagaggacaacttctaattattctttcaaatatttatacttttgaatccaattttaatggagtactttcctaacacttatacaatacaccttgagtcactttttgcacattcacactcaaataa

SEQ ID NO: 214618 - DNA, 1163 bp, Cannabis indica
tctataaacatctcctcttctcgaaaccataccttccaggccatgctctgtattaaaaatgattaccctttaaggagggttggaatattaaattatctaatattaaatttatagattcactcccgcactacatacatataagtggctgtttggaatgggttaatgctagcaagggaatgattaaacattactttgtttgttttgagggtttagctttgggatgttattctcttagtaatataattattccttaaggaagataatgttgacactttaaaaaattgcataattgaattattatcttctattatattaatttgaatagcatttttaaattaataaataaatttaaataccaataatattatcatttattataaataaaataggaaaattttgtagtgcacccccttaaaagggatgcatcgttacatttctatccgttttagtatttgaaataattttttagtcaaatttattctcgtgatgatgtaaattatagttatttaagatattttacaaaattttaagaaattcggataagtttaacatgctgaaaattgcattcaaacgatgtgttgcacgcgtgattattttattttatacatgtgtaaaatactgtttgaacattattttctatattgtaaattatttcgaataattttttaaaattttggtaggatatcttaaatatttataatgtacatgaatatgaaaaaaaaaatatactaaaaaattcttttgaatgtcgaaacaagtagagggtgcatcagtacatccctttaaagggtgcattgtagaatcacccaataaattattgtgatatatatttagtctgcgagatcagtttttttttttcttaacttgagttatatttatattattagcaataatatttagggaaattctacaatgcacccccttaaaagggatacattgatgtacttttatctgttttagcacccgaaataatttttagtcaaattttttctcatggtcatgtacgttatagttatttaagacatcctgcaaaattttaacaaatttgaaaagtttaacacgccgaaaactacgttcacgcgtgactattttattttattacgcgtgtaaaatagaaccgtttgaacattgttttctatattgtaaattattcggaatttctc

SEQ ID NO: 214619 - DNA, 720 bp, Cannabis indica
  modified_base (654)..(654): a, c, t, g, unknown or other
gaatatatattattagccgattacaaagtgcagggaataataattattggtttttcagttcatgtgacttaatagggaaaacccatcatagtgagagtgagagagacgaggacaagtacttaaggaccacctcaataattaacatatatggccaaaacatgcaatccaagctagctatggcttcatattacttaattctatgttattcatatttaccaaaataaaatgttttatgtaagtatatatatactaaacaaaaatatatttagttatagaagttatataaaataaatatgtttttttttaaacttcatgttttttatggggtctaactattttttctttatttatgcgtttttatttaatgacattgaattattttttgtaaaagaacgcaattatgctatatttttaataatagttataattttaagagttactttgtaatttcattaaccattttaaattagtttattaatatgatttttttttggtttaaaatttacatattttcacatatattttataaattttattaattatataattattttattatttgttatcatttattattatttttattatttgctaattctttttttatattgtatatacattattttactataaattaccttcaattgttctatntaaactagttttacataataaagtacataaacaatcaccatcttatattctagatgtgtcgtttaa

SEQ ID NO: 214620 - DNA, 1277 bp, Cannabis indica
aataataataataataataataataataataattgagatttagtattggatttctgcgttggtgagaaagtggttttgacgaaaataccctcggtgtaagtgcgatattttgcggtatcttcacttttaaaaatatactttttgtgcgtagaggtcgtgggccaatgggcctacgatgggctcgatcgtgggctgggtaacatacgtagatgaaaatgcagcaacaaatttgttttgagagaaaatttacacttttatattctttttttacttcatttttttattttttacttcttctttttttaaagttttattcatttttacttttttttttaaatattgtaccaattttgcgtatgtttcaaataaatataaaattagaggtaaatttgattaattgattaataaaaggaatatttttcaactttaccccaaatttttgatttagatttttactacaaaatacctaaaatcctatttatataaatatatttttggaaaatggaaaaaatagaatacttttcatttataaaattcacacccaaaatacttaaattcaccaattcctatatcgtgcgattcctcttgcgattctcttacgatttttttttccttctcctccttttttttactaaagtttttgatttgtaacctttttttcagaaaataacatcatttttacattatttaagtatagtagcaatgtgaaaaaaagttgttttgaaaataaccaaatattttataaaaaataaaatagataaactagtgaatttatgtgagaaattgataacaagtggtgttcatcactatttatagtaacaccttataaatagttaatcatatattctataatatatttaattacataaatataaaactattggtacttttatcatttttaatttttttactttttattgtagaacggaagtttttttaaaaatactgtgtaaattttatgttgtatactgtgttaaatttttactgttgttctactgttattttttaattctactgttgtttttagttgttatgttttgtgttccttattttataaaaatacagttatttttttttaaaaaatagtttcataatattttataatagttaactcattaaaaaaaaatgacacgtagatattgacttgcaattcatttgcaacataagttaaatcaattgtatttatgcggcaaattactcatatataattagtcgacgtttatttttaattaaaatttaaggtaaataccattttagacttggtattttgtaaaaag

SEQ ID NO: 214621 - DNA, 837 bp, Cannabis indica
tctggatttttactttctgattgaaaatcgttgtttgtctatttatttttctatttattttattatttgtttcttaattataatttactttgtgttatctaattaaagtataaaaaaagtataataattagtaaaatttaataattaattactgtgggttcaacaacctttttagtaataaaattttgctataacaacatattgtacgcttgcaataaaaatagtgtataaatattcagtggtacatttaagtttaattattattctaatttatttataattaacaaatgcaaatctattattattattattattaaattataagatttttttaatgtatcgtgtcgtatttttcgagcttgtcacatgccatacttttcgaatagtctattctttgcttacatgtcatgtttttcgtgcttgttgtgtcgtgcttaagcacatattttttgtgtcgtgttgcgccagtttgtaatatcgtgtcgtctcgtgccccaaacctatatttttttcgtgctagatcgtactcgtgttagtttcgtgttgtgtcaaaaagcttggaccgtatttacagcaatattcattactaaaaatatattttttcaattttttaaaagtatattatttcatgaaattaattaaaatattatcatatgttcctaatgtaacacatatatattaattatttcatcattttttagtacatatatataaaaaaaaaaatacttgatttttaaaagagaattaaaatcatttttttagtacatatataaaaaattacttgatttttaaaaaagaattagaatattttttggattattgtccaataaaaattga

SEQ ID NO: 214622 - DNA, 678 bp, Cannabis indica
gctgcatcgactataacctccggctgcttgctgtctaaaatattaaaaaaccaggtgctgaattcgtccacaccagcagcagcagtagttgccgagatgttccaacaggctttggcaaaccgacaaccaacaagcacatggaaaatcgtctcataaaagacattacaaagagggcaaaaaggatcgacattcacgtgcttagtgctaagttgaaccttcgttggtagagaacccgaacaagccttccacagaaaatgaagaactttcgaaggaacatcaattttccaaagccttttccagtaactatcttcatcaagatgaagccaattaccgcttgaagattgaagataattataggcacttttgacggtataaaacccagattgttccatcatccaataccaagaatcttctgttgttgaatcactcagctgtatactcataattagctgagcatctcgggcttcaaacatatcttcaataatctcagcatcccaccccttctcttccatcaacatcaggttggaaaccaatgtgccttcaagaccttggttgtccgtgagaacataaggccaactgtcatgaggcagccaaggatcaagtaaaacactcacagaggagccatctccaatagatcttctagcaccctgccgaacaagtgattgggcctcccaaata

SEQ ID NO: 214623 - DNA, 1127 bp, Cannabis indica
ttttgcaaggagcttgagatgtcttatcagcaagttctcataaattttgttcaacacgacttggagcctttgtatgaagcatggtggagatacaagacatttctaatgaggtttccatatcatgggctatccaaagagtgtcaactagaaatcttcctaaatgggttgaatccaagcacacgagaatgggtagaaagaggagatggtaccaccaatttctaccaactatcaattgatgaagcctattggatgttggaagacatggcagagtacaatgagtggtgttgtagttgtcaaaaaaataaccatgtttgagggacaactacaacaatttggagccaaagtttgacacttgcactcaaggaccaaatgatgagaaattgggggattttcaagagttcaacatagaagaagagcctcatcaaatggctcaactaagttcacttgaggcgttgatgatggagttcatagtgaaaaatgatgccttaattcaaagccaagcttcatccttggagaaattggagaatcaatttgagcttttggtcaatgagttgtgtgataaatcccatgaaactttgggtattggtatggaaaattcaaaggaggaagaagaaagtgaaatgtcattttgaggagtggtgatgagttggagatacttggagaaaaatttgagcaattacaagagcccactgctatccaaagtagtgaagaaaaggatgaggaagcaagcctttcaagtttttcaacatttgtcgctactcataatgttgtagcattttcacagcaaaactgtctagtagttttatttgaggttgaattgtgttagagactattttaaagcttgatttcagttgtttatagcttgttttggaagtaatagaagctgtagcggatttgaggatgtttgagttttgagaactcaagctttgctcatccatggtgaatttcattgcatgatgttctagatgctttgaagttgtgcgttatgtttagattaactcaaattgctattctggaaagtttggtagcttttggttaggttgggagctagcttttggggcctaaaagttgtgaatttttgagcccttgctgtctaggaaaaaacttccacgatgggagagcttccg

SEQ ID NO: 214624 - DNA, 1201 bp, Cannabis indica
gccgaagcatcttacatgacttagcagattgtgagccggcctcgatatcagccgagccgaggagagagccttggtagaagatggacatggttgttgaggagtaatggatgggtgtgatgttagggtttgtgatatggacggtcagggattaactcggcgtcgagaactggaagattgagtttgaatgaggtgaagttgattgagatgaggtcgaagtgtgggtcttttggcttggctgctaatatggctgtagccgccactgccgacgccgcgccgagagccgctgaggtccagctccattttacctttttgcccatggaaatttgggagttgagttgcagaggtaaggaagtaaagtggtgaagagaagaagaatcggaggtggggtttttgagttggggattttgggggtgaaattactgtaatgccctttggtgtttttgagtgtattgaagttgtagaatgggggtagtgtggtaatttgggtggagtggacggtggtgtactgtggttgttgggaagagtcggaggtgggtttttgatttggggattttggggtgaaattgctataatgcactttggggtaagtgtatattgaagttgtagtgtggggggtagtgtggtaatttgagtgttgagtaatggtgttgggaaaagaagagtcggaggtgggtttttgagttggggatttgtgggtgaaattactataatgcccttgagaataagagcattgaagttgtggtgaggatagtttggtagtttgggtgttatgtcatggtggattggacggtgggagacatgttgtaaatagtgtggtgttgggaagagtcggaggtgggtttttgagtaggcgaattttggagtgaaattactataatgccctttggggttaattgtattgaagttatagtgtgggggtagtgtggtaatttgggtgtagtggattttcaaaaggaaaatttgatggtttgaatatagaatatggttcgattgtgatccgatgatggtctgaagttacttttttttaatgtaaaaaaaaaaaaaaaaaaaaaaggtaagacatacgggccaccatctgactcccatcggaccaccatcaatatagacgggaatagagagtatggatggtgaagttagaagagaagataagagagaagggtagtaatagtgtatgaatataaaaatatagccattttttttt

SEQ ID NO: 214625 - DNA, 940 bp, Cannabis indica
attaaaaataatgtatacacaattatgttatgcacatcacacatacatcttatattttaatgtgtgtaaaataaattatttgaatagatagagaatcatactttatatattataaattattttaaatttcttataattttataaaatattttatataactacaatatacactttatataaaaactacaaatcaagataataactattcagatatcagaaatacaatgcatcaggagacttgtctttaagaaataaacattgctatttcgtaccttaaggtactcaatatcatatcgatataacactttataattagttaacagttttatatataacactaatattacgtcactttttgagtcttatggtgcttgaaatgctactataaaaatacccaataatttatattattttttcactataatcttagtaactttattttgtctaacgtttttttttaccttcttgtctaaatgtgatccattttcttttttctttttttttttttgaaagaaaatgtgatccattttcaaagggttcaaaaaccaaaacaccctgacaagagttggtgaatcctgtaaccaggttttgtccccctcaaaacacaaccatttgtttcccaacatccactatttaattacttaaaaataaataaacacataaattttaaattttaattaagtcacactagtgagtggctaacctaaacaaattaatacttaattaaaaaaatagttattattcttaataataatatggattctacactaagatttgatgcccatcactttccacaaactcactccacaaggaataaaaatctaaaaaaaatgcccaaagaaaattgaaattctaaccaaattaaaccaaactcaaacttattatgagtatattccacaggatgaagtgatgagccaaaagcttcaagaagaaaaaagat

SEQ ID NO: 214626 - DNA, 565 bp, Cannabis indica
ccaactaagccaaaggaagttcaggatttcacaggaagaatggcagaacttaacagattcatttcaaaattaactgataagtgctactacttttcaatgtattttgaggcaacaaaaaattttagtggacagaagagtgtgacgaggccttgaagagcatagaaaggcatctgtcgacacctctagttctggaaaaacctataactggagagacattactcctctacttggctatcttggaaaatgcaattagtgctgcaatactgcaagaagagggaaagcaccagcaacctgtttactattttagtaagaggttactacggaagaatcgaggtatccccctcttgaaaaacttgacttatgcctaatccacgcatctcgcaagttatgaccttacttccaggcacatccaattaaggtgttaattgatcaactcctgagacaagttttatcaaaaccagatgcttctgaaagattgataaaatggccaattgaactggggcagtttgacataacttgtcacttacgaacattcatcaagagccaagccttgacagatttctag

SEQ ID NO: 214627 - DNA, 715 bp, Cannabis indica
agagagagagagaaaaggagagacatgggcgagtaagtgggctcggggttgctggttctcatcgagaattgatggttggctgcggtttactctgacgccaaccaaagcaagagaatgggaaagaaaaatcgagaaagagatagggaataaagagatgagatgtttatttagggttttgaaaattagggttacaaatttttataaaaataatttgatttataattattatcttttaaaaaaaactaacacatattagtgacgaccccaacgttttaaaaaaagttgccctaacattttaaaaaaagttacacattatcaatgacgacaaaagaggatagaggggactcaagtggtggtggtctgtacatatattgtaagaggaagaactgacaaaagagaattcaagaacaagtatagaagcaatagtcaatccaagacaaagtccaagttcaagagtggaaaattttgttactactgcaagaaggaaggacattttcaagatgaatgtagagcattgaaagccaagaatgctagaagcaagagcaaagaaaggggtgaaaaaaatgttgcagaagatggatatgaattagtagatgtgttagttgtgtcaagtaaagaatctggtgaagaatcggtactagattctgggtgctcatttcatatggcacctcacaagaacctgctttgtgcatttcaaggacatacaaggaggaaa

SEQ ID NO: 214628 - DNA, 526 bp, Cannabis indica
ttattttaattttttttaaaattctttttttactatttatattttatattaataaaattcttgttacactaaatatattttattagttgttttaagttttaaatatactttttatagttaagtagatatgtgtatacattaatattatatatacagtaaataaaatatattaaaaaactaatgaaagtaagctttactgatatatttagaaaaatggagtagaaaattcattaggagtgttcttaatcatacggtaaaatatttatttattattattattatttgaataaaaataatctttattaaacagaaacatccgctaatacagaggactcaagagcaatgggaatatcactctcacaaaagagacgacctgaccaataacaagcaccacatgccatacagtgcgcggctttgttagcaaaccgtttaatatgaccataaaaacattatttaaagaagataaataacttgacaatctttaacaaataaaccaaaaataaaagaacatagataccgaactagg

SEQ ID NO: 214629 - DNA, 607 bp, Cannabis indica
atcccaaaaggtacttacgtttagtttatagatcaaaccccaaatctcaatcaaagattgtataagatatctattattttattctatttgagtgtaataatatattttattaattttttgttttttaattagaaaagtaaaaatattttttaaaaaatattttataaaactgttttttattttttaatttatttaattgacaattaaacttttaaaaatttcaaatacaaaaaaaaaaaagtactgttaaaattttttaaataatttttttcttaatcaaggactccgactctcaacttggaccttgggacccgaccgaccccattttcagactcgaatcaaggtttcatcttagacttagatctaaacttgacttaaataaaatcaaaaaattaaaattaaaataaaagttatagaatatactcttattttcagtttttttttttaaaaaaattaattaccaaaaataatttaatttttaaaagtatagatttaaaataaaaataaaataatacaacacaaagagatcttaaccatttgttttttttttctttcaatatggaacaaatagatgcacgtatcataatctcaggcttccagtctatta

SEQ ID NO: 214630 - DNA, 534 bp, Cannabis indica
aaaataaaacaaataataataattgataaacacgaaaatatcaatcaaaaggttccactagtttatgtctttacacggtaattatagaaagttgtgattaattacagtaaatcgatttaccagtttcattgactttttttattttcgagaatagagatgatgtttctcatgtaaaaacaaaatcttcaactaactttaataattaaaatctaactaaaaaatgtatttcccctttgatgaccgatccttcatgttcacgtaatcattatttttttatggagtttggttcattaatgagttatcctaaaattgttagtcgtttaactctgaggttttatattgtcttgtaagttatggtgaaataaggttagtgaaaaaattgtgtttttcatttcctaatatttttttttaatatctgttattaaaatagaatatagacgtgtgacaaaacgataacagaaataaattatacaaaatttaaaatttgacataataaaattgtacacgcgcaatattagtattctttcaaatact

SEQ ID NO: 214631 - DNA, 516 bp, Cannabis indica
tgttaaatgacaaaacggaccctttccaaaataggacttgagcttaattttcgacaactttttttaatataaccaacttaaacaaaattcttaacacgaacagatacagaaaatgtaaacagttttgtcataacacatttagtttagattattattaaattttattttgacaaaaaatcagttcaaataatttacggtttgagtttctaaagtggtttctatgtgggtttttatacgaattttcattgcgatttaaattgcagcgctagttgcaataggagtttctatgtaaaattttgtaaatatatataaaaaaaataaaaaataaaataaaaaaaaaaggctgttttgaagacttacacatgacttgactaagtcataggatgtgcttgtctgcacttaatgaccccaacaaatcttattcggtcaaatctaaggtaattaagtgtatttgtttgtacttattggcacttaaagatctgattcggttggatgtattaccaatgcttaataaaa

SEQ ID NO: 214632 - DNA, 668 bp, Cannabis indica
atttaacctgaaagtacaacaacaacccataacaacatgcattaaatgaagattaattaattaactcacacaaattatgaacaattcaataataataataaagtatagaaagagtaagagagaataatggaattgttgtcttgagctgaaactctgaagagagagagagagagagagcttttcaatgatttggagacacaataacatttgtgtattttgtgtatgtgtgtgtatatatagtgtgtgttacatgtgacaatcttaattaattaaatatattattatagaaaattagggaaacaacgtgggtgtttcttctccaacggtctattttttcttcttcttgatgtataggtagagctatatagatagagttgatgagtcttattacttactactcacactatctattcatatatgtgggtcagtcagtgcatatatatgtcataaagttctgcacgtgaatatacacacatgaaactatcactggtaagtaatggtatcttataacttatagtagttggctggccaatgtgtgtgaatggtacaccactaacttctgtttactcaaatatatattaattgtcttatctacatattgattaatttaaccttaatgacattatatgtgttcttctagttatggtccaagcatggttaaataccta

SEQ ID NO: 214633 - DNA, 1363 bp, Cannabis indica
taatatatataatatataccatcccatgctagtaataaaagtatcaaaaaggacaaatgaatttaactttagtaaatagagtatatttttcggtatggactagtggaagtattttgatttttgatctcattttttatttctgttttttcaccataatattaattatttttatagtagtaaatcttttacaagttttcaaagagaagaaaattaaaacaatttacaatatcaaaaaacagagttaaattgaataaaagcactacttacgtattatggggctggtagttaagttagggcattcaaatatggctgacatatttaaatttagttttttcagtattataaacattaaaataataatataagatgtttttacaatgtatgcaccctttatttattttgacatcgagaataattttttagtctaattttttttttatatccttgtacgttataattatttatgatatcctacaaaattttaagaaattcaaaataatttataatatagaaaacaatgttaaaacaacttattttacacggtgtataaaataaaataatcaagcgtgcaacacactttttgaatcatattttcgatgtgttaattttttttttttaaatttcttaaattttacagaatgtcttaaataattataacgtacacatgactatgagaaaaaatttgactaaaaacttattttgaataccaaattagatagaaatatatcggtgcatatcttttgaaggggatgcattataaaattttccaataatatatatagaaagagagaaaagtagactactatatattctatatgtatacgtatatagatatataagtttatatatagttttatttagcaaccaaggaaggaagaggcatctatgcatgacaaaaacaaactcacatcgttttcaagtaatagagaccggacggactgtgttcgtaatctattaatctcagagatgagacgtgatcaccaatattatcattaattcctaaaataacctttctgtctcttttgcaattacaaaacttgccattttcacgagctttgtcactgtccatatcataatgttgctcgtgtttaatcatttctaataataataatgcaaaaatgttggaaaagagagaggtcactaaaagattctaatcaaattaacacacaaattcaaaactaaacgcgttaataataatcaccatgtattaggcacctctaacaaattatataagtagcattttatcattagttatcgtatattctctaaaacgttattttttttaaactttaatatggtactctatacttaattataccagtatcgacatgaggctgaggagagtgttagatactaatgttac

SEQ ID NO: 214634 - DNA, 564 bp, Cannabis indica
ctctcatggtgcctgtggaggaggtgtgacatcctcctccacaggggtagcaaagtgagatgagatacaaaaactgacatcatcaatcacaaagttttggttcggttcaacaaagtcccaaggaaattcgcggacaactcccgggtgttgacagtggactttagagggtcgagcattcaaagagcagtcaacttcatcaatctttctttttttcagcggcgtcgttctagcattggtttcagaagttttttgaaccccaatatcaccaccaaactcattaatctccgaaggcttcaagttaccaaattttttttagctcttgtggaaaaaattcttgggcttggaaaaatttttctaaggctcttttttcctccacctgggcattaggcccatattcaaccaaagagtaataaataggtcggcccaaattaaaaagcccagccaccatctcattaaaatcagccgtgggcccactaaacttcactccactattgaaaaccaacttactacaggtatcaagtttcaaaatttcatttcgagcacgtggggtcccctccaaataac

SEQ ID NO: 214635 - DNA, 574 bp, Cannabis indica
taacttaaataatagataaaaaggtgtaaatatccctatttcaaagggatatccttacctacttgaattagatcttttgtaagctctacactatataaagggcattaactctctctcattccctaagtcattccaagtcaccccacttgtataaaaaggcctaaggtacacgtgaaagcctctatctctctcaagtatcatacttcatccatgccacctagacattaagtcatatcttcttaaatccttcacaagaacttatcagttcttggtctgcaacacattgttctcaccattgtaacattcaaagagagtcataactataatttataaggttttcacttatgatctacatggtatcgtctctagaatcaatacaactaacatgggagtaggtcattacccgctaaataaggaagtcgagcctctataaatatatgtgtcatctttactatttattgtccttatttacacgtgatgattgtcaatcataaataaggctccactgttagttgaccaaattctgattcaataaattatatcatcaatactattgtatttccctttattttta

SEQ ID NO: 214636 - DNA, 1025 bp, Cannabis indica
cttttcaaaaggatggtttgataaagaaaaaagaaaaaggcatggagattaattaacataatgttatgatatttaaagaaaaaaaaaatacaaagatgaaatgctaaagggtgatttgggttcacacggctcgattagatttctcggatgtgttatatatgcggagaagctgcggtctactgtttggccgtctcgctggctatggagttagggcataagtttattatagtggagagtgactcgagattagctatcaatgctctcaatgggaaggagtttcattgggctcttgataactatgtctcattttgtattaagtcatctccctcttttatttgttgtaattttttttaatgttagtaggtcttgtaattttgttgcccataatgtggcaaagtaggctttcacccactagttgtactgatctattttgatctccaccttactggagtagctattttgtaatgaccgagaggtctaacttttgctttatctaatgaatgattacgcttattttcaaaaaaaaaaaatgctaaatatttctttagtgaaacaaaattatttctgaagaatcattcaaaaaaaaaaaaaaaaatgccaaacactatataaaatgagcattaggcaccaatatttttttaacactatgagtacttagtaacttttcatagtatatattaagttaatattttttaaaattaacttataaggaaaagagtgcaaatttcgccagtcagcctcataagtaaaaataaaaggaccaatgcttcagagcaaagtcatcggactgattctagaggcagaactgcaacagaaagaaaagtctcatgcataggcgcgaaagtcttttgccaaaaaagatagaaattatcttgtgaattctagtagttagagtgatgatgtggaggaagttcatccaatattagatgacgaaagtggaagtctctcaataaatgatctccaggcacgactgaatgctaaaagggaaaggcaagaaacaagaaagccaggcctcatggagataa

SEQ ID NO: 214637 - DNA, 767 bp, Cannabis indica
tttctctttttcaaaaaaaatatgcatgctctattttattttattttattctataatgtagatatttctcatcatatgaattaaatgttcattttgacacttaattaacataatatacttttaaaaagatgtttttaagaataagaaaagcacattacaaaaaaaatgttcccattacttaaaagaaaaaaaaaaaagaaaaacaaaacttgacttaattaaagcaagcaacactgcaacagccactagtaatatactaaaaatcaatgccaagcaaaaacttgtactgcttggtccaaagagtaaagcaatacttactcaaaaaccaatacagagtgtatatcaaaactcttcatctttagctattaattctgttctccaaaaaaaatcacagaaacaaagtttgaggagccttaagatatggcctgtttgcgtctagaggcgtttcacattaggctaatgttgggttcggacgatgatgagtttctgtataaacttgcccaacttaagtactggacaagatgcaatttgccaagcagaagatattgtagacgacatgtcgtttcattgctcaacttttaaattgaacttgtgttcttgtacatctctgcaagcaataccatatcatataatgagtcccaaataacagattgcttcccttttagaaaggaaaaaaaatcacaaaagaaacaagtattttcatctcactaatgtctgtatatatattatgatgctcataaataataatattgtgtttattaatatgc

SEQ ID NO: 214638 - DNA, 651 bp, Cannabis indica
taatacaatacaacctaatacagagtttaaaagtataaataactcaattaatatctagtgtcacaaagtttcatctaaatttgtgtttatataataaagggacatatgttagtgtaatatctatggtccttgcagaaacatatatagagttttggtgaagctttgagttggatgggtagagatcgactacctgttggttgtacaagtcgctcttgaatttactagtgtctttattttagcctcaattgagttgttgcttatcttggtaattgaatttgaagatttgagatcagtgaaaaatttgattcctcccatatttcttagttggccacatgataattctcataatagagtttttgccgttcacggcaatgccaccgtaaccataatcaccattcaccactcgtgccagtgccgtcacattccaaaattcccgccgactaattatttataactgtcagttctcactcaacaaaaaaaaatatagagaattaacaatttcccaatctgtcaacatcaaatctactatatataccaagaagtggtaacaaaagaacaagctaatatacatggagtaaaaatgatattgacacaaatgagtgcataaacctcaatttcggtaatgacgtttatttttattttatttttcaa

SEQ ID NO: 214639 - DNA, 524 bp, Cannabis indica
cctccttcttggtcttctcacagagagcctgagtttcctcttccttctcctccaagaagctggtgtccatataagggttcgccatccaggctcgatatacggtgcaaaagccaaccttgtcgcatcgttctccgattttgacctctttttctgcgtgcttcttctcaaatttatcgacttgggctttgatggtcttctcggcttcctcttttgccttctcgacttcctctttcgctttctcggcttcttgctcaaggcgggtgttttcttgtttgtcatcgtcccattgcttaattacaaccttgcattgggatagtaatttgtggatctcgccctccacgtattcgagctgctcagagagtcgtcgattggaagcaaaagaagcgaaagaagcctggagaattgcaaatagatgaatatgaaagaggtacacaaaaaaaaattataataataaggccaactttccatgaagttatagttcaagctcttcgaaagcatctattttggacttccaagattgagaa

SEQ ID NO: 214640 - DNA, 581 bp, Cannabis indica
gagagagagagagtggcgtctagggtttgagagagaatgtaaaaactaatctctaaaacattacgttatattttttctggtatatcatatacatatatatttatatattagttagttaatatgtatatatatatatcatatatataataataaattaaaattcttttatttctataaaaaaataatattattttaatttgaaattcaaaataaatatcatacaactgaataactgtattcagttatatactttattattttatattatattttaatttaaataaattatcctataatatatttaatataaataattaaaaggtaattatcattttaaataattttattttgtaaataaaataatcaaataaaaactaaatggacttttacatgtcccttgcacgtgcctaaaattaatttatcaattttaccacaaataagatttattatttattttaccaacaaataataattaattaattttcatttatctcttatttcattaaaattaaaataaatattattttatattaaaataatattttctcactctttttattattatttaagaataatattat

SEQ ID NO: 214641 - DNA, 661 bp, Cannabis indica
tttttaaaaatgaaaatggtaaacaatgtaatttttctattaaacttggctaattagaatttttgcctattgaactttaacatgtactaaatcatgcctttgaacttttaaggtcattaaaaatactcactgaactattgagattgttagatttaacttttttccaattttagtaaaaaagttaaatgaaagtctagaggtcatgatttagtacatgtcaaagttcgagggacatgatttggtagatatcaaagtctggggagcataatttagtatataaaaaatcaactgaaatagtaaaattgaataaaactagataaaagtctttaaattcaacaatctccaaacaactttaaaagttaaaaaaatataatttagtacatgacaatgacaaggttcaacgtacaaaaattctaattagccttacaattttcttcctgtctgaattttgaaagcagcaaccaaacatgtaaacgagcccccacccaagcccacatcccaagcccaatacgaatcaaacaataatgggccttatttaggagaataacgaaacttaagacttgagaaaaggcaagagatggaaatgcaagcccttgggggctcaagaaccaaaatatgcgaatcataaatgaagatgcttaggccgggtgagggcccaggg

SEQ ID NO: 214642 - DNA, 771 bp, Cannabis indica
atattaatattatttgttttaagctaattaaacttatagtaattttagattgatttaaatatatataaatattaatattgtaacattattatttttttattgttatttttaatattagaaatataatcaattttaatatttttaaattttatatttatttttttcaaatttttaaaactctaaatatttttttaaaaaaattaaattaataatagttttttaaatttataaaatttaaaaaatagacacaacaaaaataaaaattaaaaatataatttattataaatgtaaaacatgtaacaataacctaatataaatatacatttctattatagtttatataaggaaggtatacaaatataaaacatggaaacttgagttatgtgtctaagtccacatcaattaatatatctaaatgaaaatagtttacttcccccacaaataaggtctttacttatcttatctatttagataagcttacctggtttttcattaacaaggaaatatagtataattagtattattattcagtgaaaaagaagaaggaatatccctattatttaaatgaagaattggcttatcttagggagcgaacaataaaattgcgctgaccactaattttttatttttgatgactcactataaaattcatatatatcacaatttaaataatgcagatatagtaatatatgtaatgtaacataagtacattgcccttcctctctacgtacgagtattaaattaaaaacgattatatatagtggtgcgcat

SEQ ID NO: 214643 - DNA, 649 bp, Cannabis indica
tattagtataaaaaaattgataggtaaattagtaagtaaatttttttttaaaaaataaatacctatgtgaaaacaattcaaataacttttttttaaaaaaaaaaaattcaaattataaattaataattttttattattaatattgttttattttttaaaaaataaatatataaatattattataatatgtataaaattttaattgtatacaagcagtcttatcgtaagagtatacaccttatattataatgaccacatgatctaaaatcaatggccaaaaaaacttccctaccggtagggaacttatgctaagtcctaccatagtcttgccctatatatatatatatatatatgaaagcattagagatattatgtgtcaattgttgaggcggagtttttattttattaaaacaaaataaaaataataatgatgttaactatatatcaatatatatattccatatgcataaagtaaagaaaataataagagcattctaattgagtgtatgatgagagttatacttttaaagtgaatcacctctgatcaagtcaaatacgtatgaagtaaaaaaaaactaaaataaaaaactattaataatattattagaaacaataagacatgcttaaaaaaaaggaaaaaataatagtt

SEQ ID NO: 214644 - DNA, 561 bp, Cannabis indica
agtatatatgtatatctatgtaagtacttgatgatgatgatcaagaactgaactttaagtttttgatgaacttgttaaacaggcaatggtgactagatattcatccatatgtaccagaaagctgtcaagtgccctaaaaatgctcacttctgataagactatggtagccatgagtgactataatgattttcataagatggtgaaaaaacacatacttggaaatgttcttggagccaatgctcaggtgggtgttttgttattatgattaaattttttaattctcatttcacttcttgcttctgctatttgtgttcataattattattcactgttctttactgcattcattcagaaacgacaccgttgtcaccgagacaccatggcagaaaatgtttctagaaaatttcatgctcatgttaaagactttcctgatgaagctgtgaattttagggagatatttgagcctgaactctttggaatagctttgaaagaggtgagttcctcagtactattccattttgttccggagagtaactatgaccaattcagtcacgttttcat

SEQ ID NO: 214645 - DNA, 662 bp, Cannabis indica
agctagcctcaagtggttgtataagtctcacatataagtaattaataataaaatttatgtaattacatcgtttcatattatgattgttcttatttttattaatatacttaatccatatgtttcttccaccaccacacaatttacttttttttccttaatcactcttatggagcattataataagcttggccacgaggagttattttttattttttatttttattttccttttaaccatgaacaaatataatttttttttaaaaaaaaaaatcagcgttgaatacattgaaaaaaagaagaaaaatctttcatctaaactaattcaccattcactctaagtgcatgcacaactaattcatgagcatcgttattggccgaccgacggacatgaatcaggaatgcctcagaataattggatagtagactagaaatatcatctaaaagagaacaaagataattacaaagagatgatctcttagtgaaagcaaagatcacagctaggcaatcaaattcaatacaataaagagggataccaatttcaagtgaccaatccaacgccaccaaaggagctactgcttcagtatggataactgtgagattcccttcaaaaccaacacaaaacataataaaattcacccaaaaatataaaaactaataaataa

SEQ ID NO: 214646 - DNA, 937 bp, Cannabis indica
tacactatatttggtgttttagtatcccattggagatggcctaacatatataatgcacctagaattcaataaaatatccgtaattgagaaattatttctttaaggcctatttcttataatagatcttactttccactaaaaagtaaaaatgttcatcaaacagctcaaattgcccgcaccgcagaaaaaatgcggtttcaaattctttgtggtgcggtcgcaatttgaatttttcctaaactgcacggtgcggtttgcgattttgaattgttaatatgcggttcaaaccgcaccggacattataaaaataccaatttttatatttatttaagtccaatatgtgaatgtccagcccaaagcccactaattattgtattgttgaaacttaaatttttttttcatatttattttcaagtcttatggtatttttgacaagtgttgctcaagctttgttatatttgtgataatttaattatttggtgatagttcaaaccgtaaaagtgcaccgcactgcaatatttttttgcagtgcggtttttgcgattttttagtttcgcggtgcgggtgcagtttgggaatttggaaaaactgcatgtgcaggttgatttgaaaaaatagttaaaaactacaccactcacaccgtaaacacccctactaaaaagcatataatcataaaataataattaaatcctcaattatctactaagtgctatgtttaaaatgttgtcattaaatttttattgcagttgttactatcaattccgttaagggttgatttggttaaagaaaataccacatgtcaatatattagtagtccaactcattttttattttttaaaaatcatttaataatcttaaaataaataacaatagaaattgaaatatacaagaaaaaaaaaatagtagtaatatactttaggagaattacttcatatac

SEQ ID NO: 214647 - DNA, 657 bp, Cannabis indica
ccgtaatacccgtgtgtgccttgtcccgaatgtagaattattgttccgcggtggcaaagcaatacaataagaaagttaggcccaggaatttcctcccgggggaactagttctaagaaaagtttttcagaacaccgaagaagcccgagcgggaaagttatccaccaactgggaaggaccgtaccaagtaataagcccgacgggaaatggggcgtacagactgtcctctatggatggagccgagatcacaagaagctggcattctatgtataaactaaaagctaggaactctgaatttcatggtaactttcgtcgtactttctctttaaataaataaaaaagagattcggaaaaatatcaatcaagtcaaaaacgaaagggataaaggccttttacgaaaggcaacaaaaaagaccttttacgaaaggcaataaaaagaccttttacgaaaggcaatacaaataccttttacggaagggaatacaaaagaccttttcgtgaaaggtatgactaagaccttttacaaaaagaggcaaaccatgaaaaccataaggggatagtcagcaagtacaatctatgaaataaaactcagtttgaagtttaaacgcatgcataagtacgcaccaaaaacaaccgaagattaagtaaaattaatatta

SEQ ID NO: 214648 - DNA, 510 bp, Cannabis indica
aaaaaaaaaaaaaaaaaagccgcattgaacttttaagttttttcctcgcataaattatattatgttaattttattttattttatttttttttataaattatgtatatatatttttttctaagaaacatttatataattttttattttaatttttttatcataatatttaaagtataatttatttttatttgacaaaatattttttaaaaatatgaatgaaagaaacaaattaaaaaaagttagtacaattaaagatataaattttatataaaattaaaattattaaaatagagtgtttttactagtttttagagtgtaaataaaattctcttcttcttttgtttttcttttatacctcttttttaattaatgggaactgttggttggttcaagccaaaaataaataataaaaaataaaaaaattaataaattattagcgcgtatataattttgaattgataagggtactatatttgcttcccaatgaattaattttaataatttttttat

SEQ ID NO: 214649 - DNA, 857 bp, Cannabis indica
aagatggcatttttagaaaactaaaattaaggcccatttactatggcctagcaccccaggggcggcggcctagcccaattcgtactttctcctcagttgttcttcctactcagcctagactagagcactttacctttttattgtgagacagaattttttcaaaaatattgtataagttttatactgtgtactatataaaatttttactgttgttcaatgattgtttttttagttattctactgttatttttaattgttctatttttgttattttacggttattttaagttgttttataaaaaaattatatttttataaaaaaatcctgtataacagtaaaactgtaaacttttatctaaaattcagtattttttttttttttttgtaaaaatctcattttttgtttcgttaactttgtgagatagctaagctaagcatgtgacgtgctcccttacaaaaacaaaaactgacatctttatcatatactatttgctattagaaataatgcaacttagaaaacaatttataaatgcacaattatagtaaacaaaactatataatagttattgcagttaaaataattcaaaacttcttatactttttggttagctaaaagtaaaatcacagccaaaccaacgaaaaattatataaattattttttttgttaaatatttacacgtttaaagttttttttttattattattacatttttatagtattctataaaaacacaaaaaaaattacacaaatgtaatagaaaaacaatattaaaacaacattaaaaataatgtacaaacaacaaaaaaattaacaataaaataataaaaatacaagtatacaacttaaaaatatatca

SEQ ID NO: 214650 - DNA, 626 bp, Cannabis indica
ggtaaaaattggtgtatcgaaaatgtcgatgaaaatagggctagcatatatcaaaaagaccaccttgatgagtagatcacatccatgccaaccatttgtcaaaatggtacacgatatcgccgaaaaattgccgaaaaggggcagagctagaaaaacatcactgccaaaagtagcgagctgggtgaaatggtttagtgtaagttattctcctcgacgagctggatttagtggtgaagacgacttgtcaaacagacaccggaggtggtaggaaaaattgttcgaggtttgaaccttcaaactttgacttgcgatctcatgctaacgatgacaaaaggggtggcaccgcttggggttgaggtcgctggcacctggggattcgattgctccagtgtgaggggtcagatggtggccaaagagtggtccctgtagttcgctggtgatggggtttcgtgggttttctttgttgtttgaagaaaaaaagagagagagtgggtaactggcaggtaagaaaacaaaaaaatggtttatgtttttttatatacatatatacaaatccttctctttttgactcagtcaaaccgagtttcacattctcccctccttaagaaaatttcgtcccaaaattt

SEQ ID NO: 214651 - DNA, 500 bp, Cannabis indica
cgcggttgcttcaacgatgatcgttgtcgtcattgatgtcatccttcatcatcaaattttaaaagaaaaaaaataaaatatatatgtccaccatatatattgtttttatatagtgttttcaatttttacatgtgattatgattatctatcgtactatatgtatttatacattatttttgttttgtagcaatgaataacttcaattaaaaaaaattataataatttatatatatatatatatatatatatattaatatgcatcatttgatggtaattatcttaaatctttaatttgaaagagtgtttatatggtgagataatgatgtatatatttctaatttctattgtgttattgaaaaaattcattatatttttcacaactcatgaaacctttaattagacgaaactactcattttcttttaaaacttataatttctgttgtgtgtgtaatatttttgattgcttataatcattattcattgctattaaaaaagatgga

SEQ ID NO: 214652 - DNA, 590 bp, Cannabis indica
aaccagaaaacaatgacaaaaaccagaacaacctcaaaccaataaacaagaaccaatctcagaccataaaacaatcacaccatatcacaaaagacaagactttcggtaatagaaccgaacggaagacaaaagacaaaagacaaggcggtgactgtcgttgatcggtgactccggtcgacgtggaccgaacggacgacgaccccgccagtgacgctccttgactctactcgccggtacggttatggcaaaagcttctcgacttctcacccttagacttgtcgactcgctgtagggtttctctctcccccgtattacgtggtcgatatttttcgtattcgatacatcagatacattaattggctggtattaagcttctatcaacaaacctttttcaccaccatatttatcacttcaatcttatttatattaaaaattatgactctattaatgtgttgatgccctctataatcaataaacatttatatgagtgagagaaagaatgaaaatatacatatacatatacatattttttttaattatatattagtcattatattttatactcaattttaaaattttattatttttat

SEQ ID NO: 214653 - DNA, 1160 bp, Cannabis indica
ccatgctattttcttttttgatatattcggtaagcataatcatcaaaagcaaacgatatacaaagaagatgagaatcttacttttacaaccctcgtttaaaatgttaaagtacttcttgttagatgcacacacataataaatatatgtatagttgtaacatatatatatatatataaattaagtaggaactttttcaacaatatatatcttatatagtgatgagaccaccagagtatatatatgaagtatatttgtacatatatgcatccaagctgagaatggatccatgaaaaagtactggatatttattttcaaaaatcactatttaggccaacttagatctagctatttttcattaatagcaataagaaaagaccaaaataatagcctgaaaattaatgtctgtttggatagatatatataccatgaacttaattatatatatgtactatgaactctgtggttaggttcccttttaaatgaattattatttattgtagtaaggacgtaatagaataaggttcttgtcactagccccaaagagggtatcttatcagcaatattggagtatagcattttcttattaaagaggctatatatagtacggacgtgaccgcatggtttaattgtgcctttagcataccactatatctatatataccatatttcataaaaaaatacatatacatatacatagggccgaccctgaaaatatatgagctcaagacgaattaaattttagggccctcaaaaatacataaaaaaaatatatatttcataaaaaaatacatatacatatactgatatacatatgtgggagctaatacaataagtattgtaatttttacctattgataggtataatgatttataaccattaatttaatcaaatgacttaaattaactcttggaaactacaataattaatatttttttatttataattaattttaagtattaatttagatccaactaacaatactccaaagctaactccaaacctataatttttcttacttatttaccttataactttttataattttaattaattatttttttaattttgtaatttatatattaatttattttctactcaaccataattatagttaaaagagtacaaaataatatttaagttatttaattttaaaataat

SEQ ID NO: 214654 - DNA, 695 bp, Cannabis indica
atatatttttgttttcttccttttaagtagataaatttttagatagatccttcaaactaagataaccaaaaacttgatatgaaatatgcttaaaattaaaattagaaactaaatatatacatgtatagggtttcttgactaaaattaaagaggtgagatctacttttcatggggtcgtggaatgagtaacacaacccaccacacatcatgataatgttgttccaatcttaataattatcattattattaacaataatacttcacagctttttcacgttcatttttcttactttatttttcatgctaccaagataaccatcattattttctttttttcttttgggtattgtcactatttcttttcctttccctttttcttttgtaggggacttaaacttttgcatattctattgttatttttattttaaaacttgaattcaggtaaaagaaaaaaaacctacatggccgttggtgagtttctttgctttgctttgttttgatttgatttgcctttctccaaagctatatgggaagaataagactttatccctttctttttctttttttttttcctttaattgttttaaggcattttcctttttgttttgaaattagagtagtgttaacttatttttctaatgttgattagaggataaggaaattgatcttttaaccctttgtcactactcgaaata

SEQ ID NO: 214655 - DNA, 751 bp, Cannabis indica
aaataatattttacttttgattttagtgatttaaaattggtgaaaaaatcacaagaaaatcaaatttttgtgtgcaagcacccagctgccatgcaaaaggttgctcgcagggtcctacgcgcgcgcaaggggtgatctgcagcctcatatgccgagcaatctcggcgcttgcagcattcacatggggcaaggtgtcgtgtgcatcgtgtctaaacgtccgtgtgagcgagttcagacaaggtgatgtttgaggcacgcacgtgcacacgagcaccttctctgagtgactggtgcgtgcgatgcgagcctctcgacactaccttgacccgaaacttcaaatcaacataacttttctaaccttttatcagaatcgagttccataaaaaccgaaattgcttaatttttcacaaagaatcagttaacgtagatttttgttaactaaatttgagcctaatagtgacaatctcacacagaaaaaataaaagctgtaaaattaaaaagtatgaacacaaaggattttttacgtggttttgcagttaaaattctgcatagtccatgagtcaatcttattagaattctgatagtttttcaagggccttttttgtgtgattttttcattcccttttttgatcttacttgccactatttataatcacatagtaggcagttaattacaaagttgtttgtaatctttacaacgttttcaccctgaaatcatggggtttgactacatatcacgtagtataaatgc

SEQ ID NO: 214656 - DNA, 778 bp, Cannabis indica
ttttgtggagagccgttacaggtgcattcccaacttgtgtccaactagtgagcaagtatgttgatatttcagtcacttgtcctgtttgtaatctacaagctgaaaccatcagccatgtcctcatctcttgcccatttgcatttcattgctggagccaatgtgcaactccagtagtttttgatcctgacggttcttttggtaattggttggagatcatctttaagcaagctgaagctgatatgatttgtcttattgccttgtatagctgggcaatttggaaggctaggaacaaagttgtttggaaaaagaatcactcctctgttaattacgtgcttacttctgcacaagtagctcttgatcactggaataaagcataggataaaattttgttgtcatcaatctgtctagaaaacatcagtgatggtgctgagtcatggactaaacctgcagaaaacacaatcaagattaatgtagatgcaacactctttgatagcgacactaagtatggtttcagaattgttgcccgaaaccaccttgctcaccttattgcagcacgggccggttgccatggcggaagatatgcagctaaagtcattgaagccatggggatttacgagctctcagttgggtaaagatcgacaattggcagcatgttcaaattgagacggacagtcttgtttctgtacaatctattcgaagcaaccaagcaatgaagtccactttcggccttttaatcaaagactgccagcttttgctatctatcctcccaaatgttaat

SEQ ID NO: 214657 - DNA, 800 bp, Cannabis indica
aattggacaaaagtccttaaaatccaaacaatctcaatagtcaaggagaaattttaacggccaaaaaaattcaaagaatatgatttggtacatgtcaaagtttaggacgcaaaagtcataattagccattttttttatttcttttaaactgagagactacttttgggtaaaatgacctagctatgttttttatatcttagttcttttaaaatgaggcactatttgtgttgcttactatttggctaaagttgtgtagtcaaatgctagttgtacttattcggattctacgactccgagcaatttacctaatgttcttttacatgatttgagttaataaaattgtatttctgtttttaaaaaaaaaatgaggtactatttttagatagaataggtttttcgtttttgaaaaaaaaaaaacatgtaaaaaaattattgtaaaaataaatataaataatttttcacttttttacatttttacatgtatgccttatttttgtttatatatgcattttttttcaatattctaaataatttatagagctaaaaaattaattttaaatattttaattataagaagaaattaactagtaatcccattaaccatcaaccattaactatattgattgacaataacaaatgttgtgtctagtcaattttagttcttttaaaatgatgcactatatttaggtataatgacctaactattcaatatttttagatctattcagattcaatccaattatatgtatatatttttttttgtgaaagaaaaacaacataaattctattaaaaataaaaa

SEQ ID NO: 214658 - DNA, 844 bp, Cannabis indica
cgaagaacagatctaaaatcgatgtaatattttctttatgggaacaaaacctggaagccaagcagcatatttatattgttacatgttatcgtataataatgtattatataattacgtttcatatttgagaacgtaacattatttaatctctctttaattctctcatttttttaattttttattaagtttataattaaacattaatttatataaaataaaatcacatatcacatttttctctcatttatatattttttaaaaaaatctaactaaattatgaccctctataaatacaactaacataaggagaaaaaaaaaacttaaaaaattggactattatcctattgattgttctttctccgtcctttctcttttcttcttttttaatcttaaggagcattatctctacatcatcagaaagttatagtcctttcttcaatttttgtataagcgtttgataaaaaagaagctataatatgtgttttacttttgttgtcattttaatgatatctttgatgtttcttcaaaggatataatacctgaattattatttctatttagtaattctacattattttttatgttaatttcatgtacgtgtagctttagagtttctcttttaaatagtgttatatttaaatattttgtaattatgatatttttatttaaagattaatttacttatattctttttaaaaaaagaattgtgttgcaaatgtatatgtatcaactcaagttgtaagtcttccttttttacatattatattttcaatcaaaataaacaaatataattagaataatttgttgtcatttatattatattatatgatatatgtgagaacat

SEQ ID NO: 214659 - DNA, 531 bp, Cannabis indica
ttttttttttttatgttttataagtgacaatttttcatatatataatatttaaaatactatgctaaaagtctttgatttttctttttatattttttctattttattaaaattaaatttgagtgaaattaatatgatcttatatattaattaattttttaaattattattaattaattagctcatcaagaggcattgaagaatgaaattgagagactaaggcaagtgtatcatcaccaaaatataaagaagatggaaattcataatcaacaaaacgcgccatcgtcggcgagaccactcgccaccaccgccgctgcccaaaactcagatggcagcggcggcggtgattgttcggtcaacggtgcatgataaactcataatgctaacttgcactttcttcacatgatgtgtttctaatttgtaatgcttttgtgggacccacttctctatatatattcttattcttattggagggtggaaacttgacacgtggacgacatctaagataggtcatgaacatgcatgttctaatt

SEQ ID NO: 214660 - DNA, 538 bp, Cannabis indica
ttatgttattttgttgttgttttcatattattttctttttatttttatgtagttttcttgtgtttttatagaatattataaaattataataatttaactttgaaagtaacaatatttaaaaaaaatagtgtttgaaagtagaaatattaaaaaaaaaaattaaaaatagtgttttatataagggattttttttattttatacattctaaaatagttttttttttttttttgttatttttacggaattgcacatagaaatttctatagcaactaatagagcaacttaaatcgcaaccaaaatctgtatagcaacccacatagaaactactgagaaaactaccaaaacaatccaaaccgtaaatttaataaaaaaaatagttaaaaaatattatataaagtaatttccttttatataattatattgtaatgtcagatgaagcccagcaacgatttattagagaggaaaaacgacacgaactcaaaccactcaaagagtgtcgtttttcaaacatggcaaaaaaacggaggtgttgccaga

SEQ ID NO: 214661 - DNA, 1306 bp, Cannabis indica
aagacgacgagactgatagtctgctttgcacaattctaagtagtgatatgaacgtacttaaaaagagtgacctaatctgcaactacaacctaaattttaatttagttaatttattctttttattttttgcagcaactatttcattcattttttaactcggtatttaagtacttttaataaatttctagatgcatcataacactaataaaatctcataattaacactttcacaatcatttatcataactatttatagaaaaatattgatacgggtactttttttctctatttttataacatgtgtatttataaacttaataaatatctgacataactcattatatacatacgtatattaattagtaaacagatatattttctcgtcttaattttcagtaacgtactctcatgatccaacattctaatgttcctataattagaaatatctttcttctcgatactactttcagtactttctttatataatacatcaaaactaacgaaaaaaaatatatttttatcacaaaaaaattatatacagttatacacggttactatatattttgttgggtgtactatttcaatgattttttattgtgcaatagagtttcgatatagtagttcaattgtgttgttttatcctgagaatgacgagactgataatttacttgcacaattctaagtagtactgtgattagtaaaaacgacctaatccacgattcaatccagattttaatttatatattcgtttctttttattttctgcaacatttactttcaacatgttttttgactcagtatttaatttttaataaatttctagatggatcataacactaaatctcataattaactcataattaacactttgcataatcattcatcacaaatacttataaaaaaatattgatctgtatatgaatatacatgagactttttctctcatcttataacatgtgtatatataaacttaataaatatcaattgaattagttgacataactcattatatatgtatattatttgattgttattttttattaattattaaaccatgttataaaatatagtatattaatagtggaccgacttatctcttatattttcaagatatatttatatggaatagtttattaagatgcaatgaactattcaaatattctcctcgatgaaaaattaaataatagtaaataataagagagagtataaagtttaatgattataaaataataagcatgagagactttttgttttcttacgagaaagatttgatctttctaaagatagaactaaggaaatataataa

SEQ ID NO: 214662 - DNA, 541 bp, Cannabis indica
ataactttttttttaattagaagatctattaatttgtaaacctaaaatggcacaaaataattagggctcgtttggtaggccgtataaaagtagtattgtattaaataataaataacactatatttagataaaacaatctattatattaattatcatgactaaaaattttaatacaatataagttgtattatttaatatataataaatggtccgtattagtttgtattataatatttacaaaggactcgaaccaggttcaggactatatccgagatctcggacccgtagtcagtgttggggacgaatttattgaaaatatattataactttatacaacatattaatacaaattaataccaaatataatattaaataatactaatattaatacaatacaacacaacataatacggtgtactaaacaaacccttaaagtgtttgcgacacctctcagagtcagtccaatagtggagtgagatgggcggttgaccaaagcctacctaccctagttattcaaaacgtttttaagaagaaaagtata

SEQ ID NO: 214663 - DNA, 887 bp, Cannabis indica
ccgctccatccccgcttcgggtaataaaattgttccccaccactgtcccattaaccaccaagacggaatccccgcggtataaatttccatctctagaggttgttaatatcttattatttatttgttaatttataattgtctttttgttgttttatagttgctttattatattattatttaggtattctgtagtttttatagttatttttttgttgttattatgttgtttttttaattatacagttgatttttagtttatgtatttttaattatggtatatatttttaatttattccagacagttttttttgtatatatgtacatacgttgcattagttttatattattttttagttatttttaagtgatttttataatatttttctattcatacagttatttttttattcatgtgtattttttacggtatatatttttagtttattcctgacaattttttttgttgcatgtgtgttgctttatagatgtaaatacatgtatttagtttatttttgacatattttctaaaaatacaatgataaagtttttttttaatagaaatgacatgtgtagtagtaaatattgacatattagttatatattgtccattatattatatattacacactacaacaaatgtcacttttattgacgcatttggccaaatgtgcctgcaaaagttaacgggataaagtgcctatggcaaaatcaaaaattttgagcaaaaattctgtcggcgcaataatgcaccgatataagctacctatatcggcacagttcatgaaatgcgtcggtaaaagtcttggaattaagcgccttcaaaccattccaatggtttaacaaccttttgtcggagcaattatacactggcaaaaggtaaaaaaaaa

SEQ ID NO: 214664 - DNA, 581 bp, Cannabis indica
atatattgctaccatgcatcgtcacacacataaaagccattatatattgctattaaatttatgacaagggagtgacaaaaaaatacctgtacaagatcgctgcggtgacaacgtaggagactataagtctcctgcaagttattctcaaatggtggcagcaggctaattttttttttcaacttttttttttttttgtaaactattgatggatgtttgtgtgaataggtatcttctgaatagttgtggtggtccaactaatgtttgtaaatgtaaatggcttagaatgggtgtctattaaacttaacttttttttacaatattctgttaaatacataacaaattgttaagtacataacaaaatgacgttagataggcattttatatattagctaagataaaaaggagaggtaagagacactgacatgtttgatttaaatttactttaaagtccttctttcttttatctccttaattttctactatttttaaattttttttaatttatatttatatatcaatctaaagcatatttttaatctaaaaaaaaaaaaaaactctaaaagctatatttttctatttta

SEQ ID NO: 214665 - DNA, 523 bp, Cannabis indica
gtcacactaaattatttattacttagctatttaatcgaaatattatattatataaaataatataatagtattttctataaactaaaagattataaaacagtagtcataagcataagtttaggtggcgtttggttggaaggaatgaaaatataagaataagaatgggaatgggaatatgaatggattagaataaaatttaaaatacataaaaaaatgataaaaaaattattaaattttttctcatcatgtattggaatggtctttccttccatttcaaaatggaattgtcattccaccaaaatggtggaaaggccattccattagaatgacattccaacactttaatatgcaaccaaacaaaggaatgaaatggagattgttttcttttcttttccattctatttcattacctccaaccaaatgccaccttagtattttcacacttctttattctcacaaaaaggaggtctacgttggaatccccatcccccaatgtaaaaaaaatataaaatacaattttttt

SEQ ID NO: 214666 - DNA, 545 bp, Cannabis indica
gaacgctttcccacatagtggaacttcactttaattaacatctttgatatttaatttgtatgggttaagagcggagacttcatttgaatgtatcaccttatgagtgttggggatatcgtctaatagatcctgtagagatctaatgagcttctcaaagaacactcacttgtatccatttccaatactctattaccctcctccatatggatgtacttctttactctctcatagaagtcttctatgccatccaattctctttttagcatattcccacataatctacttccaaggcatagtccagtggttatggcaaacttgagtttatcttcaaacatccgccctactttggcaacttccgtgttaaagtgttggatgtatctttgcaagctttcttgttccctttgcttcacattggtgacactcgttataagcatatcataatcactcattacctaatggtgttgaaggaattcctcaaataattgcttccagtatgtgattgttcttaatcctagcctatttaaccacttatatgcagccccttt

SEQ ID NO: 214667 - DNA, 586 bp, Cannabis indica
cgagaatcaataccataccattgattctcattccctttaagtaaatattaggtcttaagttatatatataagtggggagtgttaccgtcaacctcctattacaactttttagtcaatctttgtgtgcgaaaacacatgctgattttttttccaaattttttatggcgatgttcgttatgcttgcaacatcatccttgtagaattttgaaattttttgaataatttatagtactaaaaatacgtttgataaaatttattgttgtttgtaataaaaaaaattaccattagggggattagggatatgcatgtgatgtttgtgtaaaatttatttattttgatgttaattgtctttttacgtgtttaattcaccgtagtcctaaatcattatattgtgcccaataatggtaacattttatctcgggagtgtttttttgagtcatattcaatgtttttaggcctatttaggtccaatccaattatatattagatgttaataattttaccatccgatctgatccaattaatttcagtcatatatccaatcggtccaatatccatttaatttagattagatcgattctatcca

SEQ ID NO: 214668 - DNA, 601 bp, Cannabis indica
aaggaaatatataaggattaagttactccacttagtattaattggtattaagttggtttttcaatctcttacaaaaagaccttctatttcaatttgtaaaaatttgtgaaagatagtataagatttcacaatccacctaaaacaatattaatatattaataataagaaaccaatgtagctaacttattcatcttctcttgttagcttttaggtttgactcttatgagaagagttgcttacatttgacaaagtcttcaattcagtattgttaaattacaatcttatctcaattcaactatttatactctgtactatatgaaataatgtcttgatgccattcaatatgcccttcttcttttattatgttatataatagaaaaatggggcacttcgaccttccctagtttctaatctagtaatatgttgtttagttttaatttatatatttctcttggtaaagtcttgtaaattgttaaaaaacactttattaattttattttgacatatttaatcgataatgtgttttattgtatatttatatattttggctgagttgttttatgatttatcatgtatatattttattaatttatttcattaa

SEQ ID NO: 214669 - DNA, 694 bp, Cannabis indica
ctttgtttggtaggaaggattggaggagagggagaagaagtggagggagagtactaaatctacttaaataaatcgctcaaatctaactaaataaattaacaaaaaaaactacaatccgaataaagtaataaaaaatttaaacaacacaaccaatacattgaattggttgaatattatttcaacctgcacaaataacctcaataaattgaataaatcgatttatatatttttactaatattattttgaatatattatataaattatgtttaatagtaaaattattttatatgtaaaatttgtactttataatgtttaattaaaaattttgactttataattgataattttaattgtatttgaattttgaaattgatatttagaatctatactacattaatatatatttttctttttctatttttaaagattgttgtttaataatttaatattatttaatttatatttgtcttatgtttaagtttttaacattaatgtaaactataacacttttaatctagaaatatatatactatacatttatttttaaaaatctaatttttttgaacaccaaatattatcaataataacaaaaaagaaataataaaaatcggtttggacaatttacccaaacccgaccgataaaatcattgagcggattaaacttttttatttttatttttattatttaccttt

SEQ ID NO: 214670 - DNA, 853 bp, Cannabis indica
ttagaaaaattgggcagcataaaagttgtatcttgaataaactcaaaaatcataatatgcataaataattgtacaaaatacatttgcaacttagtgccccaaaatagttcaaaaatatatgtagattatattttcaattttttaaatactttataaatcataaaaattagaatatttctaatgttatttgacacatattaaatcaaatccaataatcaagttgagttcctacctccttaggatcatcaaactttctccaattagcttagtcaactcaaaataattgtcctacacttttcatttgaataaataattatcatcattataatatattcttcaaaccgaattcaataacatataacaaggttatatttaaagtttaaaattctgaatcttcacctaagcggtgcacaaagataatcggtggcggtaaaaattagtgtatcgaaaacgtcattgaaaataggagtattatatatatatatatatcaaaatgaccgtctagacgagtagatcgcaaaagtacaactcgtgatcccaaataagcactagaatcaccgtagaatgcttccaaaggggcaaagatacccaaatcttaccgggaaaaagtaatgagttgatcgaaatgacttagtggagaatgttcctctcatgatgttggttccaacggtaccaactattttttaaatggtgatcggagttgatcgaaatgtcgactcacagttttaacatcaaaactttgcaccatccatatgagtgtgtctcagctctaattgtcaccaaacttaaggtgtgagatcaccaccggtcggtggtcgtgcagctttgacgtgtgtgaatggatggtgactgg

SEQ ID NO: 214671 - DNA, 588 bp, Cannabis indica
aaaataatatttttttatattttttacagaaatctaagaactcacttagaaaccaacgataacttaaatcacaaccataattcatatagcaatctacgtaaaaatgaccgaagcaatctaacctataaatttaaaaaaaaattaaaaatactccatatactaattttttaaatcacacgtttaaaaagtacatttgcttgaacatttattatctatctatgtatcaaaccttttctagctttcttttcctaacttaattattgaagagagagactgaagaacattaatacacaactaaaacaagagtacaagcaactgtaaagcattccctacaaaaaaaaaaaaacaactgtaaagcacttgaacaattaataattgagtggttaaaatatatattgttcttaaaaaagattaaaaaaaaaaactttcacccttgaattattacaggagtaattatattggtccaccctaattttgagattttaacttttaagagaagctacaattttagtttaataaatttttcacttgatctaattgcccttatttaattttaaaattccttatttaccaattaattttagagct

SEQ ID NO: 214672 - DNA, 601 bp, Cannabis indica
tggaatatttttttcaattttttccatggcggtgtttgttatacttacaacatcatttctgtaaatttttgaaaattttcgaataatttacagtgccaaaaatacgtttgaagttttttaaacgtgcgtggtaaactggaatatcagaaaatctattttcggcattgtaaactatttggaatttttcaaaaatttacaaagatgatactgttactataacgaataccgctatgaaaaaaaaaatattccagcatgtaatttcgaacgtggaggttgaaaaagaatattccaacacaaaatacaatacaaaatacgagtacaaatatagaattttataccaactttccaagaaaaccttatcgagtcccaatttcattatggcatgagatgaagcaccatgtgcttcaagtaaaaaatgctttgagactggagataggctatagagttttcgcatactcgagccctcgccaaccacaacacaatcaagcacagagtggctagctagaagcgtgaggatgcggtccaacatcattggtgcatcaggattttcggttggcaaatgactagcaatgtccaatgatgagagcttagctccatcgcc

SEQ ID NO: 214673 - DNA, 743 bp, Cannabis indica
aagcttagacattctattctacgatacaaaatagaaaagcaaaagacttacaactaaatttaaagaattgattacgaaggtttgaaatttatactatttaacttaaataagtgaagctcaataatgtatactacatgtctaagaaaagcatattatatatatagatgaagaatagagagattaatataagatactaaggttagagaaccaaagtatgtggcttaataaaggagctaactggagcaacgacaatactataaatcccttcaactctaatcttatcgtcgggaaccatacttgggcagttggagtgatttttttttcttgaatcagttgatgtcatccataattaaaaatatttgtatgagatatatatattaatatatttatgggtttatacaatataagtattcattaaataatttaaaatagttgtaccgtataggttttatacataggtagatatttatgtgaaggaactctgtaaaccagtgttcttgagctgagagagaagtgatgaaatggagaaagaaaagagagaatggatggaatgaatactgtgaagctcaatcaattgattggcctttgatctctttatttatagaggtggaattgtacaaaggagttagttacaagacagctaaaccagcaagacaataacagaaaataaactaacttgctaactgtaagaacagttagttatatacagtaataactgactaactaccacctatatctccaat

SEQ ID NO: 214674 - DNA, 528 bp, Cannabis indica
atctcacatatttatattacactgcacatcaatttatctatattttatcctctatcatttagacattatatttttaaatatattttattaattaaaaaaaaagcaaaaaaaaaaaaaagcaatgaaagaattaaaaaaacaattaaaagaatgggagagaaaaagaaatgaatatataatattttcatctcactattattcattgacttatatgtagctaaaagaatagctaagaggtattttagctcaccatttactttactcggtagaggtgaaattatacccaattctttaaaattttaactaagaagctattttacctcttttattaggaatgatataagaacactagcacaatgtaaaagttaaaattattacaaaaataaaattaaaagttttcccaaaaaaaaactatttttttaaataaatatcaaatattattcaatagattagttaaaataattctaaattttatttaataaatatacttaactaaatgtagcttaaaaaatttataggttttagtat

SEQ ID NO: 214675 - DNA, 580 bp, Cannabis indica
taaatcatacttaacaaactcacatttttggcactgaaaaatggaaagaaagtagttcatacttgaaattggaggtatgccttctcttacttgaaattggagatcaatctcatacttggttttgtccaacttcaaagcttggtatattatgtgagaaagttcataatatgaacaatctaatggcattagtatacattcaacttcatagtcaacgtatgttgttctgtcaatctaagttccattgtaaaaaaaaatcactactctaacatccatattcttgcgtgatttttttttttgttaaatttttaatttactcatgttatgttctgtatacagtaacaatttatccgtatgtgacgtgaataggtgtagtacgaataaactaaaatttaccatatactataaggttgatattcagcaattcaagtgaccagcatacatttgaactataatagggaaacaattacaattataaaggtttatagtttattattaatgtaaatgtacttagtactgattagttaatttgttaagcctaaaataatcgtgtttaacaaaattaataaacatcatatttatt

SEQ ID NO: 214676 - DNA, 817 bp, Cannabis indica
ttatataacaatggaacatactttgatcttttaagttttcaaatataattgtattataagcattagacttttaaattattattttcgatacattttaattgtatatataattttgggtgattctacaatgcacttccttaaaaaggatgtaccgatgcaccctctacttgttccagtattttttttttcatattcatgtacgttaaaactatttaagatctcttacaaaattttgagaaagtcggaataatttacaatatagaaagtaatgttcaaacaaactattttacaaacgtacaaaataaaatagtcacgcgtgcaaaacactgcttgaatataatattaaacttttttcgaatttcttaaaattttgtaggatgtcttaaataattataatttacatgaccataagaaaaaattttactaaaaaattatttcgaatagtaaaacagatagagatgtatcaatgtatcccttttgaagatgtgcattataaaattttcctatagttttttaattttttttttttgtaaatatgtgtagattagattgtatcagttacttttacatgtcaatcaacatccaatctgcagttgtgtggattttaaatttttcaatctaatccaatctatataaatctgaatattcgcacttcacgaattaaattggattagatcatacggatttaattggatgaaatattttatgaacacctctaaaattcctcgtgttacaaaaggacccgttgtgggtgcggtatggggggcagcacgccacaccaagcagtgcatgcaaaggaaggacaaaaggacgtggt

SEQ ID NO: 214677 - DNA, 583 bp, Cannabis indica
aggagaaaagaaaagaaaaaaaggcaaataatttcatatcaatgttttttaaaaaaataaaaattatccattccaatgatttttttaataatcaatcttaaaaaaaaaagttgacactgatgtcaaattaatttcaaaagaagttgaagtctccctatttgataagtgccatgttactgcacttcaaaatacaaaattatccattccaatatgatgttgtaatcagggccgaccctgaaatttagtaggtcataggaaaaaaaatatttttgagccttcatttagaaaaaaatgtgctattttttaaaattgataaaaaaaaaataatgtaattttaaaaagggacaaatttttttcggcccctgagctaggtgggccttaagcacaggcctagcccgcctatacttatggccggccttggttgtaacaataatcaatctaattcatgtattattgttgccaaagaaaagtgataataataatgaaaaagaagaaaaaatgacctaaccaagtatgcacttacgatgataattacttaattttattggataagtgtagcaataaaaaattcgagaagtagtta

SEQ ID NO: 214678 - DNA, 733 bp, Cannabis indica
aaatgcaataaaaactataaaaggataacaaaaaaatacagtagaatgtgagaaactagttagtaaaataatcaaaataaaaacaaacaaataaaaaccagtttcctgaaataatcaaataaaaaaattgaaactcaaaactaaattatgaacaacaataaaaaaaacagttatgaaaacaagttacttaaaaaaaaccagttataaaaataataatataatgtgtgtttcaaaaactaattatttaaaataaaataaaatttattgttcaaatatcatacaataataaaactgattatatacaaactaaaaaatatataataacaacataaaaatggagccaccccaatacagaatagttaaaacctgtgaaactagttttgacgctataaaaatcataaaaaataattaatgttaaataataaagtcaactgaaactagtttcattagacaatcaaatgaaaaataaaaaaaaaagaaaaacacatacagaaatacaaaacaaaaaatattaattacaaatataatcaaaacaacacacaatacataccaataatttgaaaataaaatataagtgtaagttttgaacctagaaataaaataataaaaaaaataactgaaaataaaaaatttgtaataatattataaattagagcaactcgattacaaaactctcaaaatatgtaaatcagtttccaacaataatttaggaaaaaacactaacaaaaataat

SEQ ID NO: 214679 - DNA, 1194 bp, Cannabis indica
acttttatatagaatagatatatatatatttacccaaataaatacttaattttaacttaaagagacaaattaaatattttaaactataaattttttgacgattatttttatttacttaattgttaaatattaagttattatccacttgttatttcttattagtataattaaattaatttttttaaaaaaataaaaatttaataacttagactaatcaaaaattatcatatgataatttacttaacactaaacaactaggtacttacaaaagttccagaatcataacttaaatattattagcgctaaaatttgaagttaggtatttatttacaactgagagttaaacttaagtatttattatgctgcaaattactcttttaataacttaccaaatatatatatatatatatatataaatgtataaaatgtgtattattagaaaaatttgagattttatgcttaattttattatctaattaaaagaaatccttcattttttgcattatatgatgaaggttgttctatcaggttaagacaaaaaaaaaaaaaattgagtttgagttagagagagtgggataaaagtaatgctaaatataaacatatttttggtagggctgaacatcgggcaaattgatcgagtttcggattcgcaggtttcgggcctaaaaaataaaacccgaacccgcacgttcaaataatttgggttcgcgggtctacgagttcagattgaccgagttggctgggtcaatgggttgacttggtcaactctcggtcaacgagagttatcacccaaattctttagagtaagaaaaacatttcaaatctaaagtagaaacgtaaatccaataatttaaaactaaataaatcattcatcaaatttatgtttattgttcataaaaatcataaatgatgaacatgataataaaaactaaaagtatcaaaataaattgtgactaaaaatttaagtttatactccatagtccaaccatacattccgtattagttattgtctgttgaccaaaagtcaatcacccacttattttgatgataaacaaatatttgattattatttgttactaatcttttcttggccattttgcaagcaaattcacaaagtatcgatatttgctcggtaaagtcaaacataattaaagaagtggattcaacaagtatatcagctacttcatacttcat

SEQ ID NO: 214680 - DNA, 665 bp, Cannabis indica
agtttttaatccctcaaaatcaatcaagaaactcttttaaaatagaaattcaaaaacacaaattctattgctctttttcatttgttttttttcaaataaattatgaaattttattaattgcaattagttaaaataataacctacaattcaattaaaaacatctcctttggagataagactaaaattagaattagaaaaaacgaacaaaataatagtcacctgattctcagattgtttgacaaaaaaaaatgaaaaaaaattcagcatcacagttaatcttacaaatgcccttatattctgtttcatccaccgctcagaagacacaatagtaaaatctgttgcagcaaattcaacctcgtagcttgagcactcaactattgtgtaaagtacgtaactgcacacaactcatatagttacaaaaacttgttattcccaaccactaacaacgatgtaatggtgagccattgaagaacaaagaataaccaacaacgaagcaaaataaaataaaacaaaaccatgtcacgtagacaaaattaaaatactcaaaacatgttacacagataagactaaaacactcaaaatcatgtcacagagacaaaattaaaagagtcaaaactatgtcacagagacaagactaattacaatagcaaaaattgaatagtagt

SEQ ID NO: 214681 - DNA, 525 bp, Cannabis indica
aaaattctaaccctattttgtagcctattcactgccgtttcaatgtcaatcgtgattacccttctccagtagtttcctagccacgtgattttttattttgaaacaatacccatgcatgatcacaagttagtatataatgaatgactagcatgatagaacaactcaagtctcaccttcttatacaaggcaggacattgagtctttatgttattactagtggtgttcttgtcttctattttggttctggtatttctttcctatcaagaggtttaacactcctaaaattattctaggatttgttgccaacattgtaagactaaaatcaaactaaaagaatttttgtggttcccaacaacatttacaaatattttttttatggaaatatttacattaatatatagatgtataaatatatgaattaagatacttgtttcattgatttcaaaaaaaaaaaaaaaaaatacttgtttcatgtagttgagtaatttgttaagaaaataaattgaccccttgatatatatatat

SEQ ID NO: 214682 - DNA, 576 bp, Cannabis indica
caatcactcgaatacatatccataaatcgcatctcaatttataagcttttttcttattctaggtgagtacgcatttccatcattacttaacaaagtaatctttttccaaaatttcaataatctccttatataccatattgactatccagtcagctataaaagtactttccattattaccgtttcaccataagcaatccaagtaatcttctttactttagtgataccactactctccctaacgttattttatacgttaccctggcaacgtccccgcttcaagtctacattggaccccttacacccatggaataatggctcttatacaagagtgcatcactttagctacttcctagattgacgactggccctacagaccgatcaaagtattttcaacgtgctttattctaactcgcacacttcacggggaaacttcctaaatgtaatcaccctaagtcaaggacacttaactgtggagttccttcatgatgggttaccgaaataggatacttcttgctaatataggtagtcacaaacaattcattcaagtcctcgacaccatgtagtcccatgcatat

SEQ ID NO: 214683 - DNA, 1466 bp, Cannabis indica
ctaactgaccctgtaaacacctacgtggagcctatttattcaatagaatattattattttccagttaattattatgtctttctccaaatttttgaaaaataattttataattagtttttaatcactgcaacatattcgaatataacaattttctttttgaattaaatgatcattaataattctatcaaaatgagaatccttgaagtactactataataaaccttttatttactacaattatattataattaatcaaacaacattaacacatggggaaaaagaaagtgcatattttatttattaatacagctaaaaataaacaataaaatggtttatataaagaagttgaatcaaataccatatagatggtagacattaacacaagtacttatgataacatagaaaacaattatatatttattattttttatataataaattacaactaatttatgactcttatacatgaatttgttattctaaatgacaattaaccctacaaatcaacaatactattttcaacctactttatatttactcgcacactttaggccacttatttcaaaattactccaaattaagtacgtttaattttaaaaattttaagttgataggcacttaaaaaaaacaaatacacattatcattataagtagtacaaatcaatttatttaaatcttcttcaactgaataattctatacctacacaatcttatgatcatcacacttaattttttttaaattaaattataacattactcaacttacctatctctcatttacagatcaatggatactatcacataaataaacataatatcccaaaattattatatgctatatatgaatatttttattcaattattatacgtatatctaattatatatatacacacacgataatataccacatttctctcaattattcacattcatgtataaagtacaaaagctattattccaagtttgatttcaagtctttattatgtcattgggtttttttttttttttttttcttgttgtaatgttggggcataaaagaaaatgcatgcactacagtcaaatataacaccatttttttttttaaaaaaaaaagttaatagaaatatttattaataaataaattggacacaattaattgtaatgaatacaaattaacaaattcaactatataaactctcctttttttttttaagagaaaacattgttgtgcctaaaaaattatcagttcaattctacattcgattaaagatgaataagtggtcattttttaaaaaaataatccgacccgattcaacttttaagagcaaattttctatacaaattttttgatattttgcaaatcataaaccacaagaacaaattaacattttacacatgagtagaagattaaaagaagaaaaaaataagaaattttactactatagataaaaaaaatgtaaatatatagcatatgaacaataataca

SEQ ID NO: 214684 - DNA, 510 bp, Cannabis indica
cttttatcattttatattctaagtaattcaatcatatgaattagtataaaaagaaaagaatggtctcataataatccaattaatgactcatgacctagttttcttcttgtgagacaactagagagtttgcgacttcttcttttctcttctctaatttgaaatcctcagtcttttttaccattaaaattcagcctttagtgattaagtgcatgcccacccatatcaagttagtcctcaatcatagtgtgtaagacatgtgaagaatccaaacaactgaaggagtttcgcactcagatcttgattatactctgcgacagaaaggatacaagggttagagatctgagggaatgagtcatttaattccgctgcaaccaatataaggtttctcatactttatgtgtttattttcatcgttttagaaattcatatttaggatgtatacttgtaagtaaatttaggtcctagtaaaacatattccagcgaatcttaagatttgataccatttgttgt

SEQ ID NO: 214685 - DNA, 941 bp, Cannabis indica
atcatttataaactccaatccacatgcatttaagaacactcaatacccaaagacatgcttttctaatcatcaattcagcaacaaaactcagaattaaactcaagagtagcaaagtttgaagcttaccatcacccacaagcttccatccccaacaattaactccattccaagcaagatttcaagattaaagcaaaatttgaaaatgatgaattaggaagagaaaaaggggttcagctagggctaaacaaaccagaaaatgaatttctcattttgtcaaaattccctttttgatgattactaactaatgggtcaaatgacaaaaatgcccctagggcctatatatgacatatacataaatcaagggcaaaaatgtcattttcatcacatacatagtcaaataaatttcaagttattcactcaaccataaaatgccaatataaaatcccgaaaatgtattacggccccgaacccggttcggctcgaaatacccgattgtgactataccgcgccgacttgtcagaaaacacctgaaaaaggacacaacaagtatactatataataatatagtccataagcacgcaattaaattcaatttacagttttacccctctcgggtcaaaattacgataatgcccttagctcaccaacggggtcttatcatgtcatttcccaatttaattcacatataataagttgtataataatataattccataataaatatacatttaactagttgggatttgctaatctgattcttaatctatgggtattacagagagtcttgagatcgaacgagttgagcggtcttggtattatacaacttggacacttttttttagctgaaatcgtgccttagttgagaaggaaaattgaggagataaccagcagaaaatgaaggaggaagaaggttaagtcggtatttttgaaaaaaaaacttt

SEQ ID NO: 214686 - DNA, 723 bp, Cannabis indica
agagtacaatgcaatacaccctcttttcacaagtgccacacaatacaaattaatgacacacactatctctgtaaaaaataccaacataaactgggcttccaaccaccaagtcgacattactaaattaaattatttatttttaaaaacaggattaaattaaaattgtcacttcaatacatcagttgagtaagaatatatgaaataggtcacattaaatgacgccaggcggtcattctacccttttttctatcgtctcttcttcactttccaccctcttttccatcgtctctttttcactttctctctattcttctattcctttttttccaccgtctcttcttcatcgatttcagaagcaatattttttatttctcattgatattgtctgctattgatcaaagtttaggtttaaatctaaaaatataaaatcaaaatctgattatttagaaattacctagcctctctgatttggtataaatatttgaatttctatgaatattgaataaaatcaaaatctaattattttttttttaaattacgtaacctatctaatttggtataaatgtctgaatttctatgaatactaagtaaaattaaaatatgattgttttttaaatttcttcttcaagttcataaattcgtcagttcaaattttttgcatgtattcttaattgtgacagtaggacttctggattgagctgattgaccatttggtgtctatga

SEQ ID NO: 214687 - DNA, 787 bp, Cannabis indica
ttacattaaattatatgagactttaaatcaataacaatattgacatataaatgagtgtttgtcatcttctaacatttctcttataaatattgttaacttgaaatgttatatcaatattttaacaatgaaaattagtaaaatacatgaaacagattattataattgtagtatgctcgttacatcacatcacatagaattcttatattaaaagggaaatttaacaaattatacatttattggactatttttttttctaaatcaatattggtagaatatattattttttcctaaaatttcattctacccctctcatttgaacaactctctctctctgtaaacatgcacacagaggagcacacaatcaaccctcaacccaccacccacaacgttgaatatttctctccatgaccaccatgaccacagactcaaggacccatggacccaatgaccaccgtggacccaacgacttttccatcaaccacgacttcaccatcaacaatattctcaaaaagaataaattgtatgattaatgtttgctatctgtgagtggatgttagatttatggtccaaaatggtcaaatctgagttttgggcaaaaagttggttttttaaagcccgatggtggttcgatgccttcttgttgttaaaatgagtaaatgttgaagatgaaggtctgatggtagcccgatgatatagtccgatggtggcccgataccttcctgacgagcttaatgaatggagtttaacatctacaaatgtaaatatggtctgatagtcacctgatgct

SEQ ID NO: 214688 - DNA, 812 bp, Cannabis indica
tattggaggaccagtggttatcacagataagtttttcttcatattttaattgctatataagtatatataagtatatatattgaaaatttggttcttaaatttggtttattttctataagtaaattccttacctcatttatctttttggtattttgtaggttgtttatctatacttcaacacacgaaaagttcacatattgcagaagatctgaactcattggttacttcttaatcattcaagctgaagcttcagtcttaatgatagtgatggattggttttacacgttatttctctttgttatgttgagtctatttatttagctttggtttctgttattcaatagcactctttcttttgaaatgagctaggtttttatagatttttttgctagtttgctttccaattttcttaaggcatccctagttcatgttcgtttttcatgaattagttgtgcatgcacttagggtggatggtgaattagcttagattgaagattattcttcttttcttattgatatgtattaaactcttggttgttgttaataagagtttaatttcaaaaaaaaaaatatatctcaataacagtaaagtaattaattatttaatttgaataattaattcaataatcataaaaatagaatttcaacaaattaaaaagaaaatccgacaaactaaatctaaaataataaaccctaaatctaaatctaattctttctttcgtcctctctccctcttcaaaactcctcgtacaggtgaaggtggaggactttgggggatggcaaatcacaggaaagagatgggattgagattt

SEQ ID NO: 214689 - DNA, 554 bp, Cannabis indica
tctatctctgtggtattgtagttttccagtctaacaacattcttattttataaattacaaaacttgcaggcataatgaaagtggttgcttttaataaataatatttttttagacaagaaaataaatgtttattaggtcagtgaaacaatttttattctatttatttatttatttttattttaaaatattggaatatcattcttattttaatcatattttcatataaaggtaatatgaaaacacatgtatgtattggaggggatttatattactactattttaatttaaaaaattaagctaaatctttaatcattaaaatttaatttaatttttacattcatatttctatcaaatttaaatctcatatcaaatgccctatagttaatatttgatgaatttattactatatttatagtagagaaagaatacaagcatatttgtcatcataattagtgcaaaaaataaagagcaccatttataggattaaaaaaaaaaaaaaaaaaaaaaacaaagtactacagtacttagcactttataaatagtagcgttagtaa

SEQ ID NO: 214690 - DNA, 605 bp, Cannabis indica
ttacacaatgaaaagtactactaggttcactcatactcgttattcggtacaactaatctcgatttggattactgatgtagcatggcatctaagtgaaagtgttgtatataatagagattatatatgacaaggaccgctatgtaattaaactgtctttatcaaacatgccgtttagctataaagacctaatttatatcataatgatgatcaatggtagatcggcttaaatcttgagtaatcatgaactcttgttcatgttattagtttttttttattcactcgttaaagtttctcagagaagttgattcttacaacttttgttttggaaatctaataatgtggatggccgggaacatgatctacaattatgaaatcttgacttttctaaaggatcgaatgttggttctctttatgtgttaattctagagctgaaaagttgcgcacaaatttagattggatctaaattatactttcactaatgaattaacagaattaaaggataatgaagtaattagaatggtaaaacagttgaccaaactaattacgaaccgacataatgagggccaatcactagaattgattatattgcagtaaaactcagtaaa

SEQ ID NO: 214691 - DNA, 751 bp, Cannabis indica
tgtattttttaaaatgatacaaaatagtacattaaaactgattttttattaaaataaaattaataataactcaatttaaagttgttataacaaaatttggtacattttcaatatcaatttgtgctaaaaattatcctcaaattggttatgttaaatgttgtcgtgtattggatgatttgagttaataaaattgcttctttactttcaaaagaaaaaatataaattgaaaattgagctcatactactattttgtatcatttaaaaaaaataatgagttcaatttattattttacaaagcagataatccaatcgataatttttgtaaaatacaggttctaaaatattataaactcttcatttattgagagctcctaaaatcttattttttttaattaaatttttaattcaatccaatttagtatatacaatagattacaataaaattgtaaatttttcacttcttttctaccaatttaatatattttgatgaaaaatagttgattcagttcaaatatcattttattttttacattgatttttttcaagatatatataaaataattattgcaaatgtcttatataatgtatgtaatgtttgtttattttacttccaaaactaaatcatatacaattaatctcaatccattttttacatggattatatcgatttcgagctatatatatttgataaaaatctgtaacactaataacaaattttgaatttgaacattctattgtaaagtttttttgc

SEQ ID NO: 214692 - DNA, 658 bp, Cannabis indica
aacatggggaaaatgaggttccctctaaaaatcccaatgatcagccagaaacctctcatagaaatgagaatgggaggcaaccagaaaccaacgaataagaaattcctcatggaaatgaggaagaccctggtacgcaacccggggaacgtaggtcacctgtgaggaatcaccatcgttcttcctgaacccatagagagagggctcgtacaaaccccagtggggaaaatacgacaaaccacactcagggggaaagaacagagcgtgaagaagcaagtgtgacctcggggcgctcaaggagccatagtcgatcaacttgaggaagacaaaatgctcgatgcgctaatgatcgagaaagtacggggaccagtaaatttgcaagtcactcaaggacaagatccatgagcaagacaagatccgtaagtaggacatagtctgtgagtggaacgaggtctgccagtaattattcctaactagacatgcgagagcacttgaattagaaaaaacttgatcttcgccaataacttggtccaaagcaagaggatcctatccaataacgaatagatgagttggaagataagttcaggtgatatcaagtgggggaattaggaagacaatctggatacgagtcagacaaagagctcgagccataccatccaga

SEQ ID NO: 214693 - DNA, 620 bp, Cannabis indica
gaagaattggtatgtactacatccgtattgtagctgcctcaaaggaattttaacaatccaataaatcatctcataaatattgcaggtattaactcaaatctttatattttttttaggtgaacactctattattattttttttttagaaaaaaattataaatgtactatctattttaatgtcagttcattttttaggggcttcgaataggtggactgggtgaggaggaaattcttcgaacacagtcacacctaccacccaactcaagcttgacctcttgcggtccacaaggccatcgcgagatgagcgttcttatatttgagggaccgaccacgggtgtgccagacactcgaacaaaatcgagacgcgggaggaggtcataagaatcgggtgcgccaaacacttgaacaaaatcgggatgggggaggagatcataaggattgggttcgatttaagggtgcaaatttgtaatattatttgcttgtttgctttcatttttaaaatattctaatgttgattacattgtcaacaataactattttgccctatatttacctttatttaaatttgaaataattaaaagtaaaataaaaagtgaaagatatttcgtactaaatacaag

SEQ ID NO: 214694 - DNA, 888 bp, Cannabis indica
ataatttacatgtaagaacatgacaataataatatacgtaaatactattttggattttatattttacagattttatattttataactatctattttgttaattgataatttaaatttgtgttcttaaaacctaataacctaaggagacagtattgtgacataaatagttatattttttttttttagtatttattcatcctaaaaactagtattaggttgttttgtttttaacaaaatttgacagaaatgaagtttagagtctattttgtaccactttaaaaaatatagagtatgaattattatttaacaaaagaaaaaatctaatgttaactcaaaaattcattaacattatttgaggcttgataattaatacttttgaatatatatcactatttaaacacaatgaatttaataattggataataaagaaaagatagagacttttaatgtggctttgtagttaactctacacggacaattctttttttttttgagattttatgaacatggatacaattcggtataatttctgtaagtttgaaaactgacattctttttcacaatgtgagtactgctatttataggattaggataacagttactacaatcttatctaaattacaattatgtaatgtagatattcatcacgttttatttatctaaaaaataagtgggaatagtttatgtatctttatttgaaataaataactgccattctatgacatggatcttcatcatgctagttcaagatgacatttttgtttctcgaggaatatgctaatggatggacacgtactgagcatgaacttaatcgggggatcattgagattagaaagatagactcttttagctttttatagtgattgtcgagagtgaggcttgggataa

SEQ ID NO: 214695 - DNA, 840 bp, Cannabis indica
gtgcataaatttagactgaatgtaaattatacttttcacagttgaattaatggtactaaaggataaaaaaataattagaaaggtaaaacaataatttaaccaaaactaattacgaaccaacacaatgagtactaatcactggaattgattatatcaatggacattacagtagagctcagtaaatataattttataattactaagagttcaattccatatttatatttatagtagagtaatgaaattaatgaataagattattttgtaaatgagattcaataaataatctagcttattggagcttagaattataggtccatggtccctgagtcgccacgttaaaatactatcaaggggagacataaaagtcgtatatggaagttcaaaaaaaatctattttgatttgtcaaaatagaaattatttattttgtaataaataatttattttttaaaattaattaattaaataaattagaaaaagacaaaagttgttaagagaaaagacacaacccttatcttaactaagatagaggggagacccaacctacattgtgtccatacatagtgtaggtgtgcccctaatgtagggtgtccccactggatttattttaagtttaattaattaattctaaaagattaatatttatttaaatttaaacttaaaaagtagttgaaatattctctcaatttgttataggaaataaatatctataacataattcggttatattattcattcaaataattaaatatgatttaataaataattttaataattaaaaaaaaatatttattgagtatatttaatatactgtataaaccaaaatttagaatgagaat

SEQ ID NO: 214696 - DNA, 712 bp, Cannabis indica
actaataacaaaaccaataaaacaatcaagcgaacttacagagaaaacatgttaacagacaagaactaaaaaaaacatgtgtatttatttatacgttatatgaatgataaatcctaatattattctaattagaaaaccaacattgcaattgcgcgtattttttatgttggtttaattgaaataggaatagaattgagattgagattagggtttctggttcactaatcaagttattgatctaatatatattatatttatttgtacaatatattatcgaaaaattggccaatgtatggcatcattttgttaacctcaaaaattagcaaagctaattttcgagagtagtcaatggttaacccggtgtcaacttcaagaatcgacatttacattttcggagacttctccaagcattttggagatcgatctcatgtttttctgcaagcaaagtgttgggtaagttgggaaagaataaaggatacatcactctatgaagattttaaaaggtctatcatgcatttgtgattgtttgaggtattttcgatggaagtcatcgtgtacgattagagttagtaagaccaacttactaagtggcaattgttggaggatttttataatgatgcgtttagaattagatcatgtcataaacatgaaatccataaatctctttcttatatttccaacgcattttaaatcgtccaattctgacatatat

SEQ ID NO: 214697 - DNA, 578 bp, Cannabis indica
ttggaagtagcatgacctggctccaatatgtatgaattgctagcaaaactgagtttacaaggacagctctgcccacaaaagaaatgtgccgagtactccaagctctgattctctgagtcatcttttcaaccaaactagaacattcttttggtgataatcttttaggactgatagaaatccttagataggtgaaaggaacttcacctctttgaaaaccaggagcatcaaaaattcgttgtatctctgaatgagtcataccatgacaatagatagctgatttggagggattaggttgcaaacccgaagtccgagagaacagtttaagaccctgtagcaagtagatgatactcttgaagtcaccattgcaaaataatagaacatcatccgcaaacatgagatgattcaaaatcatatccttgcatctatggtgaaaggtgaaatcggttttctgcccaagtttcctcatgatccttgttaaatattccatacccagaacaaaaagcaaaggggacataggatcgccttgtcttagtcccctttttgcctcaaagtagccatgtagggatccattaatcatc

SEQ ID NO: 214698 - DNA, 705 bp, Cannabis indica
gtaatattccttcaaatagtgcaagatctgaggtcgatcttcaaggcgagctcatcagaggacgtacccctaattttagggcgaacctctatatttctggtgtttgatttcttactctaaactactgtgttttggctaatctttgtgtatatgtgtttgtgttgtttctggggtgattttctgggaaagatcgatcaagagatcgagaaggatctctggttctagggtttgagaaccagagagaaggcagagagaaagagagagagttctgagactctcgaaggttcgaagagaggaaatgagctagggttagctctgattcctcttggttttattcaaagaagaacgacagatcgttttgaatcaaacgatctgtcgtgtaggtgagaacgacaagttccattgtcgtgcaggagaaacgaccaaggtttctttgtcgttgattggggttttaatttgaatttttctgggacaagtttgtccctgtcgtttttgacatttttcttgagtggtgtaggttaaacttggaatttcaccaagtaaattcctacataaataaaattaagatcaatgttgatgcaactctatttcaacggaaaagttcgtatggctttgggtgttgtggcaaaagatagttcgggtaggcttatagaggctaagacatgctatcaagaggggtttttccagttgagattgttgaagcca

SEQ ID NO: 214699 - DNA, 485 bp, Cannabis indica
gatttcacagtcgtagaacaatataataaaaaaaattaaactaaatttttttctagaatacttaataaattggggtatatcacaaatataccataatatagacatataagacaaatataccataataatacaacagaacattattattggttgatagatatattcttctttttttaccaagaagtactcgatttttattattatcattattattattatttgaacaatctttattagtattattattattaatgtatcattaatattaattaattttattttactatatatatatattttcaggtacagaacaatccaataaatgatctctatttctatttcaggtatttatataaataaaactctatatatcttttttttttattgttttatgcaactatgacattttattctaacaaaaaaaactaatgacattttattttttttctcatttctttttgcctagagtaataacttgttttaat

SEQ ID NO: 214700 - DNA, 996 bp, Cannabis indica
gtagtttattttttaaagaataatttgtggaaaaaatatttaaataaaatttttgttaaaagttggtatcttatattgtgttaaaatcactactacaaaacaaccttttagaggctgttttttttttccacaattttcataataagagaagttaaaggatgtaaaaatgcccacctattgaagattgacctttagaagcgattttttatagaaattgtaggtatagaattagactataccatttaaagtcggttgggagggagatatttctgagggtgatttgaatagcctatcccatcagttatttcctaataacaaacggtatagggttatataaaaaatcgtatcagcttcttcttcttcacttcttcttcctcacgaaaccaaacaccagcagcagagacatacccaaacgctcgccaccttcgccaaccacccttactccagcccatatctcccccatttttgcaccatttgagcctattttttttttaaatcttctatatcttcgatacctatacactaaaaaagtttcaattttttccctatttcagtgtcaaccgaacctattggaaaatagtggtgggtataaatccagccaccgacatttgttgagaaaacgttgaatctcaacatccattaaggtataaatatagtttttattcatttctgtaatgtacattattttactttttgtttttatgaatttttttttggattgttttatattattaacattgttgttttgcatgtgcatggtggcctgactttttgaggaagaaaaagaggtggctcatcacgcgtatgttacacagcaatacgctcatgaggatgagagtcgatcgatcacaaaattatgctcatgagtttgttttcctaaatgagccacctctcatgtacaatttcgatgaatagaaggcccttaatcagttagtatatctctgctctgacaatattcacaacattgtggccaaagcttatctgtacgaacatgag

SEQ ID NO: 214701 - DNA, 1135 bp, Cannabis indica
ggacctcatataatttattgtaataacttttaaggagtattactagtcaatcgcaaaatgatatatttagagatgttgtgcctaataacaatgtttattacaaaaatcctactatttcaacaattaaattatgggcatttgggttattaaaaagaagaaaagaaaaaaagtcttctgttttcaataaattggttgatgtttgtttgtgcatagtgaatagaatattattccattcccaagatttctagaaaggcaacaccttaataaagtaaaaacttataggaaattggtgtggtccaaagtccaaaccaacccatgcaagagttcaaattaagcacattatttttgttacactttcttacttcaacacagttaattaattgtccttacattgaaagaatagggttctaaataggtggcatatgctgtggagtggcagctgaattaaaccaataacaaaaaaaaaaaacatgcattctgtgtttttctcatgctccaagtccaaggttagacttttattactaaagatttttttagggaatgtctattgttctactaggtcccttcacttgtgcttttcaagaccaatgatgttgttgtaaaattcttgttgagtattgatatggggtactaaagtgcttaatatcaccatgcggtgacgttttatatatagttagcggtttttttataatgtttaatgaagtaaatagtgagatccaatatagaatttccccaatagtgatattatatttcataagatattaggcactatgggtgcctcttagcaattatcattctgtcaatttttaaaaaatgagcatcgctaggaagtactaatgtacctaccgctactaggaggtgcatactctataagtggttagcaattttctataatatttaataaaataaaataaatgggactcaatattaaattgaaccaataataatattacacattataagggtagtatgcaccattttaacatttttcttaaaaaatttagtatgatgttcaatgaatgtgtttataggatggataaatagggtgtgacataaaaatttaacaagaaatataattatatttttaaaacaaaataaatattaatacatacaaatattagttatgtaaattata

SEQ ID NO: 214702 - DNA, 617 bp, Cannabis indica
tgaacacaataatttttatactactatatataatatgttgatgttttgtatagaatattgtaattattttttttatacctataattgtaatatattattctagttgtatatgtatatatatactagatagatgttacgtgccaagtcaggtatgttaattttattttagtttttaattttttttaatatcataattttaaaattaaaaatatttaatgtaatgataatcattgatgagaatgcattcttggcatatctgattctggtatatatattgggatgaaaaaagagagagaagagatgagatataaatggtttttgggttaatgagagtggaagtccctagctttgatataaattagaatgggaatgtctaaattgtaataggaaaaggaatacaataaataattaaagaaaaatccaatcgtagatgtacaacagtaaaaacccaatcgtattttttttttaggatttaatgggatttattattattttattttaataataaaccattttattttaatataaataaaaagtcacccatgaatttttcataaatcaagaattctattatataagtacacattatatagaataaatatatattagaaaagctc

SEQ ID NO: 214703 - DNA, 644 bp, Cannabis indica
aacaacacgtacccttgaatgtactgctgactacaagtgagatatggtgatgagaacggttttgaaatcatatgataagttttctataaatttatcaatttttataataattcgatggatcaaacctaacatcatgttatacaagtcgcgtctgacttccattataataacgagatttagtaaatacaagttgcatcgatctgtttgcacctaatttttcatacaaaattatatgaaaaattagattaaaatttgatacgattttattatttagttgtcattaattaaatattatgatttattttatatatatataatttaaaaaaatttcaaacatctatcgtcgcgaacgcgaagcacaagttgtttactagtatacatataataatataaacacaaagtgaagtcttttttctaaacaaactgagcataaataaaagaaataaatcttaaaaaatatcatttacttaattagtgtctgaatgaaaaaaatatttatttatgtactttttaaaaaacatttatgcaatctcattcaaattattttttttttatattctatatatatatatttataaataaaatattttaaatatttgacaataattatcaaggtagaaaattaaataaaaatcatgcattga

SEQ ID NO: 214704 - DNA, 1181 bp, Cannabis indica
actaattaaatattatttaaaataaataatatatcatataattaaaatatataaaaataataattaaatatatgtagcatgccaataaaattatatacatacattaaaatatttgtattatgctaacaaaattatataccactattatacatagcaaaataaaaaataaatatcatctaaaaataataatatatcatacaacaaaataaaattatactgtacaacaaaatgtatatataccaacaacccttaacaactcataaaattaattaaaatatcgacataactttcaaataaaaaagattttaataaaattaatataaatataccataatctttaagtaatttatttctaattctaaaaaaaattatatgaaaaagaattattaattttttatgtataacaaaagataatataaataataaataatcttaaaggatcgttttgttataagttttaaaataatgacatttactaacgtagtcctataatttgaaactatatactataatttcccattattttatataatttttgtagtcctttgcttgattaagaaagttcttgctaacatacaaatttagccacggttctgaaattgatatttgtttttttttattcatatatataccctttgctataattgttgttattttaaaaataaaataaaattgtcccccattatttttttcttctagaaaaatacaaaaatatattctctcatattttcttcctaccacattattaacgtgtaaatttgttttcttgtttatttgtcctgagtaaacaggtttaattagtttttaaggatttgtttaattaatataaattcaatagtttaatatatattttttatatataaaaaacaaaactgtaatgtttatattcaaaagtccaaactcagctgacatataaaatagtcctaaatttaaaaattaaaagttaagttggtaaatgttatttttctaaaaaaagattaacaaaataacaaatataatacattaactaataaaaattatattcattaaaaaaaaaaaaaaactaaataaaaattaataaaaataacattattacatatattttaaaaaatatatatataaagttataattttttagtattacataataatatattataacagaagcgaataaacatattaactcattaaatataaataat

SEQ ID NO: 214705 - DNA, 517 bp, Cannabis indica
aggcaaactagttactatcttagaggtatcagtgactatattaagtaactagttaattaaaagtaaccagtgacaatctaattaaacgttaccaaagtaatgtcgccaactagttaggacttaattacttaaactttttttttaaaaaaaaaatagaactctcattaatcaacaataaagatcctcactaatttattggtgaacaatacattgttcaattacatccaaagataaatgaagaaaaaatttatatggttaataaagattattccttaatactgattttatttaatcagtgaattaataatttacttttttttttaataggaaagcattcaaatatttttttttttgtatttcccatgcatgacaaaaacatttaaaacaacaacaacatgttgtatgcttgttttcgatatttaaatatgcatgtttttggttaattaaattatacatgattttaacatctcataataccccaatttttttttttacaattttgtgtaaaatatcttct

SEQ ID NO: 214706 - DNA, 529 bp, Cannabis indica
cattttttacctttttagttcttgaagatttgacatttaaaatatttgagtgagttattgatagaattttttatgagatggtaaaaattgttgctatgacaaaaaaaaattatatatgtacttagtttggaacatttgagttatatagtaaatttaatagtcttgacaataaagtggtaataaaaatagctaataatataatgtaatataattgaatgtaatgagttatatagttttagtttgaaacttttaatacttagtaagaaactttcatgaactaaaattattaattaggtgtttggttcatcgttatgttatagaaatgataataggaatagtaaggtaacgtaataagaatttatagtatgtataaattaattatagtgctaaataatgtgtaattatataagtacatagtcactagttatatatttattagttacttgttactattctcatttgattttaatttgaatttttttaaattggattaaatattgtacgttgtagattattattggaaaataaa

SEQ ID NO: 214707 - DNA, 520 bp, Cannabis indica
agcccatcatccaaagccttgtgatgttagtgttgttttttaattcaaacttatcatatcaagcttgagggcaattacaacaactttcaagttgtctttcaaagaaaaaaaaattatatgtatcaagaaatatttaattttgtttaaattatatgtaaattatatgtaaaaaaaaattatatataagaatagatatacattagatttaataatttttgaaatatatgtgtaatatatgtattaaatatttaaattattattttgtttacattaaaattttaattgtatatataatttttaaaaatgttttataaatatgtgtagattgcattagatcgattacttttgcatgtcagttaacatccaatctgcacaaatgcagattttgaattttccaatctaatctcatccacacaaatttacgaattgaattgaattggttcgtacaattgaattggattggcaattctttaaacatccctatcgttaattgtgcaagcaagaaaaggcgatcttgtgc

SEQ ID NO: 214708 - DNA, 531 bp, Cannabis indica
ttaggagactaactggcttaacgacatctttttctaacattcagaaacatctcgatccttccacatgcctacatcccctttaggatatgttaaacaggttcacctcccattgagatgaacttggctctaatactaactatcaagggctcaccttttcaggcagcgaaatactcatacaacacctagacttctctaagcgaataattgcccctgaagggactctttagaggtggttattaacaaataaccgcctccgtaggtgtttttatatattttttattttaatggcagttcggcaaagaatgatgaataaagtgagagaaaatcagattttaaccaagaaatcatagatataaatgtaacatttcaaaataacacttattcttaaaaaatgcaccacaaatctgagttagttgcgagaactacctgcaaacaacaaaaataaaatggtaagagaaaatacaaaataaaaaatatggcaggaaaaaaagagaagagatggaacctacggttgttgttggggttgggtgt

SEQ ID NO: 214709 - DNA, 702 bp, Cannabis indica
gtgataaccctttttttggagtggaatttatttaatcaaaccccaaaccagtgacaactgactgacactgacaagacccttctgtctccattaggtttctctttccccaccattttcatttaattaccaaaataccctttatttgatatttttttgctgaacaataaaacctttatttgatatttattagtaaaactttttcctttccaataatacccttgcattgatttatgatttgactgcgaccaaacccctattttaaaaggcaatgaatggaaaagttgcatacggatttggccttcaatttatcatccaccaaacagttctgacttttactacaacagatgcagaaaatctggtttttatttacatttatggagcaaaggccagctaccaagatgtaaaatatatatgattaaagtagggggtttggggtttaaattgggttggtttacaatattaatttcagttcttacgcaacacgttttgctcgtggaagaagagtatgatcaaaagttataatggcctgagttgaaattggttataggtaaaaagatatttttaaactttcactgtaaagataaaagatatttttaaaaattatttaatttagacccctaaaatgagtaggccttaggtgtgggcctaacccgcctatgcctagagcaggccctggttataattaggaaaacttacaaaaat

SEQ ID NO: 214710 - DNA, 620 bp, Cannabis indica
tcaaaattgttgtcattcaaaacagatattatcaccgtaactcatttgtagtcaccactacattcgctatcattatcgtatctcatttatcactattgatcaaaataaatttgctcttgacataaaataaatcatatacttgagttaattaactactaacttttttatacataagtgaataattttgttataaattctttactaaaaagaaagagaaagagtattattaaaaatatagggtaatagaagactaaatcaatactaaaatagagataaaaaacattaaaaattaaaaaatatcatcaagaataaagatttcgagaaaaaaaaatgacaaatctgtgaaaaaagaaaaaactcataatataatttgtggtctaaaaaaaaagaataataagagatattgtcaaacgatatagggtaataaaagactattaacaaatattagaaattgaaaaaaatctcaccaagaatagagatctcgaaaaaaaattatcaaatctataaaaaaaaaacacatcatataattcgtgatctaaaacaaaagagatttttacacctgatgccacatttcatcattttttttcttttttgtcattacacggtttattaaacttttg

SEQ ID NO: 214711 - DNA, 1011 bp, Cannabis indica
ggtcccaaagggaaagagatgaacagtgaatctgagaaagaaagaagatgagggagtagaggagaatacgagcagcgagatttatatatataatgatattgtttcagattgaaaactataatgaattaaagagggacatcatgatcccctctcagatgattttcttgtccacatgaatcatatatatatatatatatatcgctgcttctagtatctctctctttctctctatcctttctctcctgacctaaacgcctccattctttcccttcaatttcatccctcccactaaccctaaagcctcttcctcttgtatttatataacctctgtatttagggtttcttattgttttcttttgttcaaaaaataaataaaaattagtatttttacgtgtcctgtgtgaaataattaccatttcaattcaattttttttttgaacaaatttttatttttagtttttcacctgaaattgttaattttattacttttatactgtggtagaatttttttaaaaaatgctatattttaaaaaaaaaaaatactgtataaattttattcgatatagtatattaagttttacaatatttttttaaaaaaaatttaactaacagcatttttgtaaaaattaacttaaattttagtatttttgtaaaaaaaatttagttatttttatttattttataatttatttataattattgtttgatttttctattgttttttagtgttttttttttctttttactttttctttctagcaaaatatatttttataattttaaatttatataaacttacttttataattaaaattatagaccataaaattataaataagatatttttgaaaatttcttcttatttaatataagtttttttctttaactatttttaattacattattttatctacacatatatttaaagtttctacaatgtaaattaattttgtaaagttctcctaacatagaaacttctaaataaaaaattttcttaaagctaatgagaat

SEQ ID NO: 214712 - DNA, 895 bp, Cannabis indica
aaaaaaaacaaaacaaaaaattacatcattacaaattaatactaataattatctcctaattaattatttttggtcccttatctaaataaaatcacacccaatcagcatttgaataagattccttcacaagaaaattggcactctacaatctttgaaaaagatgataaactttgcaaaatttagtcttccctccctttatgtgatgcaatcaaattaaaaaacaagaaaaaatcacatcattacaaatactactaattatcccttaatcaactatttttggcctattgatattaaattatgagcattatgaggcacaagtgccttgtaattagttagtaattctctataattttattaaattaaactatataagacccaatatacaactacactgataatgatattacactttacaaaagtactacacattactggtacctttaattttaaggtacacaaattacaatttgtcatttgatgacagttagaatttgggataagatgaatgaagttccatctcaaaaccaattggcaatgggaggaatagctcattcatcttatatattacaatttatttccacacattagcaatgtgggactaactcttattagtagtgtctaataacctataaaaagaagacaatacaattgtactcatcaatgaaaaattttcattcaactaagcttatatattgtcaagccgaagtacgtagcatatttatttctttaaaaaataatgttccgcatgagatatagatgcactaaaaacttagacaaagctcttataagaagatcaatacttatttggtaccttaacttaaggtgtttaacatcacatgagatgtggtgcctcattattaattagcgattttaaatattatttattaaatcaaaa

SEQ ID NO: 214713 - DNA, 760 bp, Cannabis indica
gtgtttttaacacgtattctttaaatttttttaagttttttttttttttttgaaatttcaacattaatatcaggtcttacttattttactttaataaatattataaaaaagtagaaattacacaatactacggggttgtattttttttttatatttatatgggtttttttataccatatttttataaaaagtgaaaatttcacatttataaaacaataataaattttatcggaaaagtcactagccctgaaaaagtcttcggtgctaaaaaaattactaaaaaaattattgttaccaaaaaagttttcaaaaaagtcactgaaaaaaattacgaaaaaagatgtctcaaataagatgtctcaaatataaataaaaataaaaccgatcgaataatgaataaaaacaaactcctcaaactagaaaaacaaaacatacattttgtcaaaaaaaaaaaagaagcaaaacacacattggaattttgttacattaatttttgctacattaaattccccttctaaaaaatggcaacttccatttcggctccgccgttgccggtggtcccagaagaagctactgtctccgtctaagtgatatataggttaggatattggataataattttatgctctaattaatttgaaatctgaatcgttttacatcaaattgcttcatttattaagcttcaattctcttcaatgcttccatttatgtatcgcttgaagatttttcatggtaaattgattgaatttgtaacctaaat

SEQ ID NO: 214714 - DNA, 652 bp, Cannabis indica
ctcttaccaattcatagtccaaaatgttgtcatcatcaggatcagattcactctctgcagtttcttgttcttctgcagtagctggtgtgaattgagtagttcttgcaggtgactccacctcaaactgaacatcatcatttctctccttagttgtgtctgtaggtgcttgtagagtgtctttgtacatcctgttttcttcaaacactacatctctacttatgaaatatttttggtgatttccaggttctatgctccaaagcttgtacccctttactccatctggataaccaatgaaaatgcattttctggccctagcttcaagcttgtcttgcttcacatgagcataggccacacaaccaaacacccttagatgattatagggtgcattgtgacctgtccaagcttccatgggagtttgaaacttgatagcagatgagggacatctgttgatcaagtaacaagctgtaacaacagcttctccccaaaaattcttgggtaatccagagctaataatcatgcatcttactctttctagcagggtcctattcattctttctgctagaccattctgttgtggtgtccttaccacagacaaatgtctaccaatcccttcttgtttgcagaaattattgaataggtctgcacagaactc

SEQ ID NO: 214715 - DNA, 592 bp, Cannabis indica
tttttttagattttttgtattgagttaggtttttcagattttttttgttagtttgctttccggttttcctgaggcatccctagttcatgtctatttctcatgaattagttgtgcatgcacttagggtggatggtgaattagcttagattgagaattattcatctttttttattgatttgtattaaactctgattcctgctagtaagagtttaaatttcaaaaaaaaaaaaaatagtagactaagtttaacataaattttagaggattagagatggtagtttttttgcatattcatattaactatacttgataaataataactcctttagtttagatggacctaaccaggtggaaataaattcaaaaattcaaatatgaatttgataaacttatcaaagtataattaatggctaagcccaatgtatagactaataaaaataacagagcccaatatcttcaacccaacaacaacccactataacacatctgccatagacataccaccaccatctttcaagacaagaataacaccaccaatatttaggacaccaaaaaacaattaagttggcttttgattgggatgaatgaaaac

SEQ ID NO: 214716 - DNA, 572 bp, Cannabis indica
ttttttaaaaaaaaaagtttaaacataccaataaagaaatgacacgtggataatgaattgacatttaatggtaaggtaccaacggagttccaaaaatataacttaggtattattaccgccaaaaattaaacttaggtatttatttacaactgagagttaaacttaggtatttatgtcataaattactcctctaattacatagttatagtgtaattacatgatcagacaaacacacaaaattatataattaccctcaattacaccaaattttaatttcatcgtagctttccaaactctccctaagaaagtaactcccataaaaaaaaaaggaaaaaaacattacggaaagtaacaattcattccatccatcacccatctccctcctctttaaactctccatcataaacatagtgttaaactttttgaggtgtagccagcattataaatggtctaatgcccccaaataataacctcaaaagtcatttcaagaactaatacccccaaataaaacaaagctattgccataactaaggttgtggtcaaaatggatcccccactctctctctctctct

SEQ ID NO: 214717 - DNA, 1129 bp, Cannabis indica
gttcgttgttattttaactaaaaaatatatatttttttatattatatactattacagatcataaataatcttatatgaaatataaacattaatgttgataagcatattctcttcgaatttttggataccattaactttattggctccataccacgtttttgaattgtttataaattacatggtttgaatttataagcaaacttttttctttcttagtaattgcttataaataatgcattatcttttttatttttggtctatcatcttaaattatgtgccatcaaattgaaataattttttaacatttctaattaacttttttttaatatgaataattttcaaccaaattttcttacgtttcaatttatagataatttttttagttttttttgacaatatttttttaatttaatttttatttataaatttaaaagatcggttaaatttcaccattaactatcaactatataaaataatataatttataaataattaatattatttaaactaataaaaatataccatatgtccatacaataataatatcaattggtatttaggtgaaatttagctagtatttacaaatatacactattaaaaattacttttagtaataactttttagttacaataaattttttgtgactaaatatgacttttagtgacaacaaaaaattatttgtgactaagatataatatttacatataaattgtcactaatttagttttagtcacaacaatttgtgatttttgtaattaatacttttaattagtcacagagtttgttttagtcacaacataagaatgatgatttgtaattagacacaactattttacttttagtcacaaattttggtgtcgtttggtaacacttttgttttttatttttttaatcacaaaatgaaagtaaaattattgtttttaaaaaatttatttttaaaaaacaaaaatagcgttctgtaaccacttttgtttttcaattttaaaaacggtaaaacaaaagtagtgttctgtaaagttcattttcatttttattttttgtattttatttaagtcgggtcaagatccaaagttggattcggattcgggtcaaaagccgtgttcagcgccaaggccgtgaggaggggga

SEQ ID NO: 214718 - DNA, 966 bp, Cannabis indica
actctccaaatactactgttacaatattaatagtgttcaagaaactacaaaaccaagactaaaaccagtcaaaataaacaaaccacaaattgagagacaaaactaactttgaatgaatcatgaatctttattgataagagtagtcagtagtatacaatcaaatatgtccaagattacaactcaatacaattaacaattgcaaaatatatcacacggagggaaattacttcaggagtgatactcccattacatcccttcacacacatacatactgtaattttagataatctctctctaaacttaattctgaattctgaagtatgagcatttaagatgcatgagaaagtaaagactgatatatttataagtattggtgagactctatttaagttagtgacaaaactaactgttatacctaatttacttgacaaataattgctataactaacaacatctcctctattttagttaacttaatacttatttagttactaatgtttaaattaagttgctatataattatttattccttcatgataatgttatttttaaataataattgtattattataataataagtaactaaatttttaaaaaaaataagtgtattcatgcattaaacaaggaaattgttagacctcacggtcattacaaagtaattcttctggtacagaagagatcaaaatggaatcgtaccgaggagacctcacggtcattacaaagtagtttagaatataagtaaattaataactattatatttgtcgatagattactaaaataagtattaaaaactcgaaatgaagaaatagaaagagagatgaaataaaaacaaattctgaagatggtgataaatgactcctttctttttctttctttcattctcttcttgtaaagaaatggcagtcctctggtcctttttgcacgttctctcactacaaggcccatccttctttttttttttttg

SEQ ID NO: 214719 - DNA, 658 bp, Cannabis indica
agagagagagagaaattatgacagtaagaaagaaaattaattaaaaaaaatattgatagacaagtgagcagttttctctacatatagagaagctaaagtacaattattattattcttttttaagaaaaaagaggagcatatgatggagtgcctatttaatcaactttaagctatatcttcttcttctttattcaaaggaactttaagctatatcttcagttttgagctattttgaaagagcgaatgatgattgttcccatgactgcccaacactaatagtgaagtattattttataagtagttaagaatttttaataattattatttaattaaaacatgtaaaattcaatattaaattataccataattaatatctcaaacaattttaagtgttaataattctcacttttcaaatatataaatatgtatgggtacattctaaatggataggaaaatttacaccacatactgttttttcttattttatttcatttttattgttgtgagggaaatataacatttttagtgttttgttttttctatactatatatgtgtacttgtttttttattttttatttttttttttttacttttttacttttacaattgtctatccacatattatatatataaaactaaaacaaaaagtaaaaaaac

SEQ ID NO: 214720 - DNA, 608 bp, Cannabis indica
aggccctatttataatacataaaaaccatagagacagctacaaacacgttacatctgtacaaaactttcctaaaaaataccctaatttacagcaacaaaatcacactttgcagtgacagatcagggccaaatcggaaaactttctaaattaatccaatatcacaatttggactttaattcttgtatataaagatttatataatctgctatattcataacaaaaccaatattatcaattaccaaaggaaaagtaaattttccaaatttaggcaaatttgtataaagagaattccctctcttatatgacaagtttcttaaaagaaaaagattagctgcaaccaaaagtttcttaaaaggaaaaaggcaaccgtagccacgatattaatacgagaaaaccatatttatttcactataaatattcacattaattaaaaatattttgacaattaaattatcaaaaaaaactttacaatctttccatttgacactttagaagttagataatcaagatacttttatttatcaaccaaaaataaagttagcaagatcacaaaaaaaaattcccttgaatggcacaccattaacacaaaaaacaatgttaactttaa

SEQ ID NO: 214721 - DNA, 1129 bp, Cannabis indica
tctagtaaactttagaaatactttggcatgccaataatcactagtggtaacaaatataattagccataaaaactccaacaataatacttactaccatctttacaaaccttctttcggccccatctactttaatgcctaaaccaagagagattgcgccacaaattatgagaacaaggattttaaattgtagcaaggctcgcctaaaaaaaaaaaatagacaaaagttctactgggtgaattctcaagaatgttagcaccaaacgcaatgcgtctatgagcgacattttctttatcaattccattgactaagtcacttttgagaagtttagctatagcctcaacacctcctttttcttcaagatgtgcttgccgatcttcgttttcagtgagatgatttatagtagtcgatatttgatcatcactctcaaacacattatgatttggttcaacatcaacaacagtatcaagggaagcatatccaacttccttgtggctcttttgtctgtcgaagtcttgagaagcttattaaaatcttaaagctgagacacaaagagtattaacaactcgcaataaatagctggtaccagtattatttgtctctttttcttggaggtttcattcttttcttcttctaataattctgtaagctctatttcttcatggatcagaaaactgctacttgatatggttactgagcgcgacagcaagcaaactggaaatgtgcctctcccccttacagagtcatatgatttctgtgaaagaacgtatacaaataattctcattcatgtcttgctcaaacaatactaacttaagaaatgaggcaaattaatcctactatacattgtaatatggctatttaatatttttgtccacaaaattatgatctatgtatcatagtatatacctttaatttttcaggtcgttaaaagtagtctacaaactatttagagtattgtaaattgatcattttgttgaggttttattacacgtgacaaacagaatgatgatgtggttgtgtagcaattgtcacgtcagcacacaaaataatttacatgtttttaattttttataatcattatgtttttttagtttataatcttctaaaaatcaatttttgtgaaaaaaaaa

SEQ ID NO: 214722 - DNA, 684 bp, Cannabis indica
tgtgctaattatgttatctgtgaaatttcttatttttcgtatttgtgatcggtcgtagtgaaacgcaacgttgggccattaaagagtcatgttttcttatagtttagaattgttttagtagcaggcaatatggttagacattggaagtgtcaggaaatagttgaggtttagaaatgaccaaattacccgtgggtgtcattaaacttttggtttgtgttaaggggcaaaatggtcattttgctagggaagtcttttttgtcttttatgggctttaagaatttgattttctgagttagatttaataaataagaaattagtatttacttaaaaaaaaagttagaaaaacctagaatgcaactctttctctacaactctctttttctctcttgaatcttcaagaaaccaattggggattgtgaattttcaactcattttaaagagttctagctgaattcaaaggtttcaatccaaggtataatcttctagcctcttcctttttgttttccttaagctcaagttaggttttaaggtaagaatttgtgagttaggattctgcagtgataattggtgtttgattttgtgttctggagttatgttgagaatatttgtgttgttttgagctaagtttgttgattgttatggtatttaagcaaaatttgagtttaaggactcaaactttgtccc

SEQ ID NO: 214723 - DNA, 681 bp, Cannabis indica
cataacaatacttgtgaactcataaaaaaacataacaaaactggttttataggttcgatataaactaatttaagttattttcattatatatcatttatgttttgtttcataatctccattgttgttgtgtaacgaaactaatttttatttggtttcacattgttcattgttgttgtatgatgaaactggtatcgatttattttttgtcgttttgtttggatggaacctacttcctccactaaaaatgcaatggaagatgttgctaaagattataagtactgactccgaggaaaaacttcctccatatcaaaaagaaaagtaaattgatccaaattttaagtatccatcttaggtacattgttgtttctttttgaagtatattcattttctttttcaatttattttctcatagttttatatgtttatttgcatgaaactattttttaggtgtcttatgtctgttcaatatcttacactactacaaaattgactttttgcttcacttgtaaaatgacacaaaaaaacttttgtgtccgttgtataaattgacgtaatacagcagacgcaaatagtcaagttatttgcttcatttctaaaccgacgcaaactttattatgcttcggttgagaactgaagcaaaaagtatgctctattagcgtcagttcttgaatgaagcaaaaa

SEQ ID NO: 214724 - DNA, 575 bp, Cannabis indica
tgtggctcctagagcctttgtacaacaccagctctcgtggcatctccagctgtgagcgttgcgccaatcgcacgaagcaaaagacccgcgaaggtgttagactatttttagtctaagttttgggtcactttttagtgtagttttcaatatttgtttctaattttaggattgttttatacttgattctctttgttttaggtccccaagatgtttaaaggaagtattcacgagaattagagtggacaaaagaggaaagagttgagtaaagaaataaatccttctctgacaaagctagccacggcaggcattacccctcattgcagagattggaagaaagaatgaggatttcaagatgtcccagccaccgcgactaaggatttggtggtcgctgggaagccttcttgacgagcttatgggcaatttcgtactttcacaaattttaaatagaaaacttggctcatttaaaagggggctcgtgattttgaagagggagcagaattggagacctagaaacagtggagataacttcaagagcagcttgtggcaatccgaattgatttctccaaccagttctt

SEQ ID NO: 214725 - DNA, 624 bp, Cannabis indica
catggctgaaaacccagaaaatgctaatacactaaatgaagaaactcatcactgttctaggaaagagcccatgggctccagaaggtcttccaacccaaagactaaacagaccacctgatctaggaggactcaacctaaggatagccccagcagtcggaccacaggttcgaggaggacccaacctaatgttagtcctaatacgcgaacaacatgctcaaggagaactcagcgtgggaatgacccgaatccttgaataaaggatgagggacccaatcgtggaggtactcaaactatgggagagagcacttatgaaacggaaaaccgccaccttacacgatgcctagaggaggcacaacggtggaatgccgaattagagcgcaatgcagccgcagctaaggaagcacaggggacaaacactcaaaatcaacctgaacttggagtgagaagaccacgaggtagacctcgtggctcgcaaaccaggttagaggaaaatgcccaggaagaacaacctacggaaattgagattccccctaaaaatttgaatgatcggccagaaccctctcatagaaatgagaatgggaggcaacccaaagctcatgaacagaaattcctcatggaaatgag

SEQ ID NO: 214726 - DNA, 570 bp, Cannabis indica
tacattatctttattttttgtggaaaaaatacctaatgacacaattctcttacatccgttactaccacttccgtcaactcataaatatagatacgtggagggcctagatgcattatatttatttattttattttaaaatttaatattcttaatatcaaaaactaaatgttacttgtttcaaaaaaaaaaaaagagagagagatgcaaaactaaattaccataactaagtgaaccagtgcaatatatgtgaaaattattatgagaattggttttcttacaacaagtaggatttagttctgatattaagaatattaagtaaaaataaatataatgcatttggaccctccacgtgtccatatttatgagttaatggaagtggtagtaacgggtgtaagagaattgtaacattgagtatttttgcctccaaaaataaagataaggtatttaagtgtataaaacctaaaatattatgtatgtatgccgcaatttacccaatttatatatattagaatattttatagttttaccacataaaaatactatatttgtatttatattcttacccatttt

SEQ ID NO: 214727 - DNA, 823 bp, Cannabis indica
ttttagaacttttgtaagtactttattgttaagtgtcaagtaaattgacaagtgacaatttttcattgttccaagttatttaacttttatttttaatttaaaaattaatttgaatctaccaataagaaaatgagacgtgaataataacttgatatttaatgggtaggtacttatagaaatttcaaaaatataacttaagtattattaatataaaaattaaatatttatttataatttaaatataattatttatcatacacacaaaattaatagcatttgtcgtatgaaaattgaaaagtattttgtcattattattgtggtaggtatttgaagttattaattcataaataatattgtccttagtgaatgtggttggcaataatttatcatttgtaaaaatagaaaaaaaaaaaaaaaaaataatacttaaaaaaaagtaataatatagcctaccttcagtagtttttttttttaaaaaaaaaataattacaaacactagtttttttttaaaaaagaaaaattatatttttttgtttaagaattttttatatatatatttttacgggttttttcatagaaacaatacgaaaacaacaaaaaaattacatgaaaataacatcaaaacaacaacaaaaaataatatacactacaaaaaataatataatataaaaagaccgtattttcagtaaataaaattaaaaaaatcgtaaaaatatttaaaatttcgtgaaactgtatttttgtagtttttttttttattgttttgtgtatttgtgaaataattaataaattgggattattacataaatactcaaaaaataac

SEQ ID NO: 214728 - DNA, 525 bp, Cannabis indica
ttttttttttttgagaaaaatagtcttaggggacactactcaagagcaaatcactcaaatggatcgagagataacagattcattgataactgcattagccaaaataaaattttgaatacaagatcgatagctgggccaccaaaaaatactagaagtagcttacacatctcttttcttatgtattccatatttcatgatgggttgttataaaataagtgtttgttaattaatttttctttacttaattttaaattaattatcataaattttgtttaaaaataaatacacagaaaaagttcatgtagatgttatagattcgaacttttttatttatttctatcagagtttgactcaaattatttatttctttatctatatatgtaaagttgcaattttttttttggtaattattaattgtgggaaaaaggaaagtcttggtgaccaagttttgatgagtcttcttaaaaaaaatttggaatgtcttggtccccaagctatctttatgcccaagttttgtaactttat

SEQ ID NO: 214729 - DNA, 815 bp, Cannabis indica
cttaggttaatgtaaattatgtgctagagttaagtggagagtgaagctatattgaacaacctactcacaaaagtgactatattttaatgaaatataatataaggttttttcatgagttattcttcaatttattccttaaaagactttttttgtattatctttttctatataaaatataataagttattttttttttttttgtataatgtatgtatagtatatataacaaatatttataagagtaaatatatccttagcacttataaacaaaatgataaaattttatggtctcaataaatataattctaaataactttgctttaaattttttttaaaaaaattgaatttataaaatattaattgataaattttttaataaaatacttaattttaatttgtcgccgcccccaaactgcttgggccacccctgtctatggtatagtattgtatcactgtattttcgttgaatatataagatctaactatattctaatattcaaattatattcataatccataaataaggcatgatcattgattcactaggctaaggatcattataggttagttaattatcattattattctagaataagtctattaatattttgatttataacatattactatacaagtcattgtaaaacgttattaaagttgtaattttttcatttattttcagaattttataattttttgactcataatatggtagtgagcttatgctaacttatttccagtatggtagatcttcttcaatccgactactatcatttgtaatgaccataagatctaactttttctatctataaaat

SEQ ID NO: 214730 - DNA, 553 bp, Cannabis indica
ctttaatgattacccatttcccattttgggatattaataacatatatatataataataataatattaagcattaatctacgttacctatttccaagaacttgatgaagactaatgatgagatcttcttcttgttgtgaaaacattcctcttttaaatcaggtctcaagtaatttatccatcttaatctgcaactctttcccacacctttgcaaacctgatcatcaacaaattatttagaatgaggatataattttattaattatattttacatgtgtattactatatatatattactacactaaccagcaagtttaggaactgaactccagcaaccaacaccaaaatgagtaatgtaattgaacagtttctcatcttcttcaggtgaccataaaccttttcttaacttctgcttcaaacagcatgaatgtcgtcccattttttttttttaagaattagtgatcaagaaacttgatgagtgtgtttgtctatatttatatatatgtgaggaatttgatcactctgacatgagaaaaataaatatataagctttt

SEQ ID NO: 214731 - DNA, 627 bp, Cannabis indica
ggtattgaacaccttaaagaaataaatttaaaaatttaatcgaagttaataaagatatgtacataataataatgaacatgttaaaagtcacattaagatactaagcaccacaaaaggcagcacactgcttaatgaagatataaacatattaataacgaaaatataagagttacattaaggtgccaagcaccacaaaaaacaacataccgttattaatgtattttaatatcaactcctataaattttaatttaataaataatatgaaaattagtaccacacattagtgtgatattgagcaccttaaggtgtcacataacaataataatacgaaaaattatttaccaaaaaaattacaaagatcattttttaaaataaataaataacaaaaaaaataaaaaagaaaaaaataagtgttttttgtttgtttttattgaacatcaattcttctgtgttgttagatttaacccacatagtattatgtttgattattcatatctttattttattagtttttatgttgtcaactaaatatgttatgacttttgagactttgtttttcaaatcagaatttctatcaattttatgtatatggagatcatcaaccttatacaatttttttttttttt

SEQ ID NO: 214732 - DNA, 781 bp, Cannabis indica
ccaattagttacttttgcgtaaagaaatattattgttattactgttacatcttttctaacaatataccataaataacatcaatcaactaacatctactacgaattccatttttttttttaaattttcttgtattttcaaaagtaacaatttggttacttatagtgccgataaaaaactaattagttacttttacataaaaaaaaattatttttatatcatataaatttagatacaatttgattaccttcaaaacttatttgtaaacattttataatcaaatagttatttttaagttatattattgtatattttttaaaatatatttgggtaaccttaaagtttattttcgaaactaacgagttgttatgtattataataagctaccactttcatgtaccaattgttttatatatatagtatacaatatacaatcttataacatacaaataaataaataaataaatcctaaggtatacaatatgaaaaatgcattcaaacaaacattaataaaatcctaaaaaaataaaaataaaaaaatcattaagcatacaaatcaaaatcacattaaaattttaaaacaaatacatatacaaaaatataatttaacaattttttcttgaaaaaatacactaaaaaataaaaatatatcctaatcatatgaaaaacgcacatatataatagtcctatgtaatatacaaacacttttaaaaaaaaaataaaaaaccctaaaatatactgtatcaaaataacatatgatcaaataaaattttcaaaaaaaaa

SEQ ID NO: 214733 - DNA, 609 bp, Cannabis indica
ttatgagctaaactcctaatttagaggtttgatagatattgtctaagatcatgatattagttaattattttttttccttgattgtgtgatttattcatctttatatttattacatgtttaaccttgatcacctttttcatgatttatgatcctaatgtaaaatttgaaaagtgaatattaaaaatgctctaaataaataaaatataggttttgatgtgaaacgaaagtatttaaatagctaatgtgacttttaaattattgcttaatgtaaattgtatgttgttctatcacagaaatgcagtagttgacatgcagtttatgacatttatgatctaaaaagaataggttaatttataatttctcatcatataggaggaagaagaatggttaattagtattaatgattgggtaatcaaagtaattgaaattatatccctaattttacattcattgttaaactatatttgtttgttttatttaatttatttagtttaaaagtttatttacttatttgctaaataaaaataataatttaattaattttattattattacttgtaaacgatacgtagtaattttggcaatgctaacataattttgtattcaaag

SEQ ID NO: 214734 - DNA, 1082 bp, Cannabis indica
tataaacaagggtacatatattgcaactttgccacgttggggtcgtaattttgttttaacaaattatgttatttactaaatatcataaatagtatttgagtattttattacaaaaaaaaatttaaataataacttaatttagagttgctacaacaagactagttacattttttgtaactgttcatgttaaaattgtctttaaattggttataattaaaaaaattaatcaaaaattgatctaaaaatactatttgtaccattttaaaaaaatatatagtctaatttattatttatcaaaatataagatttgcgtcagtaattttagtaaaacaaaagttgaaaataatattaactcttacagcttttaaaaaatatattcaataaaaaaattatttaattaatttttatttatttcaattaaataaacgtgtttaataaactaattactacttaatcatataaattttttaggacatgttcagcaaattttccaacgaaaaaacatatttattcgcatttaatttttctcagttcttcgttatatagtatttttttttaatttgttgaagggaggggttatataaccccattcattgaaataaaaacggcatagccgaaacagtacagcagaaaataaattacagaggaaaacaactaactgaaaactagcagcaacaactagaaaaaccaaactgaaaaaaaaaccaaccacacccagcctaaggaaacaaccaaccacacccaaaggtgcaaatttggatcaccttaatcagggttccattcattaacatcagagaacacattctcgtccataactcccaagtcaagagtaccagtaaccccctctgcagcagcccacttcgctgaattgtgagccaaaaaattgtagtttctgtctatcttcctgatccgaaagtcctccagttgcttgactgatttcatgaatcgatatactgcagccttaatgtcgatgaactggttagagatgctgtggtagacaactcgcaaccactactcattatcacaatggaaagccactttccctcagatgtaagcttgcgtactccgctgcactagccaca

SEQ ID NO: 214735 - DNA, 999 bp, Cannabis indica
tcttgaaagaaatgaatcgaaaaagcagcatgtcgtatcaatagagaattctgaaaatctttcattcttaattttctttaatttacatgaattcttgccagagacaaattgcaacccaacttagtttgcaatttacatcgcaattccaacaactcaaaacgcaatctaagtttaaaaaaaaaacaaaaaaaaaacgaagaaaaaaaaaagtgtaacttaatgtacattggttaattctcctttttagtattgaattaactagtttggataattatattgtgtttatttcctatagatatacacgcaagtcacgttgaattcgtaccgtcgtacgtacagtttcttagtcatgtatgattattctgaattagattctgcaaaattaaagactttttattcccagtaactatatttgtcccagtagtactactttgatttgttctagttggatatttgagcagattttggtttgatatgtttcgttagatttataaatagtctcatattccaaagaaaaaatgaaagttttcttctgttctaccagttgttttcagaccctagtgtttacattattttatgtttccattaaagaattgataatatacagtactattttatattatttatggatatgaaagcttcttctaattttggaagtttcatcaacgtacacatatatgcatgtgcgtataaacaacattacattagtagtagacagtagagagaatcagaaattatttttgactgcttaactttattgtaatggtcatcattgttttgtaatttgtaaatgtaacaaattttactactcaattagtttagttgttaaattttactacaataaaatataggataagtctataataaatttaagtttacaccctaaaaactttttatatattttttttatgtatgttatatttatttaaaattacatgttaattttttaaaaaaattcaagcagtttacgatacctaaaataagatttacatattttat

SEQ ID NO: 214736 - DNA, 722 bp, Cannabis indica
aaccgaaaagggaaccaccattaatttcggcaactttacctgagaagaggaccaaaatcaatcaaaacatgggctattttgaattcgtgaaaaaaaaaaagtgtagaaaaattgctacgaaactaaaattcaacaggaaatccaatttaatttgcataaaactaatgttctgatttcaattttcaaatccatgaaagacagatctcaaaaagttgaattggaattcccaaataatcttgctcaagtataatccaaaaaaaaaaaaatacatcaatactatagtaaaatatttatcatggtgtattcgttgtttttcaaatttttaatgatgaataatttgttcatattaaatcataaagagacatgtagatagagttacgtactgttctgatttttaatgtttcataacagttgcattacagttgcataaatattttgctaacagttatttcatctgattgaaaccatcgtctgatacaaccttcggtcaaccacctagtaaccactctgcaaccatcgtctgattggaacctccatctgatgcaatcacaatacaaccacgcaacaaccaccctgtgactaacgtctgattgtataagtgatattgtaagaggtatttagtaattaaaattacataaaaagtataaatgttgtccacactttatgaaggtatctttgtaaataaagtgtccactcatgtaataattttaataataataata

SEQ ID NO: 214737 - DNA, 690 bp, Cannabis indica
tccagattctcgctgtgctagaagattaactcgcctagacgagtcggctaagcatcatcaagaggtgacttcattaatggatctgacctattatcttggttgggcctgaagtcattaaacaataactaactttagaaattacatgtgttctcatctaaaagcacaaattatatttagttatattcttagtggttatgtaaatttttagttgtatagttagcttttttttttttaatgctattcaataaactaaattattattttattaaaaaatatttaatttaagtgtatttatgaaaatgaaatataataatattcacaatttattattaattatattcttaatttcatcaccgtaatacttttaattttatatataatacttttctctgtttttgaaatataatatactttttctaatttttttaaaaaataataatagaaatatatatttttaaaaaatatatttaagtgtcatttataaaaataaaatataataatattttaaatttattgttaattataattttagtttaattgtcatcacacttttaatttatacatattactttttattatttttgtaaatattatacacttttttttatttattttttaaataataatagagaaatattttttaaaattatgtgtaatggagtttatatttgaattgcaatattaaaaata

SEQ ID NO: 214738 - DNA, 705 bp, Cannabis indica
gatgaaaagggaggtcatgattcgtatgtctatatttccataataaaatatttattttgccttactgtttcataataattaaagtaataagtaccgtatgaagttagttgtgcgattgcgcgatctttaaaatcataccgtccctcgcgtaattgttataatcaatgaaatatacaatttaatttatgattttatttaattttgaaaaattcaggtattaaatagttattaatatttttactgaataagtaaaatattataaattgtgtattatttttttaattattttgaaataaaaaataaaataattttttaattcaccttaattttacttatttattcttatggttattattagatattaatgtaaataaattaataacatatttattaatttaattatattaagaatccattctatcattatttatacattattattgtatataattaaggaaaaaaacagaaaaatataaaaaaggaaaaaaaattacaaaaatactatggccggcccattaaacatttatacagtccacatacaaatatttacaaaaataccacatgcactaagccttcaactgtacagagcgaacgatgaagatgaacatacctcgatcgtttcaaaactgcaaaacaaccaaaatgaaaccaaaacgagaaaaatacaaccattaattctggcaaaatcaactggaaaagaagacc

SEQ ID NO: 214739 - DNA, 623 bp, Cannabis indica
ttaatattgtgcgaatcaagtttgagtggtgctttaactattttggactatgtgtcttgtaaaagttatcgaatggaacatctgttttattaaatgataaaatagatcttatattttctaaaatggtaaaaataggactctgagctcaattttcaataatttttttttaatataaccaactttaaaacaatttttaacacaaacagatacataaaatataatcagttttgtcataacatctcttgatcggattattattaagttttattttgacaaaaaatcagttcagggtcttatttgtacaattttgaaaaatacagggttcattttatcacttaacaaaacagatggtccaattagtaacttttacaaaatacaaaatccaaaatgttatttactcttataaaaaataagtatattcttgtattaatcggtcaaaatcattacaatgattgaaaaatagaaagaaaaacgaaataacattgtaataaggcagtagatatatcataggcaaaaaacaaaagaaaagaaaaagttagttggctgcgggagcgggtgcgggtgcaggagttaaatgtgagaattggaatggaatatgacgttgacgataatgttgttgttgt

SEQ ID NO: 214740 - DNA, 1100 bp, Cannabis indica
tgcaaagatttatcctcactttcttatcccaaataatgtttggtttgtccttgataaatttcagcgattaggttcgggttatgaaggatgaaatttaagtgtgtgtgtgtgggtctattaactttgatgggtgttaagaaaaactaggcttttggctcaataagggtgactattgacaatcaaaattttttcgggttagctcgaaaagctcaatcatccaaaaatggcctaaatcatttccaagttgtaaagctagctaggatttcgcctcaagaatgacgctaaccaattctagatgcttaaactttctcaaggtgttagctattctagaaactcaaagtatggtgggataacacaagtacacctatttgaaaaaattccttttaaactagcatttaaacttggcattttcaacacacaaaaatcagggcacatcacaaataaaagaaaatggatatttttttatcatcgagcggtgctaaaccaagctaaagcaaaatgacacatacttctcagttacaagctaacacaacataacacaacatgaccacataacatcactaacatgactttaactacacaatattactacaaaaacaactagaaacaacaataaaaacaaacaatttaaacaaaaacacacataacaacaacaacaacaacaacacataactaataacatttaaactaaacaaccagaactatcacacatatttatagtaatcaaataggttaaggaaagaagaaaactccctcaagaatcagactcttcaccgacagagcccctctcttaaccatcaattggatgccacggcgcaagaatctgatctggaaaatctggatatgctgagataactttgcgcacgttggtctgcagcgcacgattcacccacatgtctcttgtcctttcatactcccagtttatagatattattttttttaacccaatactccagatgttatagcattgcttcaacaattcattcttttatgcacccctgtttcaaaatactgaggcaatgctataactcctggacctgctgattcagacaataaatcctacttttcagcctatttcaacaactccattttctgccttg

SEQ ID NO: 214741 - DNA, 589 bp, Cannabis indica
attacaagagtttattaaaggcaaaccaaacattagaattgtaatcataattccattacaatgatgattacaacaaatcaaacacgccataaggttttatttaaaaaaaaaagtttttttttattttcttaattttcttaaaggcaattctcttattaatagttgttgaattatggtgaattaatccatttgattcaaacacattataatatatttaggtatctttccttctaattagtatggtgttacttatggtattgtagactcttctcattctaattacaataccaaaataatttacacaaaaaaaaaaattatttattattttatatattattcattaaacaatgtatataaaacccacacaaaattaataaaccaattcctaaatcttatacacataaataatatatatagtttaaaaaaataaataaaaatataatatatagatgtaagaagaattagattctaagaccctaaaaaatatttatatataatattaaaaaagaatgttatagaatttgaactcatgaaattgtatactatatgatacacctcaatcaataaagatatgaatatttattgttta

SEQ ID NO: 214742 - DNA, 900 bp, Cannabis indica
gtgatccgagttggcagtctggacggaacaaagaacagccttcgggaaaagcctaacccaatcaccattagcgagccctttatctaaagccgacttgacaaggttagacccagaacggtggttgtcccaggtcaacttgtctccctggatgggtagagaaataagcccccgggtattcaccagatttgagattacaggaataaattggtctctaccctttgatccctctcgttcagaactactaaggacaaaattagtgtctcccaatataagccacggaccaccgaacctatcccctaccttcattagtttctcccagaacgctttttttgcatgaaaatacgggggaccataaacacaggataggagccaagggtgcgaggggggatccgaaaacactaaaccagatatgtgattatgggagcactcaatacattcaaactcaaaaccaagtttccaagctaaaataatacctcccgcattacccacagccggaacaataatattcaaataaaaatgaaaggattttagaatatgtaccaaagaagtagcatcaacttttacttcggtcagaaagatgacatccggagagcgcgaccgaattagggacttcagctcacgaactgtagaggtctaccctaaccctctacagttccaagcgatgcctctcatggctcctgtggaggagtagtattctcctccacagggggtatgagagtgagccgacccaaaggaaccagagtcttcaatcacaaaagtgccctccattggtcttgatgagatcacattctttccttttgtcttccactcgtccgggcaagtaaaatcattattagaaagggagacctcctctgagggctcctcttccgtcaccttagtatcattagcgcgatcctccgt

SEQ ID NO: 214743 - DNA, 725 bp, Cannabis indica
tagactaaaaaaattttctggataccgaatcaagtagaaggtgcattagtacatccatttttaagggggtgcattgtagaatcactaaaaaaatatttagtaaacagttcaaaaacatcttattgaaaatttatggagaagctacagtgaaagttggtacatgccaattttttgaaaaaattattttgattaaaagataataaatttatttgtactaaaaagatatttaattatttattatatatcaaaaagtaaaatatctaaaataaataaattataataaaataaataatttttaaatctcttattttttttttgtcttgtcttgaaaaatattttttatcttatatttttaatattaacatttcacatcaacttagagtttcttatatatttgtgtttctaattttttttattacatgtgataaaattataatttatttttattaaatgcatataaatttatacttttgagagaaaataattaaaaaatggataaaaataaaatttttatataacactaagtttttgtatattttagatcataatgaattagattataacattatcatataatagaatctgaacaactcacaacactttaaaatttataatttactaaacactctgcttaatttttttctatagttctgttgtagctattttttcccacagcacagatatgtcaaactggcccttaaagaactttgtcataccaagggatt

SEQ ID NO: 214744 - DNA, 876 bp, Cannabis indica
gttaacataacgaatgacgtgttacatggagattgactaagagcatctctaatgatgactaaaaattttcacatcatccgaaaatataattattttattttattctttcttctacataatttttggcaatcttacttctaaaatcacttcaatagtataccactctttaaaaatactataattataattttacacattattatttaatatattactttttttaattataaatacattagcaacaataattttttattaaaaaaatgatagtatcaatgctactgtataacgttcacatatatttttaaaatgacatttttttcttttaatagtataacatctcaatattttgttaattcatttattcatctagcagtatttttaaaattttgaccattggaaatgctaggtgtaatacaatattgtaattagagtaaatgattattaagatcatttatttatatacaactattctagctacctatcttccctagctctatcaccatatatatagtactattagagtaaatgattgttaaaatccttttaatgtttcatatagtactttatttcgtaacaatttaatttttgaaaaatattatagatgtatacctaatttttcaaaatgatagatagtagtcacaagtggatacacatagaggtgagaggagcagtctattttttttttttttgtagtcacaaaaaaattaaaatatagttgcatattttttatggtttactctaattcataattagtttgtaaaattgctatttttttttattattttttttttgagatagaaattagaaaggaatgaagtggtagtagtactgctattaagttaggtgggtcttacttgtgtatagtttcatgtt

SEQ ID NO: 214745 - DNA, 733 bp, Cannabis indica
tagaatagacaaaaagattaaaattactttttttttaaaaacaaaaatttattaattttttaaaataatgtttttaaatatatcatttatatatatataaatagaatattatcatatatatatatatattaaaatgatatagataatatatatgtcatgactttttaaattactttgatagtcccattcatcactaatataatagatgtcgattttgtcactaatatattgataaaaatgcatcaattatatgtttgaaagatgtcgattaattttgtcatttttcaaaattaatagcgaaccagtacaacacaattatttaaggaataatttcataaatacctaaaaacaataaataaaaatataaaaatacagttatacaaaatattaaatatttttaccatttttaagattttatttatagaaaatcatgataattttttatgttaattttcaacttatttttatgttattgtgttgttaattttttgttattgtatatattttatataattttttttattgctgtgtgcttttatagatgtaaaaatatatataaaaaattaaaacataaaaatgtaaaaaaaaaaatagtacaatttttttgaagtaaaaaaaatagtacttaatgtaattttcataatataaaatttctttcataataatcatatttttgtttttatttgaataatgtttgtgtatagtataataactcgtatagtgttatttatat

SEQ ID NO: 214746 - DNA, 716 bp, Cannabis indica
cttcaggaaagatatggcatatagcagatactgtgaattatatatatcatgctctcctgtatgcacatatatatatatactgttgtaaataataacacctaattacttttctcttctgttatgtttgctaaaagttgttagttgttgtaatggtagttgttagttggttcttgtttttgtattggctgtaacaaactctatgtttctataaataaaaggattggtctaattatttgattagcttttgctaagctaatctcaattagcattttcattctcttgtgtctgtacatggtatcaattgtttttgactcacgtccatgtcgtcctcaacatttgatattgcacttgcaacaatggcgaatgcctccccttctgctgctcctgcaaatcaaacatggaattcatattccaacttgctcacttcatcttttacacttaaactagatcaattaaatttttgtcctggaaatttcaagtggttccaaatgtaattggccacgatcttgatgacatttttgtttattggagtccgtccactttagaatcttgtcataggagtcccaaatccagagtacgctcaatggcggagaaaggatcaactcttactttcatagcctcgatcataaatgacagaaagtattcttgccttagtcgcgaatgacacacctcagctgtgtttggcgtgctctggaacaaaaatttccaagtcaaat

SEQ ID NO: 214747 - DNA, 1057 bp, Cannabis indica
taaatacttaatgttttttattttttatacttaaatacttaatgtttatttttagaggtaaaaatacctaatattacaattctcttacaccgttactaccacttccgttaacttgtaaatatggttacgtggagagttcaaatacaatgcatttattttttattttatcttaaaacttaatatttttaatatcagaattttctcataataattttcacatgatattagtacttcaattcgataatcatgttccatatactacaccggtttactcagctatggtaatttagtattgcatttctcttatttttttttaaaaaaaacaagttgtatttagtttttaatattaagaatattaaattttaaaataaaataaataaatgtaatgcattttggccctccatatgtccatatttatgagttaataacagtgtaagagaattataatattgggtatttttgctttcaaaaataaatattaggcatttaagtgtataaaatctgaaaacattaattaagtatttataccgcaatttacccttccgtaattatatgctaaattttaacgtcaaattttaccaaaataaataaataaataaatgattgtgagagaaaaaaaaaagtgagaacccaatagaatcaatttttccatgcatattaattttttttttttaaaaaaagaagtgtattagatcatattcatataacagcatgaaattccaatatgaaagttggaatgagtggagaaattggaatctttaaattcgtgttaaagaattaatgatctaagcttataagttaacaatattcatagcatcatctaacaattaaaaataaacaatattcatggcagctcatatcatattagctatttaatattattcacaaaaaatatattttattattacaaaattatattttaatttttacttcagacatgacccaccctaaactgctaatatattagtgcacgaaattataaaaacaaagtctttcaagaaaaaatgaaaatgtattgtaaattatatatatactgataaatttatttaggatgtat

SEQ ID NO: 214748 - DNA, 532 bp, Cannabis indica
cgacgatctatgtttcgtgtccccgccttggcctagacttcatatccccttgtacgggcacaccttctagacttctggcaggcatattctcctttttggccttagataagcccaagttataacagtgacgggcagactgttggtctcccctcacacatgccactctatgacttgttgggaatttaaggcacaagtggttgatagacgtcaccactttcaggtcgttgaggggcagtcgaccaatcatggcaatgaatgccgaaggaacattaatcatgatgaactgcgccatcagtgtccttgtggttggattttctccaattgtgaggggtaatctgatatacttgataggtacgatgccttggtcaaaaaagccatacagcacttggtagcgaaggcccaggttggtgagttggagccccatgtttgcatatattgatttgaaaagaatgttggaggaggctccatcgtccaccatacatctagccacggtcttattcccgatttttacagtaagggatcattatgcaag

SEQ ID NO: 214749 - DNA, 498 bp, Cannabis indica
ttttttggcttctacgtatgtaacttcgtgttttttttttttcgtgctctctgtaccttcaatgacggtgagagaaccaacttcccatcattattgataagtaataaaaaaccttcttactatttttttattaattaaggttatgggtgtaataattttaaataataagaagttttattacaaatatttcaataatttaagtgtaaaaaaattaatttctaaaagattcttctttagtaacaaattataaaaaattaattaataattattagtaatttaattttaaatataattaattttaattaagattttataaaaaaataaagtatcatgttactattaggttacaagttatcaatttatttatttattttaatttttaaattaatcacaacaattcaatagaaattcaatgactaaaaataaatgtaaccataatggttacatatatgtaactattgaaacctcctccaaaagactatatatataggaatatga

SEQ ID NO: 214750 - DNA, 2019 bp, Cannabis indica
tatgaatttgattgaaagtactctgattccgttcgcatcctgatgccgagcaagtaagacccaatactttgatggcaaatttttgtaactccggcgtttgatctccatattgagtccaccatttcactaaaaaaaaaataattacttaactttatattcatactattacacattttgaaaaaatattagaaatagatttagacatttaattacctgttgatcgtttttgaaatgtttgttgacctaaggtgagtccaaagaacccttccttgttgtggaaattgctacattgaaggtcaactttcattctgtcttcaagttccggcataaatctgtccatacaatgaaacaaatccaacttgatctctggatggttggaaaattcttgtgaataatgacaacagggattcaaaaagtacgcagcggcatgcaaatgtctatgcaactgaaattcccattctcatctatgattttccatatctccttgtaatccttttcttctccacccaaagctattgctattttttcttttgttgtatccataacattgtagagataacccatagctggttctttatcaccatcaactagccttaacacttcaaccaacggttttgtggtcttaatagcataagacacacttgcccaaaaatgtgtctttcaaaaccgtgtatcttgcctcctttccaccaacttttgatgcccaaggacaagttgcctactctttagaattaaacatagcttccaaaagttgcctcacttgatatatgctttgtaatataagaaatgcagttgcaaatctagtggcagcaggtcttataatatttcttttgtaatatttccatgtcaagtttcacatccattgatgattgtgaaggaacttgctcaattattttcctttggacaaggcactttggtgttgtggcaattaaccaatttttcaagcatcaaatcatgacaatgtgctgcacatggagtctaatatagatgctttcttttctccattaacagtgtgcccgctgctttgtaggcactagcattatcagtgaccacttgaacaactagatgctctccaatttcttcaatgacatcattcaacattttaaataacctcagtgcatcctcactaaatgaagaacctacttttaagaaacacaatgcccttggattattgactaaaatgttgattatgcctcgatttctaatatttgaccagccatcaaacattattgaaactcctgttagtggccatgactgcttaatatccttaactgtagcatatgtagtattcatctcctctaatatctatgtcctaagctcatacgtactaggagttttcaatcccctcccataatctccaattgagcgacacattgatgaaaggactcttagccatgtaaaaaggcaaagcattctcaaagaaacacctcccagtgtccatgaaaattttattacgcaattctttcgcttttttgggagttacttgggtttgttcagttgctgcccctccaccatcactacccatgaatctatccattgggcctcttacacctctactaggcatgagggcagaatccttttgagaatagtaagcacccgacccaattatcccttcaaaattcatttgactcacatgctttgctattttttttttttgtttcaagtgcttcacaaattcatcctttacttctttgggaacctccgaacacggtttaacatcttttctagtttgagcaaggtgttgtttcaatcttgtaacaccacccttaataatttgtttgcaataattacactcaagataagcataagtcttcttttttttagtatctcctcctgaaatatcacctgcctaccatgtttccaagctggatcttttctattttcactgttaatacatgttgaaatttaagtatctaaatagtaaatgtagataaaaaaaaaaaaaaagaaaaaaaactaaataacatttatctaagagcagcaaaaagagatcaatagagagaacttcaccaagcagct

SEQ ID NO: 214751 - DNA, 1129 bp, Cannabis indica
gccgcttatagataaagacaataacagtgataacagttatttattttttcccatgcgatgtaaatatgaaacattgggattatccacgtttcatgaacggttacaaggataagatttcgagagaatagctgtcatcctaaaacctgtataaattgagacagaacctaagaaaaaagaggatggccaatttcagaaatagagagaattatacaaatattatatcttgtattctgtaaacactttgtgaaatcccagaaataagatagactcgtgaagtataaatagttaactttaaaactgttaaaaactttcttaatatttatattcattattattctagagtttatttattacattaaagcacatttattggttaacaaaattttgcgttaacaattataaaatatatattttgtaatttgtattataagtaaaatataaaagataattatacaaaaaattttgcaattatttatgaaaaatactaagcacataaaaaaattaataaaatataataatgtgagctagacattgcacacgtctagcctaatgttgtaagttcgtgcgggtcgtgccggcccgacccatatttattcgtattttttaaaaaatagatcgtggcgtacagtgccacagaaaaatatgagtcataccatgtcgtgccaatatttttaaagggtacgtaggcccgatatttttgtgttgtgctcggattcgtgtcatgttttgcttatgtcggatcgtatttcttaaacaagctagctcgttttcatattcgagcttgaattcgtgctttactttttcatattttttttcttcataattacaaacgtatatgtatattttatagctttagttatatttatataactttttaataatattttacataatatcatatacaaaaattattagcatctatagaatttaaatatttacttataaatgctcaaatttttatctcacactctataataaattaatatatgatcttaattttttatgttttaataattttaattatagaattatattcagtaatatatttaagttttattattatcttaatttatttataattgataaatgcatatcttattactatcaataaattataagaattttaata

SEQ ID NO: 214752 - DNA, 500 bp, Cannabis indica
tttaaaatggtcaaaatctatttgagatttcactactacaaaaagaagtttgtgtcagtcaacgcatctggttaaactcgttgatcgatacaaaagtcaactattacttttttacttcgattgttaacagacataaataataattaatacgtcgattgttacttcaacacaaaacaaaaaccgacgctaaagatgaacttttaaaagaaaattacacaaatgaagggttgaattttgtgtcaatattgcccaaacacaatatttagcaacagtttacatgttttttgtgtcagttgtgcaccgacgcaaattttgcatcaatgcacaaccaacgctaaattacttgagaaaaagatgtcacaatcacttatttcaagcccatttaaaataccctaaaatgaaaacctaaacctaagtgatatataataacctaactgttggctttaactcattctctctgtctctctctatgtctccatcttcatccttgatggcttgaa

SEQ ID NO: 214753 - DNA, 505 bp, Cannabis indica
tcttacaattcctcatcaatttttttcacttatacttgaggaattttcatcttattatcaagttgaatctgatccatctacactcattttaatttgcatccatttcataacttcttagctaataaaaattgatcaaagaccattccttgatctcaaagtttcgtatctatgttaggtagaaatcctaaaatttcctttttaacacatctagaattatacatgtatattctttattttattgacaatcccttggtgtgaactaccactacaacttgtagtgagtcccttgttgatggtattgattcatcaacattctaagactcttatattcttttcctgttttaaccactaaggttttactccatgatttgtacgctactattgcttcgttgcaataatcagtatcttcatacttggttaatcactctaaagtcattttaccctcagctatgtagtccgttatttaatagacaacctacttagtgatccaacattcactaatcac

SEQ ID NO: 214754 - DNA, 557 bp, Cannabis indica
acattaattagatataaaattttgcaattgtgcatgagaacacaaaactaaaatttggtgtaaatttactacaacattactttttgtgtcaaatatagctcaatttttataattctcattgaagatggtctaagtaaagcaagaacactcacttatagaagtgggtgtattcacctatatttgattggaaatacttacaataacaacaccattaattaaatacaacagtaaaggctcgttcgtattgtaatgtattgtattgcattgtattgtattgtattgtattagattgtgttgtattgtattagtattatttaatacaatacaatgttttgtattgacttgtattaattgattgtgtaaagttgtaatatatttttaatacactcgatcccaacaccaactatgggtccaggtccgaggtcctgggtccgggtccaggttcgggtccgagttcggggttcggggtctaggtccgggttcgcggttcgggttcagatcccgggtcctgggtccgggtcctggtccgtgtctgggtcagggtcggggtcctggtc

SEQ ID NO: 214755 - DNA, 584 bp, Cannabis indica
cttggtactaattttataatatttctgtaatctataattgtaatatatttaattgtttctacaaaatgaaattaagtatatattcactagtcataaaattaatttaaataatatttaattttgtttttttttaaaaaaaaaatatttaattttaatttattaaataatatttaatataaattgataaatatataatttaaataaattaaatttgaggttttgaactaaaaaaataattattaataaatgtataatttaaaccctacaacgtcggttttattatctacaacgttggttattttggcaaatagcatcggttatttgtgaataaccgacaccatagcatacttatggtgtcggttctttaataataactgacgccatagggtatcatttagcgtcgattgttttcaaccctacaacatcgtctagatcagtgtcgctaacaaattttgccaaaattgacactgaaaggccttagaaaccaccttaaaatgatgttattgtagtagtggtgcttcaatactcacattatttggtgtttttaaaattcctccaacaacaataactttgtaacatcagat

SEQ ID NO: 214756 - DNA, 874 bp, Cannabis indica
cggttatttaaaaaaaacagaattaattgtactaaggaataaaaatatatttttaaactattctaaaatgagagaaaataaaataggtatagtagctaatatggtataaaatacattagtctatctaatccaaaaaatataatgtattttttttaaggaaaagagtacaatgtatttatttatttttaggttttttttttaaccaaataatattgttactgagtaagagctagccaggccagtgcccttatttattcacctgaaatgcggaaattctttctagactcaattggaagaaagcttgagaaagagagataaatttagtttggtcaacgattactggaagtgctttgataaatttagtttggtcaacgattactggaagtgctttgataaatttagtttggtcaacgagtaaacaggctagctgaagactttttatttttttttcaacaaaaatattaatgagggtatgtagagaaatctaaaagaggtgtcactttaattaggtttcttagtctatcccttccggtgtactccatggagaccaccaagctctccaaagtaacagtatctaagatataggtagtatgatgcgggacttttaatggggttttgagaaaagaaattaaggtgccgtttggtaacacttttgttttctaatttttttaattacaaaatgaaagtaaaaattttgtttttgaaaaaaaaaaatgcgttttgtaaccacttttgtttttcaattttaaaaacagaaaacaaaagtgtgttctgtaaagtttatttttatttttatttttatttattttattaaagttcgggtctaggtccgaagtcgaattcagatccgggtcagaggtcgggttcagcataa

SEQ ID NO: 214757 - DNA, 555 bp, Cannabis indica
tttttgctcacatacttggatactagacccagacccaaatgagttcatattatggtatagtgttaaaatatattgattttttttagtaagaaaaaaattaaaaatagttttagaaaacttgagccaaacaccattaaatttttaaaatgacaaaaaattgttttctattctcacatttaaaaacacaattttaaaaactgaaaactgaaaaacacaaccaaataagctcataaaatccgaaacggatatgtgtgtaatcaactttgatcaattatcaattaagaaatatataatatgtcgatataagcagttttttataagcagttttttatattatttatttaattattaaaatacataaaatttaatattacattatattaatgatatatacaaaaccgcctaagtttatgtctagagcccattaaattaaggaactaaaaaaaaaattaattcttaaaattacatattttttttactgatttttttttaatcatattttttttctctaaacaaaagctcaaaaatataattttttctatctcattaaatttg

SEQ ID NO: 214758 - DNA, 631 bp, Cannabis indica
taatattaataacatctatttgtttatttttcaaatcatttatcttaacaaggtcaacaaactctattaataaaaactgaacttaattaaataaaagcatcgccaaataaccatctatattggtaagaaaaaatatgaaactaggcatgagaacgttgagaagctaaaagcctcaaaaattagatatcctaaatcttgtttggaattagattcagaagcagacgtgcatctatggtacaggtggttcttgctcccctcaatttcctaaaactaaatgtatagatatacttttgtatcatttctacaattagtatacacatatagtatacatgataaatttaattacagattaattttattacacaatatatgatttcctcctatagtaaaacaaataatattatatataattttttggaaaaagaaaaattagttgaaaagtcaaaatataaaaaaaaatatatatatatagatattatttttaattctcccactatttctctaacttctcacttcccattatcattgccactctccactcttttcacataacgtaaaaaaaaattgagaagagaaagaaaaaaggggtaatcgacactttacaaagaaaagagaaaagaaaaaaaaaaag

SEQ ID NO: 214759 - DNA, 568 bp, Cannabis indica
aaattaaataaaatactaattaaaccggccaagtacatattagcaaataaaacaattaataattactatataaatattaaaagagaccatgaactgaagacatgaaatgtctgtttttagggcctgtattttatttgtatagaaatttattaagcacagctgtaaagtgatattaatataaatatattttaaggatatacatatctataaatttcattaaaagttacactcattcaattaaggcactaacatgataagagtatttctttccttttttgacccatagttatagttttatagaatatctaatttttagaaatatatttttgagtgtttctataatgtacctccataaaaagattatatcaatacattttttatatatcagcattcatgataatttttttaatttagtttaatttttttaatcgtaaacgttataattatttaaagtattttaaaattttaaaaaatttaaaataattacaatataaaaaatagtatttaaataatatattttacacgcgtttaaaataaaaaaaacgtacaatagattatttaatcctat

SEQ ID NO: 214760 - DNA, 783 bp, Cannabis indica
  modified_base (27)..(27): a, c, t, g, unknown or other
tattaattaatagattttatttgttanatttcttctataaaaaaattttaaaattatttatgtataaaagtgagtagttaattcattgtttgatttattttgtatacacaaaaaatatgttgggaatgatagttaactaccagagagatatgacgatatataacaatacccttgaatgttatatgttgactagaagtgagatacggtgatgagaacaattttaaaatcatatgatgagttttctataaatttatgtattcttatgacaattcaccctcaaaataagattcaagactaacatattattataattaataggattaaaatttgatacaatttattagttagttatcattaaataaaagttatgatttattttataatataattaaaaaaaaaattaaatatccgccgcaaagcgcggattattcactagttgtacaaatttgaaaaaaaaaaaaaaatcacgcactttacaataagtgcctaaaaaaatagaagaagaagatgaatagtaggacatgggagttgagatttatgtaataattattaaatattaaaaataataacgaataatttttatatttatttaaataaaaaaatacacatgtcacttttgtgacaacccgactcccaatcaacattttaatcaaaagattatgtaataattattaaatattaaaaataataaagaataatttttaaatccattaaaataaaaaaacaaaaaacctgtcacttttgtgacagcctacgtcctaatcagtaaaaaaaaaaaaaaaa

SEQ ID NO: 214761 - DNA, 440 bp, Cannabis indica
atagttaccaaaaataaattgactagagagtagctcttcttgcaaaagacagattgcatgtgctccatgttctaatttacttactcattttattctctagaacctcagaatcagttccagatagcccttttgaacagattggaacccccgaatacttaaattacttttcactcttagaatagcccatgagaaatctagaacttgttgaacttcctgtaactccattaccaaaaaatatacaacaaacttcactttatttgggtgtaaaagcaatgtttcaaaaaaaagttttaaaccttaaagcatacgatagatggacataaaattattttgcaaaaataataagacaatgtcttaaagacatcaaccgcaaagagcgtataagtgattaagttcaagttctttacatctatcatgaaactgaaaattctctttcaccc

SEQ ID NO: 214762 - DNA, 1035 bp, Cannabis indica
catttcccatgaactgaaaacaacgaggaacaacctgtcccaaagctactgtgcaaatatacagacagatcctttattctcacgtgccactaagccctatccaatcacaatatgtatatatatatatttatagcaatctgaatatctgatccttcacccaatttctcacctgcaggtgatgtaaactccgtctcaccttcattatcaatctaaagcacaagaaacaaccgtccttgtcttctcttctcttctcttcacttctcccttcgctcactcatttttcccttttacatttctaaagtggccaactttggtagttttgcaacatcaaaaggttatttaggtaaattcataattttctttgtcaagaaaaagacaaaaaacaggtcagcggcaacaaaaagaaccggacgtccctagcatgcctactataattttgcagctttaaatagaaaaacaaattaataaatttggaaaaagttatttactttttctccttattttttcaatgtttgtcccctgaaattaccaatttaacctttcatccaaattttaaatttatgtttctcacggacgtgaaattgtttcttaactaaattgtatttatcgggtttagtaaataatttaatattaatttcctaaaaaataatagtatataatctttcattactcatttaacttacttttatttttattttttatatttttgctcattttctctctctagtctctgttttcagacagctttggaaaaaccggctagtggtctttttattttttagactgaaaaaaaattatatattttaattctattttctattttctggagttcattttctcagaaaacaaacaggttatttttaattgtttatttttctgtatagttttgatgagtaggagtactgtttgttgagctctaatgtgaaaagttaagcttagtcacaactttgagctaaccggagtgtggcagttacagttacaggttatgatctttatatttttttcacttggatcttttttctttttttctttctt

SEQ ID NO: 214763 - DNA, 638 bp, Cannabis indica
aattaatattattgagaatggtgaagagcagtttttgtggtagggtaatagttgactttatggtgcatagcaatttttgtcgttaaagagtttcaattatggtcttttacttgtttagtatagggacacatgttatacatataactaatgatgaaatttgattttgtgtttcaggaaatgagaaagataaggtgctctaataatgatgaattcttcgaagtgttatacctattacctacagaaacattgtttcaattgaaatgtgtatctaaaacttggaacaacttgatatctgatcgttcttttatccaatctcaattacaaaggacaaaactctctatctcagaattctacttccaagacaagttctcatggctcaatatgactgtgacatacatttctattgatgaagaaggttttcaattcaaacagacaatctttgattttctccctaaggatgttgcggtattttcatcgtgttagggtcatatttgttgcaggagttgcttccctactcaagacctaaaaatctacatttgcaatccattaaacaaggaaatgaccaaactgagttgggattcaattgaaaatgatagcattatattttagttttttatccatctcagaatcctatacac

SEQ ID NO: 214764 - DNA, 773 bp, Cannabis indica
  modified_base (751)..(751): a, c, t, g, unknown or other
ggccattttgatgaacaactagtccatattctagataggaaggataaagtccttcgaaacaagaccataatttttgtcaaagtaccctggagaaatagtatggtggatgaagccacatgagagttagagtccaatatgagggctcaatattcaaaattgttcaaattaaatttcaaggactaaatctttttgatggggggataattgtaatgaccacatgattaaacatgagaattagtaggttattagtgaattaattaatatttatgattatatgtgcatcagtaaaaaataagtcatattgttagaaataggaaatagtgatataatttctcaattatagaaattttattgaattctaactgtatcatacatgttatatatgaaattttgcatttttatattttatgctcggtaacagtgaaatttgatggtttggccaacaatgtcacttaaatatgatttagtatcttataattagtgagacaagatttataggtagttagaatatcgagattatgtggagtatttagttatgaccattttacccctaattttggaaattacttaatagtaaagtaagggcaacttggtaattttccttagtttaattattccctattattattattagttaagataattgttagtaagaaagaatttatgttgaatatgttagactattctaggaaatccttagataacttaaccaaaagaaaaacaaagtcacaaactctctctctctctctcnctctctctctctctctctctct

SEQ ID NO: 214765 - DNA, 315 bp, Cannabis indica
atgagatgtttactctccgtgacaggtatttgtactcaaattaattaaacataacatcttctctttacaattatttagcattgtttagttctcttctatataattcaatgttgtgatgacatgacattaaattagattcaagattcatgcatgtgcacttgtttaagctctttaattctatttgataatcaaaactcataattaatcgtatcttaaagtgtcaagcactataagaagtgacatatcaatattgatacaattcattatatacactccaagccctttccctatttttttcttcactcttcttattca

SEQ ID NO: 214766 - DNA, 950 bp, Cannabis indica
atattatttccttctttcttggttctcattaacgtggccttataattagatcaaaatcttcatcatggaataaaaataatggcctatacttattgcccttggagtcttgagttgtgagttgtgagtttaagtgatgagtagtctctaatcttaagctttttattattaattagaattggtcaatcaaagtttacatttaattccattccattattgaaataataatcaagtgttgtgatatgttattataatagatacttgaagttgaattgaagaaaatgtatgagatgtttactctccgtgacaggtatttgtactcaaattaattaaacataacatcttctctttacaattatttagcattgtttagttctcttctatataattcaatgttgtgatgacatgacattaaattagattcatgcatgtgcacttgtttaacctctttaattctatttaataatcaaaactcataattaatcgtatcttaaagtgtcaagcactataagaaatgacatatatcaatattgatacaattcattatatacactccaagccctttccctatttttttcttcactcttcttcttcaacctctctctcttccccacccctaagcccccatcctcaacccaccgccctttcctggtcgtcctgcctgtctgctcccatctatctcggccggccgctttcgtctcccattaatatatttgattttagggatttgagggatatgttttctttttcgaaagaggagaaacaaaaaatacaaaaataaaatttagggcttgaaccatggaggatccacaagccactattactattacaaacccaactaattgattttttttttttgtacaaatacattatatcataaacactagtaaaaaattaaaaaaaaattggttgagacttgacatattcttgttgtgtcactatttcactcttct

SEQ ID NO: 214767 - DNA, 526 bp, Cannabis indica
atcaaagtgctttccttcccaactgcttaataacagacaatgtgttgctggcttttgaacttgtccattgcttgaagaataaaaagcgaggccgattggggtattcggcactcaaattggatatgagtaaggcctttgacagagtagagtggttttttcttcatgaggttatgatgaagatgggatttgataccaattgggtgaatcttgttatgaaatgtgtaacgacagcttcgctctctttcaacataaatggggctattaaaggttcagtggtaccacagagaggtcttaggcaaggtgaccctctatcaccttatttattcttgatttgttcagaaagtctttcatctttgttgaagaatgaggaaagtttgggtcatctaaagggattatcaattgctcggcgtgctcctgcagtgtctcatcttctatttgcggatgatagtttgttattttgtcatgccacggaagcatcttgtcaagctattcgaagggtccttgatctttatcaccgggcatcggg

SEQ ID NO: 214768 - DNA, 1532 bp, Cannabis indica
ctcggaccaagacccaaacccaaacccagacagggatccggccttggacctaaacccaactcaggactcggaccaggtttcagaccccgacccagacctagacctgaacccgaacctgaacatggaatcgaaaacagaactggactaggacctgaacccaaaaatggacttggactaggacctaggacccagacctggatgggtgatttagacccaggaattgggcccggaccaagatctagactcgaacttggaactcaaacccagatctggaccctgactgggatttgaaacccgaacccgaactcggactaggacttgaagctcgacctggtcctagactcgaaccaggacctaggacccagacctggatgggggacctggacccgagacccgggattcggaattggcactgagacccaagacctgaccccggacccagaccctgaacttggacccacaccaggtcttgggacccaaagtggaactagactaggactcgagaccgtgatactgatctgcacccagggcttggacctgacccatagtcgatcttttgatttgggacccatacccggactcaaacccaaaccgacttagacccaaacccagaaccagacccagacacatacaccgtgacctgaaattggaagcggaactggaagcagacctagacagtgggaataagacaaagggactaggacccaaacccgacacccggactgagacgtagactcgaaattaaaactaggatcaggtttcgagacacgaacccaaacccgagacatggacttggatccaaacccggacgtagaacccggaccgggatcggagactcagacctagacccaggtccagaccttgtttggggacccaaacctgaaattagaaccagaatcggggcccaagatttagaatgtgacccaagaaccgaccctggtcttggtcccaaacctggaccaagaaacagacttggacatggactaggacccaggatctgaatcggaacaagaccgggacccaagattgggaaccggatcttgacccatgacccggggcttggacccaacttgtagtaggtgtgtcaatcttggaatcttaccaagacccaaacttggaacaatttcaaaactaggacccaaacccagactcagactaaggacctgaaatcggaacaagaattcgaattaggaccttggaacaggaattggaactagacccagaactggatcttaatgcggaaccgaacacggacctagattgggatcaataccctaacccagacccaaacccgaacccaaacccagcacccgtgaccaaggacctggaccagatctcagagccgtaccaacacttggacccagaccaagacccagaccgagacctggacccacacccggaccaaaacccaaacccagatctagacccagaccaagacccagacctagacccaaactcgtactagaactcacacacgaacccatgactcaaacttaaacccgggactcggacctggatcgagccttgaacct

SEQ ID NO: 214769 - DNA, 829 bp, Cannabis indica
accagtatatatattggtgttgactttattgttttactgctttaatcatttcttaattttatactataagttcatccctattcttctctgattattggtcgtgatttgttaatcttctcactgctgattgtttgattgtttaaagcttagttgatttgattttacaccattagttataatttttccacaaatcagagcttggtaatcgatcaacaacgtagaatcaagattctttccgctgcaattcttgaaggaactttaatgtcatcaatggcaagatttgaattggagaagttcgatggaacaagagactttgcactatggagagaaagtttgaaaggaatcctagtgcaccagaagttatccaaggttcttggagttgagaaacttttggccgagaagaaactagaggaaatcgcagaaatagaggagatgtcgtactacacgatcatcatgtatctgtcaaacagtgttcgaagaaaacttatcgcagagaagacaaccaaaggagtttggaacaagctggaagaactatacataaagccatcaattgctaacaaaattaatttgctagaaaggttatacgattttagaatgatttattccttttctctagatgataacattgatagatgtaatgagattattgtaggattagctaatataaatcacaaggttgataaaaaaataagaccatcatcttgttgagtttgcttccaattgtatatcaagaagtcaagaaagccatcaagtatggtagagacataactgtattggaggatgttcttggcgcacataaatcgaagaattttgaattacaattggaaaa

SEQ ID NO: 214770 - DNA, 629 bp, Cannabis indica
ggagcttatcactgccaccactagtgagaattttgctgttcttgggtgagctgcccctaactcgtttgatactctcacactggataaattaatatggtcaatcaaaaataagaaacacaaaaatgagaaattataagtaaggaagaaggaaagacataaaataagatgagaggagcgataattacaacctcttattacaatcttttagtcaacttttacgtccgaaatcacatgccgaaagatttttttttcaatttttttttcatagcggcaatagttatagttacagtatcatccttgtaaattttaaaaaaattccgaatagtttacagtatcgaaaacagagttcttgatgatattctagtttatcacgcgcgttcaaaaaacttcaaacgtattttcagcactgtaaactattcaaaaatttataaggatggttttgaaaacataacgaacatcccctttaaaaaaattcaaaataaatattccgacatatattttcggacatagcagaaagttaattaacggcagtaagatagatatttaacatcatcaactaattgcatacatcattgcaattttgtcatttgtgtagtactactacgtacagtactagtactactcatgat

SEQ ID NO: 214771 - DNA, 441 bp, Cannabis indica
atttttgattctttagggcaaagaaaatagtccattttcctttttgtataagttcagagaggtaaaggaaacaacacatcgatccatgtatttgtagacatttgcttgaatttgattggtgtacaactgacaggataggtcataaactgaataaccaaaacaattctgcattcttttcagtaacaatttaatttgagttatgaatagtatagtataaggccatctccaacgcatggaaaatatggtggcaattgtatgctttttcaatccaacagtgacactatacctgcaccaaatatagtgtggtgtatatagctgcactatcaattttcatttttttttattattattatcatattatatttataattttaaattatatattagaaattatatggtgcactcctaagatattgaggagaatattttagtttatttttc

SEQ ID NO: 214772 - DNA, 1018 bp, Cannabis indica
aaaaaatataatatttttatttttaccttatgtaaaacaataaaagaaaatgtaaaataatataacttatacaataattaaataataaaaatgaccaaaaatattaaataaaaaggtagaacacttatggtgatgcatcaaattttttgtaaagtgactatattccaacatgcagaagtacaaaagcaacaaaaagagtaaagaatgtcaaagataacaacagtagtattcccactagagagcatgtcaatttcaaagaactcttcctaatcactttgaagttgactttgagtttttgtagctcttcttagtggctagaacaaaagtaaacccccattagtagatggcactgcagcagtagggtcactaataggctcccccttagttaatggtgcttatgcttaaccagtattaacagcttcaacagcagggtcaacaataggtgtcccttgagttgagtggatggcgctgcaacaagacgatcatcgtcaagacgggcacgggggatccacatggataggtggaaatccaagatgagtgaggagaatctcatgaaatgcttgggaacaagcctgaggctgagctagccaaaactctctgtgaaagtcatgaaagtcttgctgaagctcatgagcctaggtgacgatttggcatcgaggaaggtggcagagaaattaaggccttgagcaagcatgtcttgccttttccttgtctgatacatcgagcaatctttcataaacaatgtataagacaaggaaaaggcaagacacgactggtgccttggagagcctgcctaagcatttttggagccttcggtgaaaatttaaaaatgttaacaatatattatgacagcttaacaccttaaaagattatgtgtttaacttaggattgtagttataagattcactcaactcaactccattcatttcattctttaaatatataacaatagaattagcataatgtaagcttactacaacatttttatatctacgtatctatgtattcaagtaaaatt

SEQ ID NO: 214773 - DNA, 884 bp, Cannabis indica
tggtagaactgaaaataacaaaagaaattatttatttatagcatatttgtattaaaaaaagaacaaatcatgtaaaaaataatatgacattcacacaaaatttaaaaatgttttaaacaaaatattttatttttaatataaatatataaataataaagtatataattatacacttaagattacatgattttttttttaagtaaaaatttttagtactaattaattggataagattaatttaatcaattatctaagaaaaaaaaaatataaattttgagacaaataaaaaaaaaattaatcaatagtgtatatttaatgtcccacttcactttataaccaatatgagattatcaataaaagtcatattagtgaataatcatattttttttagcacattagcatgaaattagaaaaataaaaaaaatacaaaaataaaatcacaatgatagccagcattattaaaaatactaaattatcaaccaaaaaatcgtagatcattaccgaaagtgtattgatcttcttgattgatgccaaattttttctcattcccatatcaacgtcttcttttgtgaggagttcaagagcagttgtctgagagtggttcggttcggctcaacgacgtcctccgtttcagatttttgttttcatttattaatttactattattagtttaattccaatttattgtttttatgtaggttagaattataatgagttcattccttaattaattttaatgttgtgatcgtgtttatgtgttgaaactaatttagtttttcctattagtcttgtcttttgacattggttctttagtcttgtcttttgacatgattttttagtcttttccctttagttttttcagttcaagtcttgtctttttggca

SEQ ID NO: 214774 - DNA, 521 bp, Cannabis indica
caaaaatacacaataggtcaacaaccataagaaatagccatttacataataaaaaataatatttaatttctcaataaattaaataatattttgataattaatttgtttaaaaagaactttacatgtttaaaagttcatgagaagagatacgtagtgagattttttcgtaaatagctgatttgtggccgaaatgtttggtgtggttgttttgtaattgcttgtgattaatgaagttctttccttcttgattaaaaaaaaaaaataaaaaaaaactttacatgtcatttgtttggtcattaagcaatttatttagccagtgtaaaaaataatcatgcatattatatggttgtaactagtaaagatactagtaccgtcaaaaaaaaaaaatacgaaccatattaatatcattatgttaaatcaatccatggaattattgtagcctttagacacataagtaagggccaactttgaaaacgaagtgaccaacaacaaattgcaagccacaagttgaactaatcatt

SEQ ID NO: 214775 - DNA, 578 bp, Cannabis indica
gaaagataatatagtatattacaaaaatctgaaagaacaaaataattggggatgggttataatttgtttatttcttgttaaatgtaggagtggtaaaacgtgttattgttttatgttcgtgttatattatgtgactcgctttatttatttttaatgaacgcatatgttgtagttattaagtctatttgtaaatttttaataagttctgaatagtttacagtaccgaaaataaagtttaaacagttatttactacgcatataagaaacatctttgcgagtgcaacgaaatgtgtaaatcttattttcggtattgtaaactactcaaaaaattttataaattcacaaatggtcctaaataactataataatatatataaaaaaattagactaaataattattttgtatgacaaaatagatagaaggtttgccaaaatattttatttgggtaaataatagcataagtaattaaaattttaagtttgtaagtgacataacccaataatttttttaatagtataagtacccaatatttataaaattacaattctcttttggttggtagagttagtgaatagcc

SEQ ID NO: 214776 - DNA, 530 bp, Cannabis indica
caattaaaaagaaagatagagttattggaaaacgaaatttggaaaaaaaattaataaagaataaagagagacaaaaaaaaataaataataacaagtaaaataacacacatgtaattttaaatttttttaccatttttattaaatagacatattttatcagatagacaataaacatataatatattttactcaattataaagaaagatagaattattggaaaaagaaatctggaaaaaaatttaataaagaataaaaagagacaaaaaaaaataataataataacaagcaaaatgatacacatgtaattttaagggtaaataccattttagactctgtgttttgtaaaagttaccaaaatgaccatttgttttgttaaatgacaaaatggacattgtatttttcaaaattgtataaataggacctgaactaatttttttgtcaaaataaaacttaattataatccaatctaaagatgttatgacaaaactcattacattttctgtatctattcagaaattatcttaaagtt

SEQ ID NO: 214777 - DNA, 805 bp, Cannabis indica
gggcaataggattcaaaacatagtctctcatgtaaatttaaagcgtcttaaccaattattctatttaactactatgtatatatgaaaacaaaaattatatattaatatattttcaaatctcaggtgggctttagccctccctcaacacccctaggtccgcctatgcctatccagatccgatccaattacatattagatgttagattttaccatccgatccgatccaattaatttcagtcatccaatcgatccaacatccattggatgttggattggatcgattctattcgttggatgtatttcatgtatatttattggtttaatttaggtttattcaatattttaaacctagttttttttttgatcggattggatccatccaatattttaggtcaagtatgtattgaattggattggatccattcaatccaagaaaaaatattaaaattttaatgttaatttttatatatacatatatattttacgtataataatataaagatccggtttaaatggaacccaaaaaatatacccactgatggaaccctcattttgtaaccttagatcttaatctaatggttgataattgctgactaggctaagcttacttttttgacttttcaaacttttagaaaggcaacttgatggtgacttgctgacatggacctctatttaaaatttatttaataaattaaaaattaaactaataaagattcattcttagattctttttcattctcgttccattttttatccattcattcccatttcatattcatttttttgtgcattaaatgcatatctc

SEQ ID NO: 214778 - DNA, 1204 bp, Cannabis indica
atacaaggggcaattactacggtaaagtaatttttttttttaaaaaaaaaaatttgcgacatgagtagatatcgacccgttgtggttgccatatgaagctgccacgagggaagttggtcgtcacccagtagcagccaaagacaaaaccagcattacttcacctgaaaccccgggatatgtcagggattgaacttggatatcgaaaaattgagggagtatgtgagggaatgaccctgaacatcaaaactcgttttatcaaaactagatgctcctagaagattgataaaataaatgattgaattggggaagttcatatgagattaatgattataaatcacattgttgatgaaatattttgaacttcagttgtgaataaaataatcatttctttcaaacaagtaattataaagcgtaaaccctttaaaattacttgaggggcatatatttatgtttaacaagaattaatctgcaaatacatagtacaatgcaaacccatcgtttcaaaaaataaccaaacctttttgacggaaaaggggtcgaatcgttataacaccttgatcaaacctttcgtgacgaggaaaggatcaaacagttgtaattttttatttatatcttatttgaagagaaaggaaaaatcaaaggttatgactagcgtataaagctgaatactaacgactcgtgcttagggaaagtaataaacgagacatcaaagtgtcttgaaaaaatacttaaaccaaacacgtgggtagaaaatttaactactcatgtaagcaatgaaaatatattgaaaatgacaagttcattcaaaacatatttgagtttgcttaaaataagatcatctctgatgatcgcgaggtggaatccatgtaatttgtaaactttatgcatgtaatttgtttatattgtgaataaaacgcaagcaaacatccgcatattaaagtttaaacttaaaagtaggaggcattaaaaagcaatgttggccatccaaccttacaaatctgtctttacaaaaaaaaggtatcaccaggggcaaaccattgtctcggccaaagggccattttctaaaagagaaaagggagataaataaaaaccaagtctacatgctgggagacttggatagatcttcttcttcttcttcttcttcctcgaccttgccatcttcttcctccatcctggtcttctcgcaaagagctaaattttcctc

SEQ ID NO: 214779 - DNA, 1226 bp, Cannabis indica
tatcttgcaacagctcaatatcccactttgcctctcccacggtcatcaaattacataccctagtgttggtaaggcttgggtgatctgtagtgacatagggttttacattgtcagggagccatggctctccaataaccgagatgttgcagccatttcccactaaccaatgtgtaccattacgcactaaatcttgtgattccaagatgctccaccaaatgaagctcgggttggatccaagttgagcattgaaaaaattaccatgaggataataccgagctttaaacactcgtgaagacagagagtttggtcgagtaatcaatctccaaccttgtttgccaagaagagcaatattaaagtcccggaaattacgaaaacccattcccccacctctcttgtatttgcaaagtctatcccaagtcatccaatgtatccctttgttgtcatccttagaggaacgccaccagaattttgttatgagttgttcaatgtctctactaatctccaaaggtagtaagaatacattcattgcgtagcttggaagagcttgaaatactgacttgatgagcacttctttacctcctttagagaggaaaccttccctaaattttaggggattaattattccttaatgtatgtgtatattctcaaattttcctttccaattcaaacttggagacaaaaaaaatcaaagaaagtacaaattcaactatttacttattttaatttaaaaaagtgagactcactttgaacacaaatctcttgataattaaacttaatttaccaaacataggttaagttagacattctcattcccatcaagtttaaacctcatagctctattctactctttttttttttcttttttttttttttttgtctaaacgaggttacttagttaaaaatttccatccttatctatattatgatgaccaatgtaaaaaaaaactaaattattgtctcgaacaactttcaataaacattttatatttcattttaaatattttggtacaaaaaaagaagtcatatttgttatgacgaattacattataatattattacaacatacactttattttaatttgataattaaaagggaattaaagagatattgttattaaattggaattggatcgaagaacatgttgacaactttggtcttaagatatcggtcttgattagtaccaaaaccatcacccttgtgatacatctccattcgctcctctaac

SEQ ID NO: 214780 - DNA, 703 bp, Cannabis indica
tttttatttttattttttctctataaatgagagagaattatatatatttacatttgtatgaatttttattattttacaaaaatatgagttgttttatgctatgaaaaaaaaaatgttaaaaatcaataaaaaaaaataaaaaattttgaaaatattaaaaaaaattgtaaaaatgtaaaaaaattaaaataaaatatgattttaagtgcattgtataattttatttaaaatgataataataataaaaaaaaaaccatcaatagacaattttcactactaataatatttgtttgtaaatgtattcttttacaacaattgtattataatattttttaaaaattgtatttggtacttactagactacaattattaacaataattaggtacttttggaattaaaaaaattaaattaataggcaagtgtcattatattaataaaatttaatattattattggattaatgaaaatattgaattggtacttaagcacatggaaatggaataatatcttaaataaattgaagtgatgacaatgacacttgttcttaaataactagagaattatgaaattatgaattctaagggtttttttttttttttttcattgaataacttcacaatttatttatttatttgaaaaggcatttatttatttattttgaggggaataacttcacaattaggtacatgtgtccgtacgatt

SEQ ID NO: 214781 - DNA, 664 bp, Cannabis indica
gggtaatattttcaataaaattttgttaagcgttctgctaacaaggcagcgcattatcttgcgcgtagtgcttgttaactttccagttcgcattttttctcataatagctcacctttagagctattaagcattgtaatggctgattcaagttaataaaattgtcacattttccattcaaaaaaaaagaaaggtattctatatatttatgtttttcatacttataataatatgtaataggtttatttatagcattaaatcatgatattatatatttaatgagtaataaagaatttttaacaatatgtaaaaattcctattattattgtatgtattttacaatgaaacttttttattttttttttattgaatggatacaaaatacagcatttaataaagtcatgatttttcttttacaaaaaaaaaaaatgaaagttatgatttttattttacttttattttttacttgtgaggtgcccacttatctgcctgcacgtgtcctattgtaaacacatattttgctcaagaaaaattggaacattttccataacaatcagaagcagatcataggaaaaaagatggaaactacatactttgtttgattctaccctttaaaaagagacattcacaaatgttttacatgttaaaaacttttgtgtctgaact

SEQ ID NO: 214782 - DNA, 520 bp, Cannabis indica
atgtattcaacttctgtagtagagaaagcaacacttctgtaaactcgattgccatgaaacagctccccctgcaaatgtcaccaagaatcctgacgtggatttcctagaaccacaatcagcagccatgtctgcatctgtgtacccatcaagcataggttcaccgctgccaaagcataagtacagcctggaagtacctcatagatatctctatatctatttcattgcttcacagtgatccttactaggattagagaagaatcggctagcagctctaactgcatgagcaatatttggcctcgtacaaaccataacatgcatcaaactaccaactgtaaatgagtaaggtattgaagccatttcttgttaatcgttttcacttgtaggacatttcttggagcttaacttgaaatggcctacaagtggagaattaactactttagctttgctcatgttaaatctttcaagaactttttcaacataagcttcttgagatcaccaaagtttcccattcttcatgtca

SEQ ID NO: 214783 - DNA, 691 bp, Cannabis indica
tcagtagtatcgtgatccgtaagcagaaacaccagataagttgtgcaatctcacatcgcctaggaaagatcaaatgtgatgattctgaaattgtgtagatatgggactacacagttgaagaaggcttaaatagattgattggtacgacttatatcaacaaggtgcatcttgtaatctgatagcccatcacgaaagaactccacaattaagcgtgtttgactttgagtaatttcaggatgggtgactttataaatttttcaaaatgcgtgcgagtaaggacaaaacatgctgaaaacatttgtgttggtctgtagagtcggtcgtcagtctaggaagcacacatctaccacaacaaagccccatgcttcaccagaagagttcgaaaacctataccaacccaatcggcaaagcaatggataagcacacccgatggctattgcatgagacccattgatgggtgaccttattactcgatgttagaataaaataagaaatagcaagaattttaatccttttttagggtctgtgccacaggttgggaaattttcttttcttttctttgttttttttttttttttattttttgattttatgatttaaatatatttaatttattttgtgtattcaatttttaataaattaggtagaaaaaaagtaataaaaaaaaaataaggaataatcaaaagacgtg

SEQ ID NO: 214784 - DNA, 1142 bp, Cannabis indica
aactcatatacaactttaagcaaagatgcatgtgttactaatactgtatatattttaaagggtgatatgacatgtatttagttccattctgatcctatcaattcattagaataattctaattcctattcctttatatattattcctatatatctcattattatatttatactttcacttgagttaatttgtaaaaaaaaatagtcaactggatagcagacatgcatggtttcttcaatgcaatttttggagatattaatggaattgactaaagaaagaaatccttttattataaagtaataatatattatttattaaaaagaaagttatattattaagaataaaaataaatgtatatatatagttatatgtgttttaacacttgttaaagaatatatattcttacatcaatatatatatatatatatttatatatataaattaatgatttttttaaatgataacacacatgtatgataagtactatttcaattatgaactatatatttgtaatgattaaaactaaattaattaaagaataattcttacatcaatatctaaaaaactagttattgagttttattatgataaagacacatgcatggtaactatttaaaaatattaaaagaaaggtatgttatgtgtgttaaaaatactactaaaaatataacaacaactttctagtgaatatatatatattttttaatattattaaatgtaatttttaaccacaacaaaaagttaattctcattaataaaatattatcttgatacaatacttactaatttaatttttgtaacattttttactttgtaaacttttttagtaataacaagagttttatagttttccaaaaaataaacttatttaccaaaaagttttttagcaacaacaaattattttcaatatttttgtgacaaactttttagtttcattcaaaaaacaaactttttagtaataacacatatatatgcttaatgtttttctttttagttcacaatttttttttactaaaagtaatttttttttagtggtaaaccaatttaaaataatgttatataataacataccttaatgaaggagtatgatcaagtctaatgattttgactattattgttaccataatcttccaagctcaattc

SEQ ID NO: 214785 - DNA, 668 bp, Cannabis indica
gaatccaaggatggtgaacttgtatgtttactgaagagatcactatatggtttaaagcagtctcctcgacaatggtacaagaaattcgattcagttttgactaaagttggttactcaaggtctaaatatgacacatgcctctatttcacaaatttaaagactcaagctgctacattcttgttagtgtatgttgatgatatgctaatcatgggaaaggatcaaaatcagattaacaagctcaagtatgttctcaatagtgaatttgagatgaaagacttaggagcagctaggaagattttgggaattgaaatactaagggacaggaaaaacaacaaaatgacattgactcaagctaagtacattgaatctgtcctaaggaaatttaaaatgactgattctaaagatgcaaatgttcctattgctggtcattttgtgttctcagcaagtcaatctcccaagaatgacaaagaaaggaaacagatggaagaaataccatatgctgaagcaattggaagtgtgatgtatgctatgattagcactagacctgacatagcatatgctgtcagtacacttagtagatacatgtctaacccaggtgaagaacactggaaaggagtcaagtggttactgaggtatctaaagactacttctaactatggtctgaaatt

SEQ ID NO: 214786 - DNA, 715 bp, Cannabis indica
aaaagtcattcataatagtcatccctatttttatttcttttaaaaagtgtatcaagtagagttggttttaatattttatttactaattatataaaaattggtatgagtgatattttttttattcagtaaaaatggtaagaaaacttttttttttcttcttctctcacttttgatatctcttttattaaatgattataaaaaataaaaaaaacattaaataagttaattaaaatatctaaaatattcatagaatacggtgatggtatcgattttaaaatcatgatttttctataaatttatcaattattatatatatacatatatttttataattctaatttaatttattcatacaattttaaaaactaactatttaataatattagtggtacatatctttatatattaaaaatgcctatctaacgacaattcttgttttaacgattcttggtttaacgattcttttttttatttagccttacacgattaacttaaacgttaacaaataaataaacccaataattaaaccaaaaattaaacaatcttttttttaaattaaaaaaatatcttaccacatatctctctaacaaatcctaccatttttgaaattttttttacacggctaaattcaaatttaaaaaaataaacccaataattaaacccaaaaaattaaataatatttacgattaacttacatatctctctaacaaactac

SEQ ID NO: 214787 - DNA, 670 bp, Cannabis indica
tttttctgaacttccatgtacaatatttatcccacccattgaaagtgtttcacggtggcgattcggggactatggacatataattctaagctccaataaacaagatttatttattgaatcttatcaatcagataattttatttattaattccatgattactctactataaatatggaattgaacttgttatccaaatttctacacagggtgacgtggcatctatctgggtgacacgtgaaacatattccataacttggatgggcaatcccacttataaagagtcgtgtagggagaattgatacttgaaatcataaaatagaagttgggacatccgagcagagcatgcaaagaatctgcctagcttccatcaagtaggtgactcgcatacaccgaccaaggggtgcgagttaaacaatttcagagatatatccaatatatccccaagcttgcaagtcactgaacctatccctaaattcacgagatagattcgtagaattgaagaagaaaggaatcctacctagtttcctactctgcttattgtaattatataaagtaaacaatttttctattttattccttattaattttgggaaactaatttgatgtaattaatccctataaatagtggactcatctcactatagagggaaacaatttcattcagagaga

SEQ ID NO: 214788 - DNA, 842 bp, Cannabis indica
catggtcctcagattgccaccttaaaattttgtcaagggaagggataaaaaaatgtatatggaagttcgaaaaaatctattttgaattgtcaaaaagtagttatttattttttcaaattaattaattaaataaattaggaaaagatacatccttcgtcttaattaagatagagggaggcgccacctacattgtgtctatatagggtgatttgttttggggttaattaattaattcaaaagataaatactatttaaattttaatttggaacgtagttgagatattctctcaagtggttgagagattctctcaatcgattatagaatataaatatctataacaacattcagttattattttattattattttattcaaataattaaatatgatttaataataaattttgaataattaaataaaacttgagtttatttgacacactatgtaaaccaaattcagtgacagaatttgaacgtgacttttatgaaagcctaaaatgattaagcaattaatctttttctctcaatcactacaataaaattgttcttgcttatgtgttgagatacaagaactttatatacacttttattctactagcccacattagtccttgtgtgtggtggaagatctagaagatcaaggtgtgagttatgacatcactattctgaggatacaataaacgaaaagactcgatgataccctgataggctttgagaggtatatattcttctcatccatttactttcagatttaatatatacacatgtggtaatcttggacatatggtacaatgataatcaataataattattcgattgtgtaccagatttagtaccataaa

SEQ ID NO: 214789 - DNA, 962 bp, Cannabis indica
catgtcaaaagacaagaccttcttgacacttctaatggtgtgttttaatggttgaatttaggatattaaatatgtatgtttttaaaatacagagtatcaaataaatattattgaaaatacaaggcaccaaacttgtatttaaataaaatataaggtaccaaatatgtatacaccctagaaccctagaattattagttaagatgatttgaatttaacatgagagattatgtttggaattcccttgtctttttctaagtatatctacaattttttcttaaactaactgaagcttcaaactaaattcgaacttataactactagaaaaaaaacaagcttaccctagatctaccaatgctacctgtttcatagccacaatttaatatatgttaaaatttataagcacaatttaacacttaccatactaaacatctatttttttttttgaaaatgaaatatcaacttcattgaattaaaagcattctgaatacaagagggccttcaaatcaggccagacattatactcaaaaatactacaactagaggtaaaccgggcatgcctagcaacagcatgagcaacccaatttgctgatcgtttaacaaaacgcaacttaacatcaattagagacaacaataactcaaaacagtctttggtgattaaaccaaaaatagaggacatattatgatcacttctgatagcctgaacagcaagaagactatcggtctctatctcaactttttgccaatttttgctcttaatccaactgagagcttccttgatccccagagcctccacaacctcagcagaataggtaccggctttgtaacaagttttagcttcaataagctttccaaaatcatctctcgctacaatgccaaaaccataggaattttcgtgatggaatagcgcatcatctatattaatcttgatgtagttttcagcaggtttagtccaaagctcggct

SEQ ID NO: 214790 - DNA, 1005 bp, Cannabis indica
tttattttatttaattttttattgagggcattgaatgtaattataattggctgcaatgtatatgtttcatccattgtgtaatagggcttgttacgttatacttctttttatttgttttccttgacttgcaaaggaaaactagttgagtctttcttaggttgatttgtttttttcgttatgtgggccgatacataagctaataatgctattgtcctacaacaaaaatgacttgtatttatgcttagttataagcttggttcatgtttcaaaatcataaaacacactgcttatcatgtttggatatcattttggcggttaatttattcatattcgggccgaaaaacaagcgtaccatttaaattattagagcactaatatcaacttttttactctacgctttataatactttattaaaattttattttattttaaatttttacattacatcatacacaagagcactcacaataggggtggcaattcgtgttcgcgagttgtgttcgtgtcgtgtcgagatccatgtataacaggtacatacttggttcgaacacgacccgtttaataacacgatctatgtataaaacgggttgacacgacacgacttgtgtaattcatttataagcatattttatttaaacatgtcaatcaataatacatttatgaagtatttaacacgtttataacccatttataacacgttaaagtactaaaataactttaaataggtcattaacaggtcaatattgtgttagccctgtcaatccgaatacgacctgtttattaaacgggttagacgagttaatccgaacacgaactgaacccatttaaggtaaacccaaacctgctaactctcgtgcggattttgagtcgtgtcattgtgtctgacctgttttgccggtcctaactcacaaaatttaaggaaccgtactaaaaactcactactaaaaagctttaaagtttaaactccttcattttaaagtgtttaaaatatattattcatgctc

SEQ ID NO: 214791 - DNA, 945 bp, Cannabis indica
tcttttttctttttttcttctatgagagactaattaataaagtctgattttttatttttatttttttgaacataaataaagtctgatttaagaagataaaaaaacaacataaaaaaaattaatgatgattgaaaaataaatgaataacaccaaagagaattggcactactttcccactattcataaaattaaacttaatatttcatatatatagtttaatgaagcgagttaaatgatgtctgaaattccttcatatattccttccaaaatataataatcatttgaaacaaagtctcaagtatcttattcttaccccaatcatttttagaactatgtatttatgtatactactacatattattaactaatccaaataaataattaattacttaaatatatattcttatgtgtgtgaatgagactatacttttgttccaacataatatataacactaccaatgacattaaaatatgatttgaaatagagagagtaacatggccttatgactattaacaaataaaacaccaaaagataatgtaaactttaatgattaataagcatataagatatttgtttgaatgtttaaagagcatacatgtatgtgagtattgttattggacggtgaactcaatactattataaggtaatactatacaaataattaacatattttataaaaatattaaattaaaatattcattatttaattacactactaaaatatagtgaaaactatatatttatagactttaatttattcaatatatgcaaaaatataagctttaaaaataaagttattttatgaaaaaaaaaattaaaaaatataagaatattttattattttttatgagatactggttaccttaagtaactacttatttctaaactgttttcccatatttgttaactttttattttttattttttttaaattttttacctta

SEQ ID NO: 214792 - DNA, 945 bp, Cannabis indica
ttttttgttagtatagcttttacttagggcgcatttgaaaagttgtaattggatttatgtgtttttaaaggtaattacacaatttgacatgtttgtctgattacataattatattataatagtgtaatcaaaggtaattaattgattctgattatactttctaattttcatggttctccataaaaattgaatataattattaaaaactttctattttaaacattaactattaaaaaatattatgttcccgtgtaattactaaatattttgttaaacaagatattaagaatttatatctaattaccatctaaaattcaaagaaccttatttgtaaaatatagtataattactaaactgtataattacaacttaagtaatcacacaattacttctaaacacactcttaataagcaaattttacattgttggtggcattgtctttctttttttttttttcttttctttttttgtccatatttattgaaggtaaatttaaacatcatattttgtaaacttttcaaacaatgtggcaaaagagaggtccatttgttgggccaagattttatattttagcccaaattgtactattgataccttagcccaaaagcagtactgtgaaagtcccacgtgatttgattacttcatgttctttccttcgtataaataatggaaaaattatggtagtttcaaaatgtgcaacactaatataatgatatttttgaattttcgatcatttcaatgaaatttgcttaacttgaatggacgaatgacatattcattagtttatttatacacattgcaaattttcatgaaccattatggctatccattgtgttatatggttcctaatgtggttaagtaggcatttacctatcaccgatttgggcaacttgctatatcgttcattcctatgaatctcttttgtaatgatcgcgaggcttaagc

SEQ ID NO: 214793 - DNA, 769 bp, Cannabis indica
tgcatcggtttggaaatgatgcgaaatcatttgtagcatttcaaaaccgtcactaaaaagttataacgtcgtttataaaatgacacataaattactaaaatactttttttttttccacctattgcatcggttataaaatgaagcataaatgtaagtaagggaaaatcgcaatttttcttgtaattttccttacctgcattatcaaattatagaatgattttatataatagtaaataaatgatacaaaaaagtttaaataacatttataaaacttatataaaattagtaatcgattctattaactaattatataataacaaaattattaatataaactatcctaaaacttatattccatgtatcgtaaaaactaactataaactaattacgtaatgcaaaagttaatagcaataattataatacttgttactcatgtattataacaaaaatagtaacattgtacttaatcaagaataaaggctttacaattagcatcaataatttagtaaaccttctacatgcaattagggtaaattagcttttcagcatcttcttaccggctgtatcccacaatcccaagttaaccgtgcttccattcacaaccacatttgcactgaaattgtcgaaaacaatgggcgcataatcctatttttaaaatatgatttcaattgtagaacaaaatcacaaattactcatcaatataatacaattgccaaaacaaatatcctaattgagaatccataatataaatttcagcccaaacgattaa

SEQ ID NO: 214794 - DNA, 891 bp, Cannabis indica
aaacctaaacacacacatacacaactctcaccaatctccaatatctctcattctcaatctatctctccctcactctcaatcttggtctaatctctcattctcaatctatctttgtttttggtttttgagatatgcacactcaaaaaagcatgatgatgacaactaagatgggactcgatagtgatggaaacaacgacaaggacgggacacgactatatcagaactgaggaacgatgacgactatggctttggattttttttttccagaattattttttttcttagattttattttaatttcagaatgacaatgatgaatttttttggtttagatctatttttaaatttttttatttgttattaattttctgatcagcaatggaaatgtaaggtggtggtcgtcgtcattgctaatggatctagcctttttgtttttcaattttggtgtgggttggtatgatttggggtagtggtggttgtcgctagataccgatatgggtgtggttcgatatatattgtatttttaatttttttcatgcatgttagcatcatttgagaacctatgataatgctcaactttcgtcaactctcaaccaatgccaaatatcttcttttttacgtcgctagtgtagatgtcagtcttagaaactaatattaaacgtctgtttaaaaacaacacctaaacccctgaattacctatcactgcccctcattggctgttaagctatttttagcctattacctatcaagcctgaatttgactatgttctgtttagattttagaaaaagtgaaagcataaaagttctagatctctctttcagctttcaaaacatctgaatcatctaattctgagcaatattgaaagagttacgactgaaaatattatcagt

SEQ ID NO: 214795 - DNA, 756 bp, Cannabis indica
gtgtgtataatttaacaacaaaattacgtaaaaaaaattattttctcatgtaataaatatataatatttattaagcattaaatacagaatatatatacatatagattattaattatcaactctcaattattaaagaaattttgagttaacaatgaatttattagttaattaagacactttgtaggtctaattaataatatatttaaattttatatttttatgtaattataaaacaacaattgatatttaaataattagatgagataaatagcaaaatcggtaaaagacatagtgtttcattaagttgaaacaaaattgtaaaaatcaaaaccacgggcttcattagttaatttggccatggatgggtttttaagtccgttagtctttctctagcccatcccatctattctaccctagtgtgttggctattttatttatggacagagttgagagttttgccattaacctaatttttatgtgattcaaagtgaaatgacaagaaaaaactctccttttctcttcattattttaaaaaataacagcaataattctctctcaaatttcgttccattggtgaattgagtaccaaaccacaatattcaaggtgcaatttagatctttgtagaagattgtgaagaattgtcgcttatcaagtttaaggaagcaattcaggttcatcacttggcaatagcctgctacagaacgggaatcgaaggttagagtgattaaacaaaagaagtcattagtttcccctac

SEQ ID NO: 214796 - DNA, 563 bp, Cannabis indica
gtattagtagtagtattattattgtaaacttcctaataattattccgttaatatattataaagtaaataattccggtccgcttggtttttttttagtacaaattcagtctcttttcagattgcttaaaatagagttttttttttttgataaacgcatttttctaaaaaaaaatagattttttgtattaaagttatttataattagatcgcaatagtccccaacaaatcagagtggcgcagcggaagcgtggtgggcccataacccacaggtcccaggatcgaaacctggctctgatatagagtagcttcctatgccaacatttttttcctttatataatggccctttaatttataacaaccttagggatccggatcttctctccatttctctatccacccaatcaaataatgccacatcaattaatgagtttacagcatgtaacactctttagactatctcaatattttgccacttcatttatccacctaagcaacatcccttcattttttaccattagagatgctcttaacttccgtttacatgaatgaaagttcaggggtc

SEQ ID NO: 214797 - DNA, 561 bp, Cannabis indica
attacattttgagctcttaatttcgtggtcaagattttatcaggatttagatttactaacatgtatgttgtttaacatcctaaatatgaactttctaaaataattaaattaaatacatataaagtttaagaaattttacattggtggcggcacaataatatgtctcatttcactcagatctctaacccttgttcatttctgttgcagagtaataacaagatctgagtccgattctccttcaagtgttggattcttcacaatcttccgcactatgattgagtacttgacttgctatgagtgagtatgtactctttcactatagagaacgaaaatttatgaagggaaagagaaggagatttgaattctatagaaggagactctcaagtttctagatgtctgacaaagttagaaataggggtgcacaaaatatgagccaaactattcaacctagccaacccaatttattttttgtagtaaaaggttatcttactaagagtaggccatagctcattgggttaaaaaagtgatgggccatataactatgggttgattatgggttgg

SEQ ID NO: 214798 - DNA, 516 bp, Cannabis indica
caaatgctatagcaattaaaatgaattgaacaaaataaaataatcaattgggagatagattttacgtggttcgaacaggaataacaacttgttattctgcctacttcagagctagaaataaccctttgtgcattaatctttattgatagatacaccagaacgttacaccaagaactgtcaagaatagttcataaacactcgaatgagactatgcttcaattacaggaggcacacatctctcgctctcaattctagtttctctctttctttctatgaatctctctcagtagcacaaactgagtttctggatgttgagctcgattggagaggatcccttctatagaacttggacaaagcgagttgatgtcataaatatcataataggaatgttagttatggcagttatgacatgtccgagcttggtattttgcaagattcagtgaatatgacaattcaaataatgtgaggccaaaatatagtaacaattcatccaccttttgctttacattcgagttg

SEQ ID NO: 214799 - DNA, 679 bp, Cannabis indica
aagttttagtctattttcccctccatgtttgaacaaccatcctgtgtcctaaaaaagacttaaaacaaagacttttgtttctttgctcttaatgaaagtaccaaaatattgacttcgcttttagccaacgatactgagtcaaattaaagcgatttaagaataattgaaataaaaaatatgaataatgtataataaaaaaaaaataccagaattatagaggtttggccccttgatgatggtaatagtctaatcatctttagttgtaatgacttgtgagtagatgaacaaaaaaactttgatctctctgtaaagttcctacaatgatctttgagtattttactcttaaatctacacttcttgagtgttgtctgaatgaaatttgtgcccctaaatagtgagatgagttcgctatttatatggattaattacatcaaattggtttcccaaaatcagtaaggaataaaatagaaaatttgtttaccttctataattacaataagcagaataggaaactaggtaggttttctttcttcttaaattctatgaatctatcccatgaatttactgattttgatgtgtcttgcaagcttgagtatataaaggatacatctcataaattttctaactcgcatttcctgatcggtgcatgcaaactgctcatacgaaagaagttgttcga

SEQ ID NO: 214800 - DNA, 655 bp, Cannabis indica
gtttaaactatatataatatataccaattaccaagtacagaacggataatccaatttcaaatagcactaactctacaatttaaagtgtacaagagcaacaaagtttgattctctaaaagtgaacttcaaactaacagaacaattacagttaggggtgacaattcgtgttcgagggtcgtgttcgtattgtgtcgagattcatgtataacaggtacatgctcgattcgaactctacccgtttgaatcaaaaaaatgaaacccaaaacacctgtttataaacgggttgtacacgacatgatccgtgtaacccatttataaacatattttgtttaaacatgtcaatcaataacacgtttatgaagtattcaacacgtttataacccatttatgacacgttaaagtactaaaataactttaataagtcattaacaggtcaatttcgtattagccgtgtcaactcgaatacaacctgtttattaaacgggttagacgaatcaatccgaacacgactcaaacccataaggcaaatccaaactcgctaattctcgtgtgggtttcaagtcttgttatcgtgtgtgacccgttttgccgaccctaattacaatggatggtattaacgaaattttttaagatgctctctaaatattgccatatt

SEQ ID NO: 214801 - DNA, 1421 bp, Cannabis indica
tagtaggaactgtaactttgcggcacacaatgtcgctaagtgggcctttacccaccaagtgtttggatcgatcccgatcaattctgttccggaaaacattttatgtaacgaccatgaggtctagttctatttaatataatttacgcttattttcaaaaaaaaaaaatataaagtaccaattaaatattattgaaaatataagatactaaatatgttttttttataaaagcacaaggtattacatgagtatattcccttatttgttctactagtaaattggtcgcgtttcgcatgcagctgtttatataattttaaattatatgtgtaaatattcattgaataataaaattgtatcaaataattttaaatttattttatgtataattttaaaaatatatttattaaaaaaaatttatatagaaaactctaaaaaaataaaaaaaaaaaaaactacctacatacaattttttcatatacaaaataaaacagaaaaaaaaaaattcaaatgtatattatagtgaaaaaaagtttaaaatttaataatactcacacagaatatagatactaaaacaaaaaaaaaaaacaaccaataaacttttaaatgtaatatataatgaagaaaagttgaaaattaaataaatcctcacacaaaatatagatctaaaacaaaaaaaaagaaggagtgctagggaaattctcttttgcactctcttttatactctcttcctaattgaatgacatgtgtattttatgaaatacgttaaacaacaactccttcacgattcagaaaatattcttcttcccgttatattttctcaattcattcattcaatataaatgcgatttaactgataggagaaatacatatttttcataagaaaaacaaacacaaatttcactacaaaaaaaacttccatttgtaatattatattttttagagtgtatttgacagttctctaaagcgtagtgatgatttcacgattgggttgttttatcttggggacgactgacaatttctaactacttgtacattcttataagcagtgtcgcaaatgttttaaagagaacaacttagtgcgcgactcaacccaaagctttcattcggtaaaatctatcatcttttattttcagtctttacaacatccatcgtccctccatgttaaattatttttctaaaacttaccttagttaactcattctcaattgaacttaatcgttccataaaatataaaaaaactaaaactaaaactcattctcaataagaactaggcttaatgctttaaaaggttaccaaacatgaaaggtagccttggactgcctgcctagtggatcctgcaaaaaacatggacgcctgcctagtactgccttactcgctttttctgagggcggtcacatggagcaatatagttttctttatacat

SEQ ID NO: 214802 - DNA, 517 bp, Cannabis indica
tgttggatactataaacttatactaatcaggagaaaataaacactcaaatgtacaagaattttaatgtatactctattgaattaagaaaacaagaaaaaattgctaaatcttcatctaagattataatttcatattagtaataatttaaaaactataataaaaaaacttaacctatttaattttgtatatggataaaaaaaatccaaaaaaattaaaaaattaaaaataagatacaacgtgccttgcacgtagttgccgtctagtatatataaatgtatataaattttttaatggaatctaaatctatccctttttttataactacaactttaataataacaaaacagattaaagtagatcaaaacatatttaattcagactttttgtagctgtaatttcttttatgttaagcgttgtgaattgatgtttgtcgacggtttagcaaaatctactagagtttctggcgataatgcaattgtagtccaaggggagagaactccccatgtggttcccatc

SEQ ID NO: 214803 - DNA, 559 bp, Cannabis indica
aaatagtttttttaaaaagaactttaccatcaatcacaaacccaatttaataaatttataagtagttttttttatttattcttttatgttaatacatgcaatttctttgttaattctactattttcaatatatatcacaaaatattatcttttttatatattttaaaaataatatttttttaattttaatactattacttacacatatcaaaatactatattttaatttatatcactcaacaagtataatatattttatataataaaaaattataaaaattgaaccctgtgcgaagtggcgcgcagcttaattccctagttttataataaacatttttttgttaagtggtgtgaatacttgaaataataataaaaaaaaaagtatgtactattatgtcactttaataatggtctaaaataaaagtgagaaaaaaaaataattttaaataacatttagtagtttatttatatgaatattgatccttaatttgttattattatccttcatggaaatctaacatactttcattgtatttggacattatatagcataaatata

SEQ ID NO: 214804 - DNA, 639 bp, Cannabis indica
aaggattgtatttacaagattaggtggttattaattttgtgatatgacaataaattaaagtggaattagaatcatgggttcgaatttattaaattagtttgtagttttggtttggtaagaaaacatagacccatgagggcagatagcttgggacattaaagaatttaagaaaattggcaatagtagttagaagtagaactactagtacctatactagtacccaaccaattaaagttgataaaaaaataagtattgttattaggtattagtggtgcctaatatttttcataagtgatactctaagattgattagtaatattttctgaaagttcttttcttaagttatatgagactcgatatataccaataattatataaaacctaaaaagatactagacattaataatatattttaacaattctaaaaagaaaatcgatgaaattatattgtcataactgtccacgtggttattttttcattaattagtctagctacatcaataaatagaatattaaataatacataatatcattttattagtttacacaattcttttttttgaggtatagtttacacataatttgtaaatgaaagtagtagtaataaattataggatgattctataatgcatcccctta

SEQ ID NO: 214805 - DNA, 791 bp, Cannabis indica
ttagttttaaagtcatatatatggtgttgaactttggtggaaagtgatatttttaatttatctttttaatttttattgattctgactttaaactaaaaaaaaaaaaaggtttaacccgcccaaaccgcccaaaccgttggtcggtttatagattttttttttaaaattggacgggttgcacttaaattttagcaacccgaactttagattggattagaaattatataggataaatcgcccaaaccgaccgatgtacatccctacttatttgtatacatcttagtaattaattagttagcttataatttaaaatacctttaggtaacctgcttaaaacttatattccaaactaatgagttttcgtgtaatgtaacaagctacaatttttatataccaactattttatatacttttttgttattttgaaagctaattagttatcgtataatataatataatttaattaataaaattcttaaattaatgttaactaatatttaaaaaaaaattataaaacagtaattgatcactatattagtaaccaaatagtttctttttttaaaaatagcaaaaaaatatatgcttcccacattttgaaatgttcatattgaagagtagatcacaatggtattttcttttagtattgatgaatgtatattttatgcactcatttactcttatttattcttgttttaggttgttttctttgagtttttggttggatttgatgtgttctctacagcgtgtagtattaagcttaaaatgatgaaattatgacaaaattggagtaa

SEQ ID NO: 214806 - DNA, 841 bp, Cannabis indica
ttttagcatatgcacacgacaagaaacaacactttcatggtacatttttgtactcgcaaaagtagctgtttgcaacggcaaaagaaaatttacttttgtcagtgctttttttatgccggcaaaagtagtcagtaaatcctcgttgatagaaagttttttactgatgcaaaatcaacaatatcaataaaaaaaaggttttactgacacattgactcgccagtaaaagcaagtgcgccactaaaacaaggttgggtgtgttgtaaccttagtaactttttccaacgtaatatttcaccagtaaagaatatatctttgcaggcactaaagtgcattgaaaaaaattaattttaactactggacaattgacttttactagcacaggtcagtaaaggtcgtatctttggcagtgctaaagttttgcaaacgttgttcgaccgattaaattgagaatcgaccgaacatatatgttatacattcactgtaagaaatgtcactttcatcagcacagttcgctactgtgctggtaaaagtaaatttttatcagtgcatttcgtaaactgctttgacaaaaaggtcaaaattttactagcgcacatttacagtggctaaaatctaacttttaccagcacatttacacgctggaaaaagttatttttgccagcgcttttcattttgtgctgacaaaagttctaataccaacgttgatttgccaacacattagaagtaaattccattttaccagcgccatactaaacttttgccaacacaaaaatgtgatggcaaaagtgacatttcttgtagtgattatatatataatataattattttgtacatattaaat

SEQ ID NO: 214807 - DNA, 542 bp, Cannabis indica
acaacaataaatatatgctttccaattataatattgttatcatcaatgagaaaatatagagaacatttaagtttgtaaaagaaggtatgatcaattcgttgattgttaagaatttgaagtatgcttttctagaaacactacgatttgcagctcatgaagtctttatttgttttttttttttttttttttcaaattttggcaatttatctaattaacgaacagattaaggcatgtggtttgtggagtccgcgtgtaatatcccaggaaataatatgatatttaattagacatattttattaaatatgtaattattttggtaaagaaataagattataatcttacttagattaattagcgtggatttattaaatgatcaaataaagcataatttattaattacaaagattttattagaatatgtgggtattgtagatattatttctgaaataaaatatttttggacccggcgaccgtggaaactgggcagagtggtcagaaatgtcacgacacttaaggatggattattttgggagtattctgg

SEQ ID NO: 214808 - DNA, 504 bp, Cannabis indica
aaaataactcactaaggagtgaaatcactaaaattttgaaaagtaattatattgaaacttttttagcacctcaaatttcatgttatgtacttcttttatatatgtaaatatagataaaaaaaaatttctccattattacaatattcataagaaaatagctataaataagaaatagctaagaaaatagttttatttgttaaaaataaatataatattttttttaatgttaaaattttgaaaaatttaaaattataattctatgatttgtcctaatatttctttatttaattaattatttagtataaataacaaatattttatatatttcataattcgtaatattttacacttttttataaaattaaaattttgataaaataataaaataaaaaatataattaatttggtaatattgaattaatcacaaaaattcattcaactacatactaattttgtgataaataaaagtaaaagaaagaattattttacttatacatacaaata

SEQ ID NO: 214809 - DNA, 1078 bp, Cannabis indica
acaaatagtcttaaataattacaacgttaatttttttttccaagatatcaaaattgataggatacatcaatacaccttttttaaggattgcattgtaaaagaaaaaaatagccacattagcttcaagtttgatatatatagggaggaaaaaataagaatagggtgctctaacaatgatactcgatacattgtattagtatttttggtttttttttttttttttgttagtaaaaagactattacattaatttgtgagaaattacataaataacagtcataagtggaggtggaaattcctccaaccaagaacaatcagtatccaccgtaagagcatacttagccaaaacatggccataagtattagcagattgtttaacatgagtgatctgtgctcgtaggaaaaaagataccaaatagtttacatcatttaagagagcatgaaaggctagtccgattctaactctagtttattttttataatataacaatgtatcaagtccgattctcaggctagtcccatacttagacgcccatccaacacatgggactaactaaaaaaaaaaaaactctttttaaaattacacattttcttttactaattttaaaaattaccacattttactctaaataagaacccaaaaatatttttaaaagaatacttagaattctacaaaatttcttagatggtttccaaaaacctatttttcattagtataaataaaagattagctcactactataaaaattgttatttgataccttaagatttccaataccacactgataatatatcatataattagttagtgattattcatattatttattaaattaaaatatataagactcgatattaaaatatactaataacaatatcagtataagtatcccacatcttattatgcttaatactttaaaagtgtcttacatcattatgaacttaataatgttttgaaagttattggttgaaaaatttcatgcagttatctattaattattgtagcttattattgttgtattatttgttaacattacccacaattgagtattataattttagtaacatttatttatacac

SEQ ID NO: 214810 - DNA, 585 bp, Cannabis indica
ttacatcattatgaacttaataatgttttgaaagttattggttgaaaaatttcatgcagttatctattaattattgtagcttattattgttgtattatttgttaacattacccacaattgagtattataattttagtaacatttatttatacactcaatacaaattttaaccacttatctactttctctaatccaaaatttcaattttgtgtatacattaatgaaaacttaacaaatgagtcatttgtgaatcgttttgatggaaaaccaaaaagaaaaagaatgacaagtttttttgtaaaaaaattaacaaatggtctcatataacccaaaatagatctttgttcatacacaaacctgaaaaacgatattagtgaaaacttaattgttagaaaattaataattctaaaatcctgatttgtatataatatagaatacaataacaatagatgataattaggtatacatatataattgatccacaataattacttcaatttaataataaaatactatcaactaagtctttctccttaggtctctaaatcagaagaaattttatttgtctgattatctaaagtatac

SEQ ID NO: 214811 - DNA, 504 bp, Cannabis indica
tttttttttttttttttgaaaaaagggaccttgaaatttcaaaatactaaaatccactgttgatttttcaaattattattttcattattttaatgccaaataattctaaacctaaacctagtagttgcctataaatagaaagtgatggctcagtcacaacacatgctttcattagctttctgacagaaatttctctcttcagaaaactgagccttcctcactctctaccttggccgaaatacctctctctcttttcccttcatctttttcgtgaccctagtgaaagagtaagtgcccacacacagcaagcagtaactcaatcatagattggaagactgtgaaggatcaaagcttgaagaagaaggagattcgggctcagatcttgattatactctgctacagaaaggaatcaagggttagagatctgagtggaaggagacatttattccgctgcatcaatgtaaggttttcttaactttatatgtgtttattttatcgttttag

SEQ ID NO: 214812 - DNA, 354 bp, Cannabis indica
cttcaaccaaacgtgactgtattgtgtaagagctaaacgtgactatataagcctgtgatgcagagatggaattacagtttagatttgttggtttttctttttttttggttcaatttttgagttattgacaacttgtcttcttttcacagggttatacaccaacaccagtggaagttattaaatggatggaatttctccacctcaaacctatgggagtgaatatatgggtattgttttgacatgccaatatgtaaaaactgttggtcatgtaaagtgtagtcagataatggataataatattaataaactgtgtactagtgtgtgaaagattagctatttagcctattttctgtg

SEQ ID NO: 214813 - DNA, 607 bp, Cannabis indica
aaattcgagcttcatcttcatcttggactatctccacccttctgtccaaccatctgaatcaactcgctaagatagcatccgagttcaagcagctggagctgtaataagaagaaaaacaaataaacatggttagtaggtccagaattaataatccaagtggataataattcactaaaacacatcagtttataggaaaagaaataccttgtttcattgctagaaatctaggacattggggtttccagtgtctcttttcattgcaatagaagcattttccttttggtgtatcactaggagtagcaaccttgttatttttaactgttttcacagcttaaacaggcattttgctattcttccatttcttctgggttttgaagtagaggcaaagtttgcctcagctttagtcgccccattaccatttccagaattatgagatttactccctttcttcttcggtcctccaatcaaattttcataagtctgaaggtcattaactaacgtgttaaagtcttgttccttcttatgcctttgtgtgacttgggcccactgacgcttttaccagccaacacatccgactcaactgtctcgatgcttccatatggatcaa

SEQ ID NO: 214814 - DNA, 658 bp, Cannabis indica
ttatgctagaatttgcaaaaataaatgaagatttctagtgaattttcgttttttctttttatattttttttcgtagaaacgttacccgaacaggcctatagttgagtttgagattgcagctgaagagcagatgaagataacagaactgcgacttgcgaagctcttttcaactaaagaaaatgtttcttcaacagggggtgatcagtttcatcaaactgcctcaaagaaagcagaaggtaacactccttttgaattttgattatagaagaagatcagaatgtaaaccgatttttcgtttataagaaacaaaactactggatttgagcttctttcaattatatatggcataccaagtgaagctgttcactgtaaaattcatgttgaagtttaacaagcttgtgtccctatcaatgtctgattgaaaaaaagttcaaattttcggtactagtcagaactcttaaatattcacaggccggccctgagaatatataggcctaaggccatttaaattttaggtttgaggatttgaacccacaccattgtgtaatgtgtcatacaccccaaccagtcaagctatcaatatttagttgcttagaatgtacataattttacttgaataaaagtctaatgagacctttaattttttattttgggcccc

SEQ ID NO: 214815 - DNA, 842 bp, Cannabis indica
agaattcttcgaggctcacttgaatgctatagcctggctcgttgggattgtaagcctcgctgacactaacatgatgaagttatatgaaatcttcccataacgagacggtcacctcgcttacttgttcttgaactgatccgacttttacacttagtttgttctttgtacgctaaggactttcacgattgatacatgtcgctttctttggtgcctcgctattcgcatttagcgacatatggtttctcgctaatatactaagtgtcagtttgtacattaattcctcgcctaagaccttacagtcagcgggttacaaatatactctgatacttacgtaattaatgagttattccatgaaaagcaattgcattgattcatattcccttaatcttgacacgtgtcctctagccgaattttgggtgtaacaggttcgacgaaaaaatttgggtcttgaagggcttcttgaagaaaactcctggtgcaaggggcctggaccatggaatttttgggattaaaaaatgaaatcaatcgaaattcgaagaaaatatgtgagggacagtgagggcatgaaatcttagaaaaaagatgggtgagattcttttgagtttcgagagcttcgtgggtgaaaatggcaaaaagttaaagggattttggatttttatacccaaaagataaaaattgttcgatcacaatgatgatagatcgaacggataggaactattggaaaggagaaaggtcaagagtaataaaatgctaaaataatattaccttgaagttataaaattgactaaaaaataaaagcatgacagtttttaaaaatgagaaaaataatgatcgtaaacctc

SEQ ID NO: 214816 - DNA, 950 bp, Cannabis indica
tcttatggattacgtatcaatataagaacataattaatcaaggtgactttccctacaaataagagattctatgaactcaatatctttatcctttgagtcattttctccactaataattcactttcaacaattgttaaacaacaggcaacaataggaatgccaaaatactagaatggcagtttgatttaagtgaatccggatacctcaattactcttttgatttcatgttaagccattccactaaaatagaaggttgagttggtcttattcaggtacaacctagagattttagagattaatttcagtccttgcaatattctgtaaatagatttatattctccaaatagatctataatatgccaaagagattacaaactaacatgagaattaaaaagcttttaaaagcttaaaaaactggaacttattaatggaaggtacaaagaagagatatcaaagaagagaagatgagatgtatatagagagagataagattaaagatcaaacagcacaccatgcaaaaagccgacacttggctagactaggctgctcaacagagactactacaaacaagacaagagctagaaagtccctatctgactagatgttcgaatagggactttggggaaaatattatttgaaattttgtccacctaatgtggcatgtctatgtaagccaagatagagtacatatggaatacagccttgctagtagcaagatagggtctccataaaagatatggcaaaactttcaagtagcaacagaaaggagtgaagcgagccaccaaggagttgtaacaacatgtctagccggcaaagagaagcctttaggctagccaggtgagcttgtatggccagccaggatttgggtacaatctggccagccaaaaggtgacttttagaccaagggagcttttgttcgactaaagtaacctgacctctacaaggaaaag

SEQ ID NO: 214817 - DNA, 722 bp, Cannabis indica
ccttggatgagccaattacgatatggtttcccacctttcttatcactttgactgagcacgttgttcatatccccaattaagcaccatggcaaatcttaccttttagtaagatcttcaattaaatcccaagtaagttttcttttagacctgttaggctcaccgtacacaccagtgagacgaaagcttatgttccctccagacatcacttcaacatctatgtgattttggctaaaggtcttcaaaaagactcatctttaaaagaaagtaattaaaatgaccgtttaatttatttgatttataaaatataattaattacttaataattaattaagaatattataataatgatcactatttaattactaaatatttcagttactcaattttaattaccgaattaattgttaaaatattttgacaatacattatgtgaaacatagtaaatccatctaagagagttaaagagagcttgtaagcctgaatactcacactaactaagttttattttcttttgtagatctaaaaattgtgtgggattgaagctcaaagtatcaataactgaaggtattttgatcttatatttatattgtatatatgctccatttatttcacatttaatataatagctcatatgtttcacataaatttataacatggaaatttaaaatctacattgatatggacttaatgttgattgaaatataaaagtaaatgttccaatc

SEQ ID NO: 214818 - DNA, 522 bp, Cannabis indica
aaaaaaaaaaaaaagtgaggacaaaaggaaaaaaaatactgattaataagatagtcttattgaatttgagaaaatataaaaaaagcatggactataggaaataaaagagcaagaagtttcacataagtttctaaatccaacaatctcaatagtttgtgagaaatttttaacatcctggttaaaaaaaaattatgggcataatttgttacatgtcaaagtttaggagacgaaaattctaataagcatttattttatattaaagataaaattatctttcttcttaaatttttgaaataactacaagaaataaataaataaacagattaagtataataataataattttatgcataattttttttttatttttatatttaaaatccaaaaaatattattaaaataaccataattttttaaaaaaacatatattatactcaagtattgtcatacgagatcccacataagttttactaaaatttatggtttaaaagaaattttaatatataatttataaccaactaa

SEQ ID NO: 214819 - DNA, 710 bp, Cannabis indica
ctactctctctctctctatctatatatatatatataaatatcgttttcagtcagaagttggattggggttccgccgcgggactcagaggaagaaggaacaaaagttaagtacttggaaggaagacgataaagtatcacaaagcttcaagctttctctctctacctctctctctttctctctctataaatatatgtttatatatatatatgcaccgaaaaccctctcttctttcaattcaattttttttttttattattttctctgtaactgcaaattttatttttatatatataaatttaaagaaaattcattttatggtattttttttatatatatattgaaataatcacaacaagataacaatatattgaaataattgatgtgataaattagtttaatttttccttgttttacgttaaaaattaatgtatattgtaaaaataataatgtatttttatttttaatttttatttgggtaaatataattttataaaagttattattaaattatttattttgttaaataacaacttaaattactgtactttttaaacttaataccaaatagtaatttgaaataaatttttttaaaattaaaaatttaattaaataattacgatataaaaagttttagtacaaaattgattatgttatttatatttatttgtcactaaaatttatttttaaatttagttaattgtaaaaaaat

SEQ ID NO: 214820 - DNA, 905 bp, Cannabis indica
tttttattttatttaattattaacaataacttaccaaagaaggaaacatgaaaaaaaagtaggaattaaaattagaaattttccttaaaaggtatgtaaaatcagaaaaaagtaatcaatgagatcattttatattgatatgaatatttatttttaaagaatgtacaataataattcttaatatttacctaaaatttactaattaatagcaaattatatatgaaggtttagcttttaaaaagtaaactagttatacaaattgaagatttagtttgtcattcattgtagtgtaataaataacatattattatattttaaaaaaaaaataattgtggtaaaaataccaaatatttaaagaatataataattaaataccctaatttttttattttacaataaaaatatttaaagttacttgatcattaatatttaggataaataacagcataaatacctaaaattttatgtttgtaaatggcataaactcaatatttatttttagcggcatatgtatcaaatgtttataaaactgtaatttttctctaattttatttgtacaaattctgttatcgcttaaatagggcatatataaggtcaagattctttatcattgggtctagatagaaacatgtagtataaattacttccaatattcttttaataattcaaaacatttgtactaatgaaacttgaggaaaattacagttttataaacgttgggtacttatgccgctaaaaataaacattaagtttatataacttaacgatgagtatggattctttagtttatgttgtgttctcagcttatagttttgtttagaatgcatgaacataatgttctggaaagttataattgatttgaacaagtttaaaagggttataacttgaaaatttttgagttacag

SEQ ID NO: 214821 - DNA, 555 bp, Cannabis indica
caacttattttgagggtgaggatacaccataactgtcaaatactacttaaagtattaacaatttaatattttgagaagcggcacgttatagtaggattaaacaccactaaattacttaataaattaactctactcgttaaattgtgaacacatgtagagtggtatttttatactctatctttgttaatgtatctcatgttttattctaagctgaattgtttatttaaatattatataatacaaattaaaatttcaaacattcaatcatataaactatatgacatataaaaaaagaaattatatcactttcccactttttaaaaaataataataatattctttcaaataataataataataataataataatatcggaattttcttaaataattatttgtaacacttgactttttatgtaaaatatttagcaaaaaaattacatatcattactgatttgttacaattcatttattatttcatttattattgttaagtctattaagtttaactaaaattgacacataatagcatcaaactaaccaaaaactaatttt

SEQ ID NO: 214822 - DNA, 573 bp, Cannabis indica
aaaaaaaaattaaaaatattatagtggcttttaaaaattattttaaacttatttttaaaaatattgggatgtacttatcattttatgggggtgcaaacagatacttttctttgaaaaaaaatattaatatttaagtgctgcaaacttaataaattaaatactttaactgcaagtatttctataaataacaaaaacagaagttagatagaaattctataataaataggaagattaagtggttatttgcaaatttggattttggcttgaatatgaataacaaaattaaattctataataatacacttattatcctatttcaacattgagatacactttgatctgcaactacaaatttcttatacaatgttacctcattttaacactagtcattaggactaataaataataatagcttgttataataaaaaaaattccaataataaatcttattgtcatgattattataccaagcatcttcataccactcatattgtcatgatttatgcaaataagttaataccaatacagatatatggtccaataagtaggtaccatactacaatgtttgtgttt

SEQ ID NO: 214823 - DNA, 785 bp, Cannabis indica
gagtttttctatcagcgggtatcagcccttggtctcaatgagtcttttactgatgtaatagactgggtgttgtacactattttcttctctgatcagcacggcactcacgacatgttctgtgacagctaggtatattccaagttcttctctgtccagaggttttgagagtacacgaggttttgcaagttgtgcttttaactcttgaaaagctttttcacactcctccgtccactcgaactgcttgtttcctcgcaggatgttgaagaatgggacacacttatctgttgattttgaaacaaatttgctgagcgcggtgatccgaccagtcaagcttttcacttctttggtttttgttggcaagttcatatccaggagggcttgaatcttctctggattagcttcaattcctcaggcattgacgatgaagcctagaaactttcccgagctgacttcaaaggaacactttaagggatttagtttcatattgtactttcagaggactttgaagcattcgtctaggtcgtgtatgtgccctcagcctttctggatttgacgagcatatcaaccacgtatacttccatatttcgcctaatctggtctttaaacattttgtttaccaatctttggtatgtagttccagcatttttcagaccaaacgacattactttgtagcaatatagacccatatctgttcggaaacttgtatgttcttggtccagtggatgcattttgatttgattgtagccagagtaagcgtccatgaacttaatatttcatgccctgct

SEQ ID NO: 214824 - DNA, 742 bp, Cannabis indica
catttttatactataaggtattttttagaatttactgtgaataataatactatacattattacaatatgtatcgaaactagttcgaaacataaaaaactacatctttcttattgctcgtattgtattattatttttcaacaattttttgaagatacaaagataatatacaatacgaataataagatagatataaattattgatgtgtattatttttttttatttttgtgcataatatagtatgacatcttgtgccgatcaaaatgacaaatgggcatcctatgctaaacccggaggatggaatggtaattcgatattaactcttcttattctcaatacttttgtaaggatcgacctgcattatagacgagttagggctcacatttacggtcttcgtcctaggaaagcttcaaaatttagaaaaacacaaatttttcgcatacaaagaagatcttgaattttttaaagggattagattgaaaaaacgcaaaaacaacaaaagaattacaaaaataaagttgtacgaaattttaaataattttacggttttttaaaattttatttacataaaatataatatttcgatatatttttatgttatactcttattatattattgttagttttttattatttgtatattatttttttatgttgttttgttgtttttttgttatttttataaagaaaaaaattaaacataaaagtataaaaattttgtcaaaaatagtaatttatgtaat

SEQ ID NO: 214825 - DNA, 714 bp, Cannabis indica
aaaagtagaaaataaaatgagaaaaatatatctacaaactagaatacatagattattaaaaggatatgatgccacatagcctccttacaattctccttcaatatatgttgacctcgcttttagtcaacgacaatgagtcaattatgaagcgattagaaatatattaaaaacagagcaaaaaccaataagcaataaagaacactaggttgtgaagaggttcagcccctttagttcggtaatagcctactccccttagattatattgacttgagaacaaataacacagtgttttccctctcaaagctctcacaatgaaattcctgagtgtttctttgagatctctctctaaagcaattctttcgatctcttttacagtgaagctagatcactatttataggggcttaatgcatgagggaaggttttccttttgcttacaatatctataattggaaagagtatttattacataattagaatacatgaaatgagggattgagataacctaccatatctctctgatacaatcctatgattgtagggattgccttcgtgcttgggcttcacgataccattctgaagtagtcaagtcttggtacacagctcggagaactaacctcattctttgctcggataagcagactttgtgcgtgcagttatgttgcttgaagtctattcagaatatcattatttccaaatgcaaggaatgatggaca

SEQ ID NO: 214826 - DNA, 511 bp, Cannabis indica
acggtggatcctgccttgcagaaaccaggaaaaacaaggtttctgctggctgttaatcctagatagacggcaaacgcgggcaatggtgtaacacttcctatagatgaaaccgcgcctggtgtgcaagagactgggaataacagttccgcacccaaccagagcattcataacacaactgttccgcttggaaccaacacccagacgaccatcagagatgctactgagttacaaaatcttcgtgacgctcttggactcatgcaaaatcataacaacaccctgtatcatgatcaggacgaactgtgtgctgcagtaaatctcgcattcgacgaacaaaggcgcgtgttcgtcgaatggagggatagaaagatggaggcattaagggttgaccatgaagagattgaaaatcgtagtcagcaggctaccgtgctgatatgaaaagcctatcaaactgcaggtcaacagccaccaaacgtcattcccctaggtggaatagacgaagatccaacgatga

SEQ ID NO: 214827 - DNA, 811 bp, Cannabis indica
aattaatataattgaataataatcgttagggtgctttagttagtggtacaacctttaattatgtataaccttcgaaaaattttagaataatttacattataaaatttaatgttgaaactttcacacgtatataaaattagaaaaaaaaaaaatcaaacgggctaacaaaaaattttaatttttggccaattaaaattttctaataaaactggtaagacttgtgtgactggtgtgagtgtccttataatttcatgataaaggagaaattgctaataaccatttataaaacatcactctcttgtggaaatcttaaaagtaaaatgttaaaggtgaatttggtatatagtatttggatatattttgcatcaacgatctgttagattatgaataattagttatatggaggaagagatagcgaaaatgctaatttttttactatttatgaaatgtttatgcaactgagtattcaaatctgaattctatatttgtgtagattcattgttaacataaatatataataacacatttgggtttgcaggaaaatattggaaaggaaagagaagacaagtatatgccaccaaaagcaactatggaacaagatgacatctctcttttctattcagacattatgccacttcttgtatgttaataaacatgtacacataatatatatacttttatttcaataaaatgataattatttgtaaaatggcatattaaatgattgaactatagtgcaattttaccaattactctgtattatattttaagtacatatacaatggttgtttcaggttgataatgagccaag

SEQ ID NO: 214828 - DNA, 675 bp, Cannabis indica
caatactttaaaatgcaaccaaacaaaggaatggaatgaaaattatttcctttccattccattccatttcattacctccaaccaaacgtcaccttaattttatattaatatattttaaatcagtttatagatgtatttttctttataatattgttagtcatttcaaataatatatacgagagagagatgtgggaaattaaaaacttaattttaaaaaactattaacacgaataagatcatgcaaatgtagatatactaataatgtagcaaaatccttaagtgcaaaataaaaaactaacagaatcaaatcttatattccatatgtgtatgaaaaaactaatgattaattacctcatatactatttttaattttttttttttttaaataaacataagttcttactcttatatatcgagaaaaaaaaaatcaaattcttactctcttatgcaaaaaaattaataaataccctaaattttaaaaattaattactctcagtgagtcccatatcccacatcaagaatttgactacctaggtataccaaaagaactaaaatacttctttctctttctttgaaatttctcatgttcacactccaaaaacagaattattaataaaatatcaattattgtataatatttttttggttagtaaaggacccttaaaaaagtggggg

SEQ ID NO: 214829 - DNA, 716 bp, Cannabis indica
ttctcaaaaaatttagatttgttcaagtaataaacataataattttctatttttattaaaattctaattatttttgtttattttttaagatatgtgtttgtaaataaaaataagtttgattttctcttcacaaaatcttaatttgttttattggatgtttcaataattttttttcgattttttaaaatacgtgtttatcaataaaataaagtttgaaaatatttttttaaggaataatttatgtatgttaagtacaattaatacttttattaaaaagtaaacttaatactttttattaatttaatacttttaccaagtttttaaatgtttttttaactttttagaattaataaaaaaaatataattttttaaaaatgaactttttttaataaaatgaggtagattttagcatattggtcaatattcagggaatcaaaatactaatttttaatggtaaaagaaacagatttaaaagaagggacattatataactgttatattttagagaaacagatttaaaatactaattttagcatattggtcaatatactaagtcgtatattttaggggtcagaatgagttagtgtcaaaagttcagggagctaaatactaaatattctttatatattttttttagtgtattgtgaccacaacataactcaaaaattttaacaaaaacatatttaccttgaagagagactcgtgctgataacgtg

SEQ ID NO: 214830 - DNA, 324 bp, Cannabis indica
atctgatgttacaaagttattgtcgtgggaggaattttaaaaacaccaaataatgtgagtattcaagcaccactactacaaaaatatcattttgaggtggcttttaaggctttttatcgttagttttggcaaaatttgttagcgacactgatctagacgatactgtaaggttgaaaacaatcgccactaaatgataccttatggcgtcggttattattaaagaaccgacaccataagtacactatggcgtcggttattcacaaataaccgatgctatttgctaaaataaccaacgttctagataataaaaccgatgttgtaggg

SEQ ID NO: 214831 - DNA, 842 bp, Cannabis indica
gctttaaaaactggtacagttatcactatatttataccaaataaaaaaaaaatacaatagcattgtaaagctttaagtaaatacaagagcctcacaaaggcaactgcatacataaagcagcaaaatacagagacgtgatgctgacgcttaaacactactttgactattctgggtccttttggtccttactgattcaaaacattgtttcattacagttaagaaatagccagcccttctagatagcttgccaaagcataaaatgaaacacctaacatatcctatcctcataatcattttgtacagcttttgatgcatagtttattaattcaattgaaacccacataatctggttaacacctgaagcattttcatgagtaattttattctaaacggtggcaataaacacattttcaccgtcaatgactcaaaaccctaatgttccaatccgtggcaaagaaacaaaaattgataaaagaaaaaacaaaaaactaaaaccccaataagtcacttcattctttagttaaaaaataaatatcagcttgctcaagccagggcttgaacaactatacgcctatcttcagcaactaccatttccttccaaaaaaaaaaaatcactcaccttcttttcttcttttcctaggaacaaaaccaaaaagtactagaattcaataaaaaccaaaatttcaagagaagaaatcattaaagtagtcacctgtgtttggcgagactcgattataaaagtcctcggttcgtaaatgtgaagttttggatcgagatgtttttgggtattatggtgaagtttccagaaagttgtttgtttgttgtttttttttttttttttt

SEQ ID NO: 214832 - DNA, 501 bp, Cannabis indica
ttaactgtagaatatatattaacattgaaagacatcccaaaaaaaagaaaaaaaaaattgtacctattatgtatgtagttttgttatttttttttttttttgttatgatatgattgtataaattatatatatacataattcattgaaagacatcacaaagaaaagaacgaaggaaattatacctgattatatatgtatctctaaattgtataaaagagaaatgatagaggtatgtatctttgtatttcacttttgtggttatagttactattaatattgtatatgttcttcaaatttatatctatatatatagtgggtaacatgcaacaatcaaaaggtttgtagagaagtgaaaaagttgtaacttaatttttttaatttatgttagtgataaatatgtaataattgaaaataggttatgaataagtgaaaagttgtaattatatttttactattatttttattaatcatacattaccaaaatgaatataaaatagatga

SEQ ID NO: 214833 - DNA, 579 bp, Cannabis indica
ataaatttttatattaagttcatttatataaaaaaaaatataaataagatctttaatgggattaaatagaatatattcatataaataattaaaaagtaatttttttaattatcaaataaaattaatatttgaaataataaaatatgtttttgaactaaaaattataatataaaaaatataagaaatattcacaaattaagtataaaaaatatagttaaatatttaataatatagtaatttatataaaaataagttattaatattaaaattaataatgttatttttgtaataataaaatttaaaatgttatttttctaataataaaatcaataatgttatttttgtaataattaaatttaatagaaaaatttatagataataattacttgacaaatatatatgaaataaatgtaattaattaaaaatataataatttataaaaaatttagtagtaataattaattgaaagattaatataagaaaaataattaattaattaataatataacaacttataaataattaaataattaaaattaaatttaatattgtagtgtttctaataataaaaatttaata

SEQ ID NO: 214834 - DNA, 758 bp, Cannabis indica
agtagagacatgtgccatcttttatgccaaaagatgccacaggtcgaccatacattatgtaggggccttcttgtacaattttgactttatgttcaagttctagccattttacgcttaaataaaccatgtccttgttagttttcttgtgggattgagttgtaatatcctgataaacctaatagtgaatacttagggtttaatatatatattatgggctaatcaggttgtaaagaacacttagctttgttttagaaattagcagataattaggtttagttatgaaaatagaataataattacaatttaacattttatggagatttatttaaattcagtatgcattagttatgccatatatgaaattttatgttttttcatgttttatgcccagcaacatcggaatgcgacgtttggccattagaatcacattttagtattttaatagttttggggaaacttagttagacattgagaatgttaggagttatccgagatttagaagtgaccaaaatacccctaagtgacttagaagtttttggttttagtggggggcaaagtggtctttttgaccatttagtacttacactacaagaaaataggcctatctcgacgggcctgaccccccgtcgtaaatttgactgccgatattgagaaagggtcattctcgacgggctaggcctgtcgagatatgtaagctatctagacaagcctagtcaacgagataggtgagcaatatcggcgggctaggccccccgtaa

SEQ ID NO: 214835 - DNA, 675 bp, Cannabis indica
cggatggctctaagctgacttgatgctgctcagcgagggtgattcttcaaaaattgaaaaccgcagcactaagaaaatcaaagactctaagaaaattttgaaggtcacggctttcggaatttagaaagcttcaagaagattcttttgaagttgaaaagtagaaaatgagaagagaggaggtgagacacttatatagattacttaaaaattttattttccctaccaaaaacttaagtggggagttaatgccaacaaaaataaacatgcatgggagagagaaggccaatagtttaaacatgagaaagtgtacaaccgccactcgatttcccacattgattgacataaaattgataactgacgcaatggctaatcaatgtgactgtgcacagctgcacgacaaaagcatcacaagaccagaaagagtgtaaagtccctattcgatcagacgttcgtacagggacttaaggagcaaatattatctcaattattactattatgacgtggcatttccatgtaacaagtccaactagacatgtggagataaactactaagaatcgaccaacataatgctgaacagctccctgaccgtcaagcctcgaggtctcaagacaggataacacaagctaaagataggattttgacaagaccctagtcgaccgatcaactggctggcc

SEQ ID NO: 214836 - DNA, 877 bp, Cannabis indica
tttttttttttttttgatttagagctatcatctcaaaaggtacacgtgtttaccctacatttgtctggtacatgtccaactatatattatttaatagtattaattgattttatttgaaattttaaatataatattccatgttagcccctgaaagaaattgcatgatacacgtaatgcacacacatacacacaacataaatcttctcttacctatattcaatgattgttattagatgtgcccacaccacaataatatatatttgaaaatattcccataactttatgatgacaattaattctagtattctttattcactacgtacaaacattcgaaagactatggaactttcattcattaatgtcttttaactgatccttatagaggaacattctctaccactctatctatctatatggtattgttaatattaaagaatccaaacaatgaaaatgtgaacactgtcgatgccatgctgcatacaaaatttgtaggtatgtatatataatacatatttaaaaattaatatttctatgtaaaataatatattatttatttcattgagatccttatagttaacttttgaatgtgtaaattctgtatttaattacagtatgtaactatgtatatattatatacgggctgcttgataataaaataaaatgatgaaataatttgacacactgataaaaaaaagttcttactcaattttgtttcatttaaaatttaagataaggtgaacggattctatctcaaaatcaacaatgagagaaataatctattcatcttatatgtaataatttattttcacacattagtatggattaactctaatatgaatcaaatcatcatttatctatttttggtgttttttttttg

SEQ ID NO: 214837 - DNA, 536 bp, Cannabis indica
ctagtatatatatattcatacacatttggtatcacaacacatttcatctctattctctactcataacttcaaaccctaaaatgctttccaatcttcgtctaataataattccttcattgatgattaaaaacacaaccaaaattattactaagtaccactactattacttccctatcaccccggactaaaccaaaaattaaaaccctaagtactactccctctcaaaccctaaaccctaattcattttcaacatttgaaaaaataaaactaaacatatgtcaaaatgtttggtctaaagttaaaaaagaactcgaagaaaagactgatgttaatcagtatcaccttcatcggtagcgctgggccgatgaaactgttggtagatgaggatgagcttgtcatttcggtaattcgcaccaccttgaaatgttacgctcaacaacaacgaagacctattctcgggactaatgtccatgatttcatcctatattacccaaattttgattctctaagtcctctagacaaaattggatccaaag

SEQ ID NO: 214838 - DNA, 1194 bp, Cannabis indica
ttggaattactcaagatacaacatgtgttctatgttgccaggatgtagaaacatgtcatcatttgttttttgactgtccaattgcagcagaatgtttaatagcagtgaaagcatggctgaattggcatgcttctgctacagagttaccccgactgctcagatggattgggagagcaaaaatgagcaagtttcggaagcttatctttgcagcgtgtattactggtctggtgtacatgatttggagtacccgaaatgctaaaatttggagtcaaaaccaggtgcattctgatctgttgattcagcagatcaaattttcagtgaagcagcgagttacactttgttggccaaaacgagtaaatgaagaagacaaagaatggttttataagttgtagctatttgtaaataagaaattatagtcaactaatacatgtatagttattcatggcctttaaaaaggtgcaattagtttgtaaaaactttgttgtgagcaatacaaattctctgattcatcaaaaaaaaaaattcaatttatcaaaaacaatattgtaccaaatttacgcacctgtacggctgaaacatttttgtgccacgtagatactatgatacaaatacaagaaggagaaagagtaacatatagctaataatgattgaacagaatttcattttctactactacttattttcgtgcatatatacaaagaaactctctctactccctttatgtatggttcagatggttgatgatgatggtcaaggtcaactttgaaaattcttgtgaaagctcaattttgaaacacggtaacgacagtggttttttcaaaataaagaaataaatatgaaaacaaattaataagtcttctatccttatataattactttcaaaaaaaaaaagtcttctccttattaattacgaaaataataataagtctttgcgactttctttaaattggtaaaagatgaaatagagaaaaaaatattagtaaatggtaacacgttaatttcatattaattaggactttataattaaatttataaatttcaattataaacttatgttaattttattaatgaagtttatattttgggaaaattattttatataacattttttatttttatttttttctaatttacagtttgagttgttccggtagtttctacgtggattttagttagttgctatgtgagttttta

SEQ ID NO: 214839 - DNA, 773 bp, Cannabis indica
gtttaccagtgataaagtaaaatgttcttctaactttaaacaagttcactttaaaagcaatctttttgttcaaatcaaatctaatatataaagaggaaaaggaaaaataaaaaaaaaataaataaaaagagaatctttcaaaacttccaaaatatgtgtagtacataaggagaggtttgaatactattaatttatttataattttgcaaagtgagagaattcataaaaaaaactttaaaaaatgagaaaaaaaaattaataaattatatgtaaactaataaaattttatttattaatagattttatttctttataaaatattaattaacgttaattttactttaaagtttaattaataataaaatattaattaagactaattttattttaaaatattaattaatttttattttaagtacataattaatttaattaataaatacttttttaataataaatttttgacaacctattatagcaaattataaaaatataaacataatagttatttttttaatttaaccattaaataatcaccagcaaaataaataagtcccactgtatagataataattataataatgacatcaaaataagcaaattcttataactatccacgtgagaatgttctgtaattccttaattgagatttagtaatgtataatgtcataatattatataaaattataaccttgttgagtgatgaataatatattattaactttattaataatatattgtaactaaactaacacaaacacataactcaatca

SEQ ID NO: 214840 - DNA, 509 bp, Cannabis indica
aactaattatattttaataggattttgacgattaaattatttgaattttaaattttttgacacttaaccacataaattaattttttgagagcaaaaatacctaaactcgcattctattttgctctgtacccacccgtccaaaaatcatagtggatggcaaatttttaatagcccagttaatattaattttaaaaaataatataaatatttaaaaaattaaaaaatcagaaaaaaataattttaaaaatatatttttttggatactggcggctaaaccgcccgaactttaaattttttaacacttaaacacaaaaatcgaaaataattttaaaaatatatttgtttttactttttttcctttttctttttctttcttctttcttctttctttcttaaaatttatgaaacactaatctctcagccctccctcccaagccctctctttctctctcttgtctcaccacccaagaccttgctggagccgaagccctcgccagagccatttgccc

SEQ ID NO: 214841 - DNA, 499 bp, Cannabis indica
ttaataagcgaaattcctaactagctaggtcattacataaaactattttcataatacaattgaaatatacacagaagtattttttaagtttttttcctcggattttaatttgttgaagagaccatctttattaatggaagtatttaaaatttatgactaaatttagtaaaaaaatgagtttgtactatatatgccctactataaataaggaaaaaataattaattatattgatagtcattttatatttattttattgagaatatacaaaagttattgttttttattcttttattatctttttacaagtattcttttattagtttttttttctttttgacaaagtgattagaatcactcatgaatttacgacgcccacatccgccaccggcgctggaacctcctcgaaccaagatagctcatcgtctaaccgtagagcatgctttgccaagccatgggtcgctaaatctcaaagcgagccacatgggacaaaactgctcc

SEQ ID NO: 214842 - DNA, 761 bp, Cannabis indica
ttgaacgtgcatttggagtattgtaatctaaatttgcaattattgctggatcgatacgtctttagaatatatattttttttcatgatataatgacttcatgtattattatgcataatatgatagtagaaaatgaacgtgatcttaatgcatcaattgaatgaaatgccaagcctataagttgagatgatagaagaagataatgctcagttttaagaagttcttgctagacaaagaaaaatcaaggatgttgaagcacacattgagcttgaaaatacattcgttgaatacttgtgggacaaatatatggtaattcacaaaattaatgtactttaattaatctttttaagtgtgtgttttaggtttaattttatttaaggaattttttttttttgtgatgaatgtaatgtggttttagtaatgtaatatttatgttattatatgtaatatgatattttaatttattgtattttaataatttacataattaatcatcaatatctatatctatatctatatataaatataaaggaatgcacaaagcattctaggtggcatcttatatgaagtttttttctaattctttgctatctccatttttcacttttatttagtttttaaattactttttcattcaattacatcataataattatagattagtaataataacaataataacttaattaagtttgtaaaagtagaaattatgtgtccaattaatatcaataagtattataaaaaccaaaggtcattcaaataa

SEQ ID NO: 214843 - DNA, 566 bp, Cannabis indica
ttattttgatttattattttaatgtgttttgtctttctttcaaagctaagatggtactataatacgcttatttaccataatcttttattattttttttatataattttatgacaattcaatcaatttaagtgtcgtttaatgatttgaaactacatgataaaaacttttatattgtttcaagtaattagttattatgtgttagtttttaatttatttattttatgaaaatagtttcttcttgtttgatttttaattaattttttaactggtttctaaaatttaattttataaattatttgttaagaatttatgtatagtatatgaattgtttttaagtaactggtttttgttgacattacaaatcaattcaaaattactttgcataatcgattttttcatgttagatatttaattggttttttactttgtgagaaaacaattgacatttatatctcagacctttaaattaattttttaaataatgttttttaatttaatttaataaattatttatatatattattagataattaatttttgtatctcaattttatttattctttat

SEQ ID NO: 214844 - DNA, 623 bp, Cannabis indica
tgtaacatatttcataaccaaaacgaatgattctacccctagtgttcaccgaaattttcgaaaactagatatttaggagctaaagaaataataatttacagaaattaagagaggaagattttttacgtggttcaggtattaataaaccttagtccacgagtcagtctattaacctctaagggcaatattgatgtgtttatagtattttgcaggaaaccctaactctttactcttactttccattcgaagaagaagaggatcaagggaaatctcagcagagttttagctatgtgtttttggcttgacccctttgcatgagaataaaagggtatttataggctaagtggtaggtacagacggttccatgacccacctaagatttttgcttaaatcccactgttggggtaaattacatgcaatgtagaactgtcaggatgatcccatgggtaacattatgcccgtgcgtgtagcagctggataatgaggaccactttgtactacttggacacgtgtcacgcaaatgtttaacctttaaaagcaggggagacatgtcactcaaagcttgtttctttaaaaacaaaagtccgtagtgtccgtctagtaaaaagatggtggtggtgcga

SEQ ID NO: 214845 - DNA, 442 bp, Cannabis indica
ctaagtaaatcggaagaacaaaacaaaataacttttttcataaagaagtttaataaaaaattaaaatttcaaaaacaataatgattaataatatcagtggtaactttgattaaaaacaaaataaaaacttacggtggtaactgaaatcatagaaacaaatgcttcttttccgctaataagaaatatctcagagatgaagatatatgagaaagaaaaaaaataaaaagggactccattcgaaggggaaaaaatgtcctagtcagaatggtggaataagggtgaaaaatcttagacccccccccccccttttttttttatttctgccatggaaggcagtcatttttcttttaatcaaacatgtaattaaacagaaacctctttttttcctcaagggcatccatcggaggggaagacaatggcggagcattgactaattcaaaat

SEQ ID NO: 214846 - DNA, 1228 bp, Cannabis indica
ttcaaacaaatacataaaagtgtgtaattaccttcaattacatctaattctaattccttttacctgtttaaatgcattatattgtttataagtaatggtaatatggtaaataaaaatataaaagttttgtaaaaagtcaataaataataataataattagtgacactagtaaataaaaagtaacatttatgttaggccaaatttagcacaatgttatatcttttgctaaatttgacacaacttttagcatgtgtcaaatttgacacattttttagaacacaattggagtaatatatatagcaacaggcccgaccctgggcataggcgggctaggcctgtgcctagggcccacccagcccagggcccaaattttttttcctcttttaaaagtatacatttttttactgattttaaaaaataccacattttttctaacataagggcccaaatttttttttccctatggcccactttgtttcagggccggccatgtatagcaatacactacttttttagcattccattggataggcatggcaatatgatttgatttttccggtcagattaaagctctgatctgacaagggagtttcaatcctaacaaacggatctcttatcggatctcggatcgaataaaatccgatttggtaaaaattatctagattgaatcatacctaacccgccttagggaattttttaaagcaattaataaagataataatatctaacaacttaacatcaattacaaaagattaattttaagtaattgacatactacattattatttattgataatagattttatacagtttttttagttttgctaaaacaaaatctattaggataaattataaactcagattctactattattgaatgattaaaaacataaagattttgattattttttttttactcttataaattagacttcatctttgataaaatgtaaacatattataaaaatataatttgataattaaaattaataaatcatatttgtaaattgtttattttattgggttagatatagtcatacatgagttttgatacaaagatttaaaatttgtaaaaaaaaaaaaaaaaaagaagttagtaagaattctagatcttgtccggagttcgaaaagtaaaccctcgcagagtgaagtgagttggatcaacgtcactagttcggatcaggtcggagtcatagtgggagtcagatccgatccgatccatttcaca

SEQ ID NO: 214847 - DNA, 701 bp, Cannabis indica
aagattcgtagtaacttcagtagtaataactttcgaacaaaaactgagaagagagaagaaagaacagaacagatcagagttcttggtgtagcgtcgccggagaagaagcacggcgagagattggatcaagggaaagcattcctttcccgctctgataccatattgcggaatgaagaaaaatgaattgagctttattgattgaatgaatgaattacagagaaaggagacaatagtatatatagcctagggaccaaccgacctacaagacttaacaatactaactaacttaacaataccaactaactttcctaaacaatagcaactaactttcctatctgttagtaacagattacaaacaagtaattgagtaaaaaaggtaatcgaacatacagtaagaaccttcagtataagacttgcagtaagatacaaaacgagtaacttagactaacacttagtctttaatattttttttcattgaaaaaaatggaatgatggaggaggcatacatggctatggaatgatcaataagataatcagaatcgtcctgttgtcttcatatagtagactcgatatgcacgagcaacactttgaagctcctgttaacccaataaactttggatggaactctggtagtggacgaaaataagaaattatatgaaaaaaacattaaccaatgacataagaataaacagtgaacattc

SEQ ID NO: 214848 - DNA, 529 bp, Cannabis indica
atatatatataattaaaaattatgtatatttattatataaataaaaataaatatatgtattaatactattttaagttaaaattttatgttgaatatagtaactacttaattattttgtatattttatttgtatgatatattgttcttattttgttacttagtaatattgttgttttagctattacaaaaaaaaaaaaaacttttagctgtcttacacttatatcggtagtatttttataaaatattaaacttatataaagtgtgatatttaatttttacttatttttttatatttttaagttaatattaaaatttaagtgtatgattagatattcaattaaaaaactaatccaatcgaattagtaattgaattttaaattagatgttgagacataattaaattagattagatggcaattttttaaatctaattattaattagattgaattggataaaaaaaaaatattaaaatgaatcggatagccactcctgatctgcaccacgtgatcccgttattttttccactgg

SEQ ID NO: 214849 - DNA, 910 bp, Cannabis indica
tttatatatatatatttattaatgtattcttgaatttttatttttttttaatttatttagttataaaaatttttaaattattttttatgtaatatatattttgatttgaaacagttactcgaaaaaaatcataaaaaaaagtctttgtaaatttcaagttacacaagaaggtaataaccaacaaaaaaaaaagaatagaagttaccgataaagttaaatattttacttattttatagctatatatgaggctatttttgcttcttattgttgtttcaagggatcaatttattttgtctcatatttttagagtttcttatatactcacgtatatgataaatatagtttgaatatgaagtatttttaatttatttttatcaaatgcataaaataagtttatttatatatttttatgattataatgaattaaattataatatgattatcgttataatttgaattttaaaatttacagtattttaaaatttatttattaccaaattacattagtaatttttttatagcttacttacaggtattttcctttacaacacaactagatcagactgttcataagtaattaggttgtggctgtcactttgatgcaataggtaattacttttttttttgcttaactactttttagtgttttaacttattattttctatttttttttttcttggtgataaatttgcctctataagtaattatcaatgattatgaaatctggctatataagaagcatagctggtcccttcataatgtaatatctctctctcgtaagctctctaagatttattaccttttattattttatgagtcacttgcttttatatgcaaccaaaaaaaatattcggatgtgtgcctcctttttcttttttttttttttttttttttattttttagaaagt

SEQ ID NO: 214850 - DNA, 527 bp, Cannabis indica
aaatcctctaatgatatccgccaaaaaaaaggagaccaccaaaaatccaaaaaataactagatccaacaagacaaaaaccaaaaaaaagccacttgtaattcaggaatagtgagcaaaaaaaaaagagccaaccaacccaaaaataccgatccaaaaagtagagcgaaagagtcacttgtgattagggatagtgagctaaaaaaagccgcttataatcgagttgtccaagatggtgagtaaataaaatagctaccatcttgagggggatgttagagagtctcacattattaatgtgtagaaagataatagattatataagatgaataagctactcctcctattgccaattgattttgagatgaaatctcattcaccttatcacaaattctaacacttacagtttgttgagtagaaattatagatgcattacttggtctctatcatcatttgcactctttgattgtttagctttgagtttgcattctctaaacattgtactaaatttaatttttattcatttatcttt

SEQ ID NO: 214851 - DNA, 1016 bp, Cannabis indica
gataaaaaagatatttttaacttgatttttatataaaaaccgagataaattgtaccattttatatcgtttttcttataaaaattggaataaaaaaaaaatgttttatcccagttttatgagaaaagtaggttaaataatactttttatcctattttttatataaaaaaaaaaaactggaataaaaggtacaagttataaacaccttttaattatcccactttttacaataatatgttgtttcacttttttttcttttaaatttactttcacttaattttttttacaataaataataaattttatttttatttttataattataccgaatatgtataaaaaataattaactaaaaaataaatgatataatttttaaaaataaaagttgtaattagtaacttcaattaataaataatactttacattgtgtacaaatttcttaaatactacacataatgaaatgctataaatctctatattagaaataataacttaaagttctaaacttatactttatctaattgtaatattaaaataatgtttggtacgcaggactggattggattagacaagctaatttgtccaatcaagtatttgggcatgttagaagtctggataactaatctaattaatttcatctgtctgggattatttatcccatctaccagggtgggatttttacacttggtgtcttattttaccatttttttttacatttttgtctttatttggttatttaaacatttttcaaaaaaatttgtttttcaattttatattttaaataaagtttgataattataaaaatacatatgcatgcttatgtcatgggttttctctcatattacactccatctactttcttctctttcattcatgctgatgttatgggttttctcccatattacactctatctctaccaccttcttctctttcattcttttttttttttaattgtttcttttattttcttgttagtttttttttctttttcctataacccactatcatcccctcgt

SEQ ID NO: 214852 - DNA, 799 bp, Cannabis indica
  modified_base (732)..(732): a, c, t, g, unknown or other
ggtcaccatgagatttgatagtcaattttataatttagttactagattaaaatattgtaaattttttattaggtgtttttgtagtacctctcttctggtatttagtaaagctttttagtttattttgttttttataatcccacgttgtaattatttaagattagctataaattttaagaaaattctgaataatttacagtacaaaaaataaaatttaaataattacttaccacacgtaaaaaaaaaaaaatcaaaaaatttacaaggagtcttaattaaatataacatacacgattattaaaaaaaaaaaattaaaaactctttaagataccaaaattgattataaatctattaaattaaccctttaaagaagtgtactatacacacaccttacaatatattattaaattgtaatacgataattttctttagtattgagtagatatacttttacatctattaagcattacatatttactaattacatggcaagttaccttcttttttagtgaaactcttcttcaattatttaagcaaaaaagaaagtcttcttcaataattatgatgggttaaatgattttgtaagctatgttaaaatttggtgtaaaacatatggatgggcacatatcattacacttaaaatatcaagattgtacttccaattcaatttttctactatgaaatcataaatttgaattggtatatatgcatctcatggtggtgctaaatttntaagatatttttaaatattaaatttacatttatttaaatatacatcataatttcaaataaaaaaaat

SEQ ID NO: 214853 - DNA, 1050 bp, Cannabis indica
agtactttgtaactaaatacattattttcttcaatagttaaccaattggttttcaaagggctataatgaaccacaaataatagtcaatattttaaatatatataaaaaaaatgtaatgaataaactatttggttaaaaataattatcaaataattagataatagagattagtataattaaagacatataattaatttttgagtgtaactcagtaacattaatatttactatactaactaattttttataattaaggtaaaaaaatatttttttaaaaaaatctcaacataaaaattgctttcttgataaggttcttaattaataataaaaagttttgaagcatactttcacacttctcaatcaggaatataacactttacattataaaagagaaaaattatatataaagtaaatacatattaatatattataatcttaattatatgatatatatacatgaattaattattaattaaatttagcactaacacaagctgatattataattagttaatactttaactttttttctattatttgcattaatacttaattagttaataatacttaacttttttctattatatttttctacaacccactaaacttgattatagataattgaatttagcactaacacattttcttagtattcttactttgtcttaattatagtaaaatattatattattcttctctttgaactatattattaatcatattatatatataattaaatatcggtttgtatatatttataatgaattatatatggatccaatagtttaatattaatttttaaataaataaataaaattgtatattatctagaacaaaaagataatagtaccacgtgttgagataggagaagtctttttagtgcaatgtgaagactgaattatgaaaaaccactactttgttattggtaggctacattacatacacatatacattagtgggagacttaggtccatatattatacttccacttgtcttacatggactagtgtatacttttggaattatgtatctacaaatatatatatatat

SEQ ID NO: 214854 - DNA, 767 bp, Cannabis indica
gcagtctaaacaatcttttgactactttaattaaatttcatgatctcaatgattcaaaagaacttgtttgcaagcatttgagtgacattggagttcagatatgaatttgaaagtgagagcgaagataacaggcaacacataccagaaaacttgagatcacaggagaaaccctttaagcgagttgcatcaacgtcatctttatctgacttaaatctattcactcttgtctgaagaatctgacaattttcagcagtagactcaccaccttcaaaaaaataaaatcaaatcaaaatgatgaataaagattaccaacaaatcaaaaggctcagagtcagacctgtttgttaagatcaagaaaacccaacattttcaaacaatgcaatatggcctcatattcattcaaattagctcaatccaatttcttccaagataataaataatactaatatatacgtaatgaatggcaaatgaaatttgaatgagaaaaatgtttcattttctcacttattgattcatgatttacttgtacatttcggacaaaagtattaaagaatcattgacataaacttggaaaagaagatagctcaatttcttattcctacccaatcaagttcatatttttacaattctgcaacaaaaggaaaaaaagaaaaattcatatttttacaacttatcaaacgacaaacccacgaaccctcaacagcattgagctgaatcaagcttgaatattaaacgaaaaggtgaaactagttacagctactgtgttg

SEQ ID NO: 214855 - DNA, 627 bp, Cannabis indica
agggcaatgatcacttgttgagattcaattattaatatatcctttactaataataaaattttacaataacaatcaaagagtaaatttgaaatttgaaatttgaaataatctaacttctttctttcttctttcctaccaaacaactataattaaaatacagaaccctatttttcttggtatcacttggagcatttagaactttcacaacaaatctattgtttctaatgaggaaactgtatatataaatatagaaccctatatcttatcttttttacaggaatacatctcagcacaagacaacctctcctcccagccttctaaccagttcccagatcttgaggaaactcaatcaagagctccacctttattgcctacttcaagaactcacaagcttagtgtggatgcaacagttagaagccgaggcaacaagcctaggtatggtgctatcgtgcaagactctcacgatcgaataatagcatgtttttattcatctgctccctcaggtctttctcttattttcacggaagcagaggctcttaatcgagctttgctttggtgtaaagctctccattttcccattagcttggtgatcatagactgcttggacctagtttcaagaattctcaa

SEQ ID NO: 214856 - DNA, 1086 bp, Cannabis indica
ctaaagcgagtgctaagcggattggagttttgttcctttgtattcgtcgaactctttggtttgataagccatttcctttataattatttgaattgaatgaattccaattaaaaaaaaagtgaaaagaagaaaaaaataatacaaaaattaacaaaggttaatggtcatgcattaaaaaaaaaaagatgcgctattgaatagtggcccaggcccaaggaaattgcatacatttatttttatataggtatagcattagcgcttataatatgatttaaattattatcgttatatttgttaatacttataatatatcgtatataaataaaaaattcccaaaaaattaatataccaccagtatagtgaaaaaaatatatacataccaaaaacttaatttaatattcacatgtttttttttttctctttttctttccttcatgatatactaatgaacataaagacaatgtttcctagtgaaatatactatacctcaaacttaaactaatattccatatcttttaatttccgtatttcgttcattatttaccatagcacattaaaataatataccattatcttaaactaatatactaccttttagttctttttaatataatattacacataaaaatgatatactattgtgcaaaataattataccaaatacttaattattcaaggttataattataatttcatcatcaaactttttacagaatggacattctgttaattttttataaaacgggacatttattaacttaatttttagatttaaggccatttatatcttggcctttgaattaccataaaacttctatgatagaagcccattaaaaaaaacgtaatgtataaaaggtttgacattttactacaacttactttctttttttttaataaataaataaataaaatggtactccatctatttttttttatttttttgtttactatttaaataacatgtatttacagttaattaataataggaaaaattataatacactttctaaaagagtgtttaggtagttcttattattattattattattattattattattattattattattattattattatta

SEQ ID NO: 214857 - DNA, 719 bp, Cannabis indica
ccagctgctggacagttaaaaatcaatgtggatggggctatttttgaagacacaaatgagattggtactgggtttgtagcccgcagctgtgatgatcggatagttgaggcattttcaactattttttctgtcagttgccgacccgagattgcaaaaattctaagtgtcaaagagacacttagttggataaaaaggaataacaagtcaaatgttattttagagacgaattgcattttagttgttcaagctatttttagttcggtttctatgccttctattttttgtctatttgttcaagattgtcaatctattttatcttgtttaagtaatgtttctattggtcatgttaaagggtctgctaactaagccgcacactgtatgacacgtggtgcttattattggtcaggtcgtcgttttactgagagcgatgttccccttgctctttagtccattgttttagtggatatttctatctaataaaacttattttcattcaaaaaaatataataacataaatgtgatttattctttttaatttaattttttatttataaaaattttgtaaaaatacaaaattttaaaactaaaaaaaaacatagaagctcttatggagtcggttatttcatattaaccgacgccataggtccttatgggttgtttttaacccctacatagtctcgcttggaacaacctcattagcaaattttaccaaaatcgac

SEQ ID NO: 214858 - DNA, 526 bp, Cannabis indica
gggagtaaccaagaagaaccagagaaaagaaccaaaaaaaaaaaaaaaactacaactcactcacaaactcactacactaaaaacactaataaaaaccactcaaaccaacagcagttatacaaataaaggaaaaaacaccgggaacaaaagactcatgaacaaatgcttgtatcactttctaaagcaggtcgtgccacgttgatcaaatctattggccttgttttgcctgtttatacaatgcagacgatgaaactctcaaaaaaactggcttcaaggattgatgggatggtaagagacttttggtggggttgtgaacaaggtaacagagggatctgtcttagggcttgggaccacctatgtctacccaagtctcagggcggtcttggatttcaaaaatctttggaaatgaaccaagctcttttagccaagtggggttaggatcttctcaatgagaaccagtctttatgttgtaaggtgcttagagcgaaatacctgcgaggtacacaattctttgattgtgatgtta

SEQ ID NO: 214859 - DNA, 900 bp, Cannabis indica
gataattttatgatggattgagatctttgagcctaatttttgactaatttttttatcattttctcgaagagcttatgaaattcaaaatgatagagatcgttctcatcttttgtaaacatgttaaatcatctcatttggagtctagacgtgaaagttacgcataatttactaagcaaagttgaagcagtaaaagagcgaaaaaaaaatagtatgttgctatagcacagctcctgaaaaaaaaaagataaaatagagaaaaaaaaagataatcttagcatgtggcaatatcgggaagtcaggtatggcgctataatgccgtgtctttggcgctatagcgccgtacgtgtattttttttttgaatttaaatcctaattctaaatgggttctttctatctttttgggcctatatacagaatgatgtaattcgacttttggacgactggggagatacaaacaagcaaccttgagattagaaaacacattgaaaaggaagagagaagatattcgaagcaatctttatcaactatcatcattaaattccttttcttctttctctttactcttttatttagttatttaattatgaacatgattattgttgttattatgtttgtgattactaactaaacactctttctagagtgttgatgaaactattttagattattctcatatttgttcttgctatttgtttatgcaattttctgttaattatcatcttgttaatgcttgatcaccattaattagtatagagattttaagttttacacttgagagaggtattctaaaattgaacttagaattgcatggcatagaaaaagtgtgagattgagagattctactaattctatgagtttcatttaaatataatcacagtgctttattattacttaattgat

SEQ ID NO: 214860 - DNA, 598 bp, Cannabis indica
agtgtataaaatcgaaaacattgggtgtttataccgcaatttaccctaaaaaaaagtaaataaatacctctgacacgaaccttcaacccacgatccatgcttccagggattaaaatcttcgtctggtgcaactttcggtcaaccacccaacaactttcgtctgattgtgtgtgtaactgatagtgtaagagatattttggtaattaaaaatacataaaaagtataaatgttgtccacaccttatggaagtatttttataaataaagtgtccatttgtatttttcatgtaataaatgtacaactaaatttactatattacaatatatgcgcaaaaaaccttatttacataatctaatacaaaatatatagggtacataattaatgtgttgtgtctattaatacaattaattatataacttaccatatatacatataatatattaattgcaaaatattcatagtattattgaaaatttaaattaagtgaaactaactatttaattatattaaactgatatttatattttttaagtaatttttaatataaatatttattattttttcacataaatattattttatttaaaaattaatttta

SEQ ID NO: 214861 - DNA, 1112 bp, Cannabis indica
ggatttcgggatttctcgacccggtacgctgcaggtgcgggttcgggtcaggttaagtcggttgcgccaatagaattgggtaaagacgtggcggtgtatgcgtaagataaaataaagcgctgtttatgctaacatgcgcgcgatggcgaacaaaacggctgaatgagctgagaagtctactgtatgagctgtatggtttgactcgagtgacggcgcgttctttaacggtagacttttttttttttcttctttaataattttttgttcaaaaaagtaaataattataatttgtacaaagatagtggaagtaaacaagataattataaaaaaacaaaaaaaaatagttgatgatgatgatgaggattgagtaatgttgaagaagaagatttgtatttttatttcaagcttgtgtattattgatttatgtgggtaaatgaatatggacacgtaataatgtttagtgtcgttttgttgaaaatattctttttttttttaatttatataatataatataatattttttacaagagaaatactaaaaagtatgaataatgtttagcatccgtgatattattattggtgtcttaaatcaattctgtttttataattagaaagaaaataaagaggcaaaggtgggttccacattttcttgtttgttcaccaagctttaatcattggtatgaaaaatgattaagaagatacatattatgatttgttcaaattgcttgccaacactaaagagttacaacttcttctttcttcaattattatagaaatttggtgttatagaactatgacagctaacttaattgattccaacgttagctagagtaattatttattaattaatttcagtgctctaattttaattcaatgagcttcacaagttgttagtggtccactatgtggtatcaaataagatttttgaaaatgatatttttgtttggtaatgagtctcatcaggcatgaaaatgtagtgcagggtgattatctttttactttatgaacatattgatatatattttttaatggacgtgcatgctcaattattttatgtttatattcatttatatgcaagccaaagttatcttctaatcgatattaattgatct

SEQ ID NO: 214862 - DNA, 619 bp, Cannabis indica
aataaaaattgtaaaaaaaaaatagacaaaaaagaatttgtaaaaaaaaaatcattcataacaaaaaagaaaaatacatcaagttttgtaattgtacattaaaacataatactaaaaattaatgtaaatataataaaataatttatgattgtaaaataacataatacaaatgatcatttaaaaaaataataaaaattattcacaagaaaaaaaaaacataatagaaaaaagttgattcataaacaaaaattaaaagaatgatttcataaaaaggaaaaaaaatgtaaacatgaaaagaaaatagaagaatataaaaaagatgattgataaaataaaaaattaaaaaattaaaaaattaaaaaaaaaaaaacaacaaaagaaaaaaaaaacatgtttggtattgttttctgttttttgttttcaaaaaattgtttttagaaatgagaacaaaaaaaagtttttggagtttttaaaatacaagttatgtttggttagtgttttttaaaaacaatattgaccaaaagtgaattggtttttaaaacagaaaataacattttgttgtttttcaaaattcttatttttttgctaactttgttttcttgaaaactgttttcaaaaa

SEQ ID NO: 214863 - DNA, 772 bp, Cannabis indica
tacattttgagtcattataacactatttttataattaaaataaactattacaaaatttatacattgtgatcaaaaaaaataatctttcttttattttatttttttccgaattcatctatttaaatttttttttaaaaaaaataggtatattttcaacataaatatcctaactagctaatctattattaatttcttttaaagaaaaaataaaaagtcttataatttcaaaatacatataaaataatgctgataattaattttttaatttaaaaaaaactttaccataatataatgacggttacaagtagaatatggtgatgacaatgtagtgacaactacaaatgagagtacggctttaaaattataaaataagttttctgtagatttatatttaaacttattaagaaatatattgacaaccacaaataagatataaaaataataatgactttgaatgtaatagtgactacaagtaaagtacggtgatggcatcaattttaaaatcatacaataagttttctataaatttatattaattattatatatagtttttttgaattttaattcaacttattcaaacgatatatattttgaaaactaatcgtataataatatatatctataataaaccaattaaaaaaaaagtaaaaacataaaaatattcaaaaaaaaaaaataccgtaaatttattattcatattatagcaagaaaattataaaaaaaaatatataaatttagaatgtaatataattttataattcaattatcatt

SEQ ID NO: 214864 - DNA, 825 bp, Cannabis indica
tacacattcttaataacattatggtacgtatgtgtcctataattaatttatttgataatttgtttggtgatgatatgatcagtacggtgtactatggtgagtacaaatgttatggtcccggtgcgaataggtcgaagagagtagggtggtcacgtagcctaacaagtgatgaagctgcctcatatttgaccaaagacatgattggagggagagattggctcaggccttcaccaactcgattcaagacaccctctgctattatatctgccaaggatttaaacaatgaataaattaaaaaaagaaaaacactattatacaacttacaagattattgttccctcaaattctaatttagcacacctgttattgcttcattcaatatgtataactattatatatctatttatatgtatatatatatgttatttatgtataactattattattagggaacgaatctacacttcacgggatcatttattgtaattttaatttttaagttgctaatttttgtttgaattatttatatataatataaaattaggaacattagaccatcattatttatagatagagcatttaaactcattacaagaactgtaataacagctcggtcacatttgtaatatatattacaacttcaaattaatatataaccgttaactaataactacctctaataataaagtagtgttttctaactgcaatcagttacaacgatttcttatctcaacacagcttatcatcagtatatatatctatcgatcactagtagttacttacttctccacacacccactcacactctatacttaattaataact

SEQ ID NO: 214865 - DNA, 566 bp, Cannabis indica
cctccttttatctcttccctttctgccagagacgatatacatatatatacgtatatagggcttatcaatagcgatatttgagagcctgtaatctaatggttcaaattaattatttaaaattacatcataatttatatatatattttatttataattaattttaaatattaattatagatttaattaacaaaactctaaaccttactaaacttataattttttgagaaccatatactatttttttttttatttaggttatccagtctgttagttgttagaggtttttgtgtgagatttcgtaaaaatatatatataaaaaaatctgtcttgaagtgtgaaaattaaaaaattcctaatttttttactttattttatgtctatttaaatttaatttatttatattttttaattttaaatttatatagaaatatatttaattaaatatattttaaagtaataattatagtacttgtagaaaattataatatattcaacatataataattaataagtacgtgctctaaaataataaaaaagtagaaagagttcaatcctttaaaattaaa

SEQ ID NO: 214866 - DNA, 899 bp, Cannabis indica
agaacatgcacgtgcaacaagttccaaatagataaaatgccctacagatatgtcgtggctgagctgaaggagatgaatatggacccatacgactactgtttagattactacacaaagaaaaattagctagcaacttatgcagagacagtgtacccaataggacattaatgtgagtgggaagtaccagacgaagtgatagacaattatagtcttgcctccacatgaaaagggttaaaactggaaggaaccaaaaaatattaaagggagggaaaagttgggaatggggaaaaaggagtaaaacacaacaagtgacaggaaaaatgtggggagctggggcataacaagagaacatgcagcagaaggcatagaaagtagaagtgaatacaaacaacaacaaaacaatagtggaaaaccaggagaaaactggacatacatttgagcatgggatattgaagaatttaaatttctaaaagaactaaagtttaaagttttattaaaaacattgatttcaatgaaaatttttcatactttagaagggttattaaagaaattggatactacattgaatgtatatatatgaatgattttattgatataggttattttttattacaataatgcaattttttattttaaagataataacataacagcattgttatgaagcattaataaataaagtataacaactggaaaaaaacaatagtaaaacaacaataaaaaaatccagaatagaagatatatgtaatttgaatgctaaataattcaacataaaacatgtttaacataacaaaactaaaaaaaaaaatagtaaaataaagattatatattgtccacaaaaagctaaaaaacataaaagaacaccaaagtttgttccaaaaaactacataaacactgct

SEQ ID NO: 214867 - DNA, 649 bp, Cannabis indica
ctaaagcaatttacacctcatccttatatcacgagaggcggtagggaagggggcgagttgggtcatttgtccccctcaactttttactaattaattttgtgtataaatttataaatattatattttatgctcccaaaaattaatatgtttttatgttcttatacatttcaatttttgtacctataaagtttcattattttttaatttttattcctataaaatttatattttttcataaatacttttttcactatttttttttttcgccctctctagttagaatacgtggcttactctaccactgtagctttctatggcctgatgaggttgtcaccacaaaccttgtgtgccctagatgagaggagttgtttattagtattctttctgtactttttgcattataagtctggtgtggaggtgaatttgttctatgacactactcgactgtagcagtgcttaatttacaatatccattttcctgtaagggttaccgttagtaattttattatatactcatatttataagtttttgatattattgtctataatcttaagcaaaacaagtaggaggtacaagtacaaatttatttgagcctttggtgaaaggcccaagatgaatgccccacgagatgagttggttcggaagact

SEQ ID NO: 214868 - DNA, 462 bp, Cannabis indica
cgtctcgaaagagtgttacataggtcaatcatttatgaaattccaaattgcattgaggtaaacttcagtatgcaacatgacatgaaaagttttaaaccggtttttaatgaacatcgatccctgagttatattttgacaaaacagtgtcaaattattgtgtatatatagtttacagatgcattcttcaagtgcatatatagtacttactctattaattgttcaagataaacaaaaaaagatgtgttttgatgatttttggaatcgaatatattctgaagctgtccttgtagcttgtgatggatatgatatttagtatttatctatcatatacatttatttataccacatataatgtataagagatgatgtatgtatattgttagaatttgggatggatgaggttaagatgaatgagattctattttaaaattagtttgacaatgggcggagtagtccattcat

SEQ ID NO: 214869 - DNA, 884 bp, Cannabis indica
gtagctctcttttactaggaaaagtagttagatgctcaagacgaaactggaattggataagcagaaaacacaccagttcacatgtcaacctgggagttgggtgatcttcggagagcttcccgggactcgtttttggacttctatcagagtattgtaggagcgacgtgagattttctatgttgttaataaggtttctcagtttatgcaaactcctcttgaggaaacatttagaaatttgtcaagaaaatactagctttttgaatttgactatggcttacatctcaaaacagcacctactctatccttaacaatattttttgatgttcattggacattggaccctaatgacagaagaagcactccaaggttttgttggaattattttaccaggatctagatttactaacaagtatgtttcattaacatcctaatatgaatttctaaaacaatgaaataaacacatataaagtttaagaaaccttacattgattgcagcggaatataatgactccttccgttcagatctctagcccttgattcctttctgtagcagagcattatcaagatctgaacctggatctctttctctccttcttgttgattggattcttcacagtcttacacactatgattgagataccacttgatgtgtgtgggcactcactctatcactcaaggtatgaaaatatgaagagaataagaagagaatatggttcggctatgctataggaaaggaggctcaaaattttactgaaggtgatttttttcatcaactttaagtgtgagccatcactatctatttataggcaaccacctaggtttaggttagatttaattagcattaaaataatagaaaaataaatggtaaaatacatgcatagtcg

SEQ ID NO: 214870 - DNA, 593 bp, Cannabis indica
tttttggcttttgaaaaattactgtaatagttatgttatcatattaatatgggcaataacctgccaagtagaagcaacattgaatttaaaatgtcttcatttgaaactctttgttcttcagcattatctttttttttttttttttttcaaatggccactttgatatattttattagaggcaacatacaatgccaaatctgctccacaaaaagtcttttttccccttatttgttgcttgtttgaatgtttgagcattgagcacatgtatacacttccatcttaacagttaccagaccatgcctctgcggaacctgattgaaagttgcgaatgccaaatccagctttctcaagattggaaattctaatatatagtcacatgttaggccaactttattgatctcattactttgtattattcctcatattgataacaaaggtatttttttccttaaaaaaaggaaacatgttaggccaacttcttaagtgctatttgatttttgttaagtttttcaattttctaactaggtaaatgatacaattatcttttaaaagaatggtaaacagatgcggcacattgcaaataatagaagtgt

SEQ ID NO: 214871 - DNA, 882 bp, Cannabis indica
tagctatttctacaaaatttatagatctttgaattatctttccaacgccactggaatcacctcaatataggagttataatactccagatttggtcgttttagtaaaacagtttctaaacttgcgaatttctctaaactttcgaatttttgaacattaattaaataataatattatttaataccacttatacaattaactaaatttaataaatatatatgttaaaaaccctaatggattttcatatgcggctttaatacaactttaactctctttagaaaattggtacaactactctaagcgataatctctactcactaataatataaaataaatgagataattatcctcgcactattaatatcccaagaaaaaattaaatactattttaatcttgatattacacatttgattgaataaagctttttattattcaataaaataattgcattaaagagtaggtcgtaatggtgtaacttttaagctcaaataattatccaagtagttgaaaagaatttttaaagttcaaaaaaagagatgcaaagtttttttaatattataaacaaaaagtcaaaaaggaaaaaaaaagaagaaaagaaaaatagttgaatgaaagaaaatggaatctatatgttccttctctatttaagagaagaaaaacaaaagaaataatgtcagagaaataaaaataaaataaaagagtgtatctttataattaaattgaattttggtcactctatatagaatttctcattaattaatatacttatatgagaacttgacatgtatccattaaattaaagttcttctaaatataatatcaataaaataatgttgtataatattttagctaacatatattataatctatttttgtttttttt

SEQ ID NO: 214872 - DNA, 503 bp, Cannabis indica
ataaaaacaaactcaattagcttagaattgaattgtgtagtgctttgcaagaaggaaaacaaaattctaaaaatttgctagaagtaacaaaagaaacaattgtaaaaaaattacgagtttttttttatagaaatttcaaagtattttttatttatacagaatatacggcgtaattcacaaaacaacttaaatcgcaacccaattcaaattacaatttatatcacaactcacatagtaacctaaatagcaactcatcgcaacctaattcaaatcacaatccatatcgcaactcacgtagcaacctagatcgtaactcacagagcaactcaaatcgtaaaaatataaaaaaaaaattaaaaagaagtatatggggtgatttctcaaaaattatacttttgttaaacaataattttttaatttttataaaaaaaaattgataaataatattttaaatttctttgaaataaaaatagatacttataaaatttaaaaagtgaaaaggg

SEQ ID NO: 214873 - DNA, 506 bp, Cannabis indica
ttgcacgcattgatacgttttctgaagttaccagtaattagttttccccactctccaagcttctccacacaaagttgttgtttaacccagaaatcatcattattagtgtcctcccaacaaccttgtataatctcataacacattggttctttgagccatgcattttcgaatttgaagcttcggtttccacccatttgaaaggtagactctggttccaagaaaagtggacaatggtccgaagttgagtggtgcaaattatatagttttgcatttgggaacttttgcaaccaaccagagttggctacgactctatctagtctcacttccacccaattatcacctcctctatttttctcccaagtataaggatgaccaataagctccatatcagttaaatcacactcattcaaagcttgcaaaaaaccttcaatgagacctcttggatatctattgccaccacgcttatcttcttggcaaactatgttgttcaaatcaccaataatgca

SEQ ID NO: 214874 - DNA, 986 bp, Cannabis indica
cctctacagtcgcatgctcaaaaacagaaagccccgactcataaggtgacgtactttaatgtttaataataaaaattagagatcatcttaagggtggcagccaacgatggtggtggaattctgtgaatcgccgtccccctcctgaatcgtggttatgctgcaattgtgatatctcttttgatgagggcggtgtggttttagcaactgttgtgcgagatggaaaaggtaacattgtcaccatcaaaactgagagaagcctcactactaatccgttgataggggaagggcttgctgtctgtatggccggtgaactgatgctagagatgagggtaaagcaggtgttatttcagagtgataacatggtggttgctactgatctttccaccgagccggggaaggacacccatttcaaactgactaatattagcaagcgcttccaccagttgtgtttgcattttacaagttggggcattggtcatgtgaatagaaagtgcaactatatggcgcataatgtcgcaaaatgggcgaaggagacacggacaataggcttaactaagtcttcgaaagtggatcctactgtgctgaccgattacttggagtggaggaagcatgctggctaatctgctgctagctttctgctatgtgctaatttaagtttatagttttttaggttgttttccttggttgtatttctgttttcttgtagtactctattttccttagtttgtatttctctgaactttgattatttggttaattgttttgctctggggtgtttgcacccgtttctttatcaaaaaaaaaaaaaaaaatatggtaccctaagacattcatctccttggtaaaagagtagactaagtagtcaccacatgatttgtgatgcattattattaaaatctctctcataaattgattaaggttgacaataaaaaatataactaaatagaaattaaatttaaaatagtgtatatataaatatatatgtt

SEQ ID NO: 214875 - DNA, 582 bp, Cannabis indica
ctcagagcatgccgtggcacctgagttgcaaacctagaaaccagccaccaagaacacgaattttcagcctcaaaaccataccaattccatccaaagctcaatcaaacacttaattcaattccataacgtaacaagcttaatatagggcataaaaaatacatacaacatgcattaaaactcacactttaccctaaaaattacagattgcaaaaacaatctcaaaatacatacttaaactcacaaatctcaagctatttaaacttgagcttaatttcaacttatccaaatatttttcctagaaacaatcatcatcaaacagttgaattcaaacaattgaattcaagttaaggaagaaaccctagaattccatctagagcttaaacaacccacacaccattcaagcaaaattcacttaaattagcaaaagaaccacacctcatgcaacctatacttatcatcttcatcaacaccaaaatcatgcattactaactatcaaaaaatttagtagatacaactagattcacaattgaaaggattacctcaaatctcaagctaggattgagcacaaatacaccaagaaat

SEQ ID NO: 214876 - DNA, 798 bp, Cannabis indica
atctaatagaataaaatataaataaataattttttattttatttatttatttcgttacattcttaatattaaaatattgtcattccaatataaaaatttattttttactatttcggtagaatgattatattctatttaaaatagaagaaaaattatttcacaaaaaaaattaataattttttattctttattttattacattcctatttttatgattttttccttccaacctaataataatgtctaatataataattttgagatagcgtcttaattatataaatagtacttagtggtttttttcttataaaattgtgaaattaaattatttgaaacccaattttaaaattacactagcaatccaaatagtgttagagactggtgcacttttttttttcctttttttttttttaaagaaattaaagagacttgtgcactttaattatgggttctttattgatattataaggggtggagtttaccaagttatataaatataagtcgatcgggtacatgtcctaattttaagtatagacatatatacatcatttgaaggccattgaatgaatgtaatagtcatggagacagattcctggtaccatacactctctttttctcttcaaacatctcaagagttgcttattatttagggccatacccacatgcccaaaggcccatcatataatttggactttccttttgttttcaatatataaaactgttctttatttaactcatgtctcatgtcagatatctttaattcagtgcacggatacagtacatatatatttatataca

SEQ ID NO: 214877 - DNA, 1008 bp, Cannabis indica
tgttcttaatggtgttactaactgcattttcacttcttaggtctctttacttgatgcccctttcactgaggataaattagggaggctttatttcatctttttagggacaaggcaccaggtttggatggtcttaatgctttcttttatcaggaaaaactggactactctcgggtcaaatttttgtaaggctattttggttgtcctcaacaataactcgaacatctctcttattaatgatacggttattgtttttattccaaagaagaaaaaaaatgcttccaggattagggatttcagacctattagcctttgttctacccttacaaggtggttgctaaggttttggctaatagaataagcttttcttaattctgtcatttctagaaaccaaagtgctttcctatctaatgggttgattttttataatattttcattgttagtaccattaattataagaagaaaggcaagctgggctgggcttttctgaaacttgacatggagaaggcttttaacagagttgagtgaagctttgttgaggccattctcaagtatgttggctttcctcctaggtttatcactcttgtgattagatgtatttcctcagtctctcttaagcttttggttaatggttgtctatctaaaagttttaactctaccagagggattaggcaaggggatcccttatccccttatttgttttttatggtggctgatagggactttctgctgccatccgtgttaaggaattgattagatagttttctggtattgctatctgtagaaatgcctcagttatctctcatttaccttttgctaatgacagtatttgtttccccgattaatgagacatctagcttagcaatcaaaagtattttagctacttataatcgtgctacggggcagtcggtaattttgctaaatctctattctgttttcccttaaatactaaatcttgtggctaagatagctttgtaacacccgggcgtagaaatgaggttgtagcaata

SEQ ID NO: 214878 - DNA, 699 bp, Cannabis indica
atttgcattttagtctagtatattattttatgtatttcttttcaagtaagcttagtttttgaagtaagaaattatagtaaaattcgaaaaacaatatggatttgggttcaaatatattattattattattattattattattattatgtatttaatagatacatatatatttcaatatatatttataatatgattaatttttcatcaattacatatataatacaatttaatttgaaatcatgtaacttgtttttacatatgaaaaacgattttgttggataaagtaaaaaagaaaaaaaataagaaatctgataataataataataataataataacaataataataataataataataataataataataataataataataataataataatctgccaaacaaaaataataacaaaatcaataagaaagtgtttttcacttgaatcaaatttaaaaatttcatagctaggtcccactgcactaatatgtcattgagaaaagctcctcatttattaagcaaataataatatatattaatacttatactgttaacgttactgttaacggaaagatagatgttaaaatggtgatataattcattaatgatttggactatttaattgggtggacacaaaatggacaggaatcctagacagaggatccgcttataaaaaaaatgcaattctaacaaagagag

SEQ ID NO: 214879 - DNA, 1051 bp, Cannabis indica
tttttctaatccaaaattgaacagtagatatctaactttgttcagttgggttgcttcatcctttcaccaataccatttttcttcgggatcttcactacggtcctatgtctagtgatctcatattcttaacatagcttatcaaattcagatttgtaaaactctaacccattttccgtcctaaggttcttaacttttagattggtttagttttccacctgagttttccaaattctaaactattctaggcattcattgttggttgctagcaaataggtccaaagacatctgctataaccatcatctatagaaagaaaatattacttatcggagtgagtaggaactttgtatggcccccaaagatcaccatgaacatattccagtttcttcttagttgtatgccatgctggtgtgaatttcaacttatgttatctccctgaaacacaagcttcacaaaatggcaaggcaaaagaatttaaatttttaattattccttgtttgtatagttttctgaggccttattcactgatatgcccaagtttgtgatgccacaattgcatatatgattctttccctttcaccaaactagcatgtggtgtctctatgaacttcaataccaagaaaaaagtaaagtgagcccaagtccttgagagcaaaactcttgttcagtttggcaatgaattcttccaatttttttttttttttagaaaatcaaaaaagtttattaagctcaccaaaaacacttacaagataaagttacttacaaagcttttgttaaagcttccacccactctctatctatttactcaaattcttagctttcaaagagttcactctagcacaaacactattagcaatacaattaaaagtaaccttaacagtagggttttttcttcccaaagaatcttgtttctagcatgccaaatagatatattgttgctgtaatgacactcaaaagaacctttcttttgtcctctaaatacgtttgccttccgaaatccctttaacggtcaatcatggagctatttttctggctgtaaatccgaatccaaag

SEQ ID NO: 214880 - DNA, 1230 bp, Cannabis indica
attttttaactacacaaaatgtatataatataattatttattgtgagcaatgcaatcacattattaatacatgagcagataaacacacatatattttttatatatataaataatcactaaacataacatttattctaattaccaaaactcttattatatgattatgtcttaatagctactaagtataatatgaacacctaaattactcacacattaacacataaataatataagacaaacacacacaaattttatttagtgatatattttaaataatagaatagaaaagttattaaaactactctttgctcaaagataattgttagagaatgagtcaataattgaatgcggcccactctctctgatatgataataataataaagaaattgaattaatggtgcacactctctttgagaagagaaatgtgagaggagtgtgcaccacacgttttcgtgcaccctttggatctccacttgttttttttttctttgtttttgttttgggctggatatccactactacactacttgttcacttgtttctttcaactttcacaactttcactatcctttcttcctcttaattcttaaattcggtcctttccttttcacaaacatacgcatcataaacatttcattttatccacttcactattaggctacgtatataccacattaattaatatgatcaatgaataggaacaacaggattgatgaaagtcaattgacaatatattcacctttttcaaatctaatatgatattagtaagaaaaacatataataaacaaataaaaaaggattactttttaattgtctatacattaatttatgcaagttcaaataatcattaatgtaatatttatatattcaaatggaatatgtttatttaattaccttttgttttttttttttggaaatatacatttggtattttgtatttttaataatatttatttagtatttaatatttttatattttaaaattatacatatttagtatcttaaagttactttaagatttaattaatataaatttatcaatttaatcaaaagaccctacaatttttttttttacttttaatcataataaaatttataactaaaagtgaaaaaattgtgactaatcataaatcaattttcctacatttgtgactaaaaaatttgtagctaaatagatattagttacaaaaatgacaatttattgtcactaaatatgtttttaatcacaa

SEQ ID NO: 214881 - DNA, 904 bp, Cannabis indica
ataaatctcactaaaagatgcctgaagctgattggtgaaagcacaacgagtgtgctttcctatagcgagatgggcacctcgctattagttgcttgggtttacccaactgttatacttagtttgtatactatatattatacgttaagtgtcttcacagtcattatacctcgcttacgtctactcatgcgtaacgaggttgatgtctcgccttgtgcatccaatgctgtatggtttctcgttaatgcatgaggcaatagtttgtatatctttatctcgcataagatcttatagtcagcaagctgtaaatatactctgtcacgtccgcatttaatgagttattctattataattaccgttacacatattgatccatattcttcctactttgacacgtgtcttccattaaaatagtaaccgaatttttggtataacaaatatttagaaattattttaaaattaaaaaagttaattaaaaaattatttaaatatataagaaatcgtggagtttgattacatatcacgtaatataattgcggttaatatttgaatatctcacagctgtaacaagcccgcttttactgggtcaaagtaaacgtgtattaaacacgttataaatcataatattctgggatgtctcgataggaactcagtaccaatgaccttgaaagcgaggtggagcttttccatatctttccgaggttgataatataaatctcgtcgcttctactttgaagacataatgctccatctgtcaattgcagttctcggtgacgaggtaaacttcaacagcgaataccatttgaatgttagcttctatctgagagaactgactcgtaaagactataaatctcactaaaagatgcctaaagctgattggtgagagcacaacgagtgtgctttccta

SEQ ID NO: 214882 - DNA, 544 bp, Cannabis indica
atatatatacatattctaatttgatctctagatgtagatataggataagtttatactgtatttcataatagtgtatgttatagcttttctcatcatctataattttttagaaaattaattaatgtcaaaaataaaatttacatatatatatgcataataagtcattgtttatattttattttcagttactgtaaaccatttaaatttttttaaaaattcacgaatagtcttaaatagctacaacatatgcaatcataagaaaaaattaaattaaaaaattctccttaatgtcgaaacaaataataaatttacgaaaacaaccctatattatatattaaaagaaacatataatttggcattaataaataaatattgtaagaattgagtctaaaaatttaaaggtcaattaatcaataaaacaaagtataaatagcaagaaattaggatagtcatataactcatcagctcgtgcgttagatgtaaaaattttaagtccacgcgcaaacacataataattaatatagattaattaaacaattaaccc

SEQ ID NO: 214883 - DNA, 538 bp, Cannabis indica
acactgctttagaaactagagggacaacaatatccctttgttcttgataaaacaaggcactcattccatatggatcagggcttttatccacaggcatactaaaactgctcgttcaacttcttctaatgtaaaggtcttcgtcaatgtttcattcatgtcatttgtaaccacttcctcaacagcttgtaacaactcctcaatgctttcatttgtaggcataatcgactaaagagtgtagaatagtaattttttatgatatcacctatggcatcgttactcgtacaccatatatgatcttcattaaataaacctaaaatgcacaaccaaaataatcttaatcatttgaattataaaatacttatggcctaacaattcatattcctttatacgtcatttcctctatacatactttacctcattgatgtaacttgtatccatcaaacctatctatttaagttaattcataacaccttttgaacataacctatatttaaaagcatgttagcatagttattagtacataaccttaaccttaatg

SEQ ID NO: 214884 - DNA, 550 bp, Cannabis indica
gtgaggttatccagcaaaaaggaagttcaaggatgacttcttttggacctctggtcttttcccaatcaacacaaccaagtttcaaattatacgtaagttcaaaacccttatcaaattcttggttttgaaatttttcctttttttatactttactaaatgtaagctaaactaattttctctgctattatctactaataagtaaagtttagaaataaaataaaataataactaacaaaaatttatagaaaaaaagaagattaacaatacaaaaaatattaatatcacatatacacatgctcgtatagtcttttacattattatatatctaataataaataaataaataaataagaagaaaaattaaaaaaaaagtaaataaaattcattaaaaagattaaatatattcaattttgcatcaaattattatttttataattgtaataaaaatattaaattttgcatcaagttttgtaattgtgcattggagcataatattaaaaaattgatgcaattatataacgaagtctttttttttttaccaaatatagta

SEQ ID NO: 214885 - DNA, 778 bp, Cannabis indica
aaaagaaattgtatgatatatttgtgtataagtttatttgagttacaaaattaatttgggagtaaattatattagctatatataattattatatttttacagatttaatagattaagatttttttttttgtttggagggctatatgctcctactcatcgagtggctttctcactgtgcatggtagttatttttttagctaattacatctgattaaaatcgaataaaaaaaaaaaaaactataaacaacataattgaatttagtatttcgatgaatatatttttgagaaattttcaaaaatactatttttttttattttatggcttaaaatttttaattacaaaaatgcgcttataaagttttaaattacaaaaatacactttgttcagtaaaaaacaaaaaaaaaaaataacgaaaaattaatctcacgacaactataaatcaactaaaaagaacatcatgacaactataaaacaaataaaaaatagtatattatttttgctgaagagatatttttgtaaataaaaaagttcaaacagtaaaaatgaaattttttcggtgttgatatatttttaaatttttttgatttattatgtaaattttatttattttaattttgtagtggatacttcatgattggaatgatgaggattgtgtgaaaatattgaagaagtgttatgaagctattccaagcaatggaaaggttattgttgttgatatggttgttccaataatggcagagactactcataaagctaagagtatttttcagttagatt

SEQ ID NO: 214886 - DNA, 746 bp, Cannabis indica
aaaaaaaacagaatttcgggattatttacatttcaggtattttattttagaattaaggtatattttaattttaataatgtgacaatgtattattctaaatgagatttattaaggtatttttgtaattattttacattttacatatatttttgaaaattttcatttttaaatggctccttaataaaaaatgattatgataatatacagatgttcttacaatgataacgagtagttcatcaatttttatttcttgttgtatacattcttcgttcatctcttctatatctaaatcattatttattttgttataaaataaacatgtaaatatataactcaaatatttttaaagtaaaacaaattatattgttaaagaaataaactaaaccaagttaggttaaaaaataaaataaacaaaccacaatgtttaacaaagtaaaaagaaaaaaaaatctaattttaaagttgaactcatattcttttaaccacttaatttgatatttagcctccttcaaccacttaataagaataagcccaaaatattgtgatttttatttaggttatagattatatgtttaaatatttgaaaaaaaatatattgtattaattaaataatcttacatagacgggatgcttaatcaagttgcacatggtttagttaagcaagctttacagttggataacaattgtatatggttagaagagatccctttttactattttttctgttgttgtaaatgattgtcttt

SEQ ID NO: 214887 - DNA, 694 bp, Cannabis indica
gtagagataaaagagaatgaaatttttgctggagataaaagagaatgaaattgattacagcttttcaaaataatccaaacaaaacaaaccaccgtattttgaataataaaataccagatgttatttttgtaattaaattgagattctcgtctcctcccctaaatttctcttaaaaaaattcttaaaattttcagaaaaaaaaaaaaaaaaaaagaaaaaaacaattgtctggactctcgccctaaattattctcttctctttctcttcattcagcctcccagccatccgagcctccctcgaatcccaccttctccgtcgcaggcgatcctcccgaagtcttctcagtctcagacctccgtcgctcaaggtgtttttgatttcttaaattctgaatacgttctttctaaatctctgtgtatattttatctatgtagaattcaccatttctttctcttggtcaccgatctggtatttgattatttataaaaaaaagaaattaatagtaattttaattttagattcgatttataaatgtttttatatggatatgcagagaggtatacatacaaaattatctgagggaaattaaattgataaaaattcgattttgagtaaattgttgctccacttggtaggggttcgagctgattatgattaaagcttatgtattaaatctgtgtaaatgctagtttt

SEQ ID NO: 214888 - DNA, 895 bp, Cannabis indica
aaataaatttttcatatttttattagacatatactgttttgaatttttttaaatattttacaattattaaaaatagagtttaaagatttaagtatgctattaactatttaaactttatttttgtatgcttactacaatatatatataattatataagaaaatttaaattataatttctttaatctataatataatttttctatataaatacacaataatgattcagacacactcaaattatataatttcaatgagctaggagcgttgtttgaagatgttatagttttattgtctaaatttccggtggcagttttgtcccatgtggctcgctctgtgaatttagcgacccgcaaaacatactttacggttagacgatgagctatcatggttcgaggaagttttaacgccggtggcggatgtctgcgtcgtaaattcatgagtgattttaatcattttgttaaaaaaaaaattatatatacttttgaacacttagacataataatgtgtaattaatttttactatataattaaaagtgatatagtctttacttaaaaatataaattgttaatatttaatatataataataagtgtgcgatttgagtgagcattgctatggggcaccagttgtatccaatactttttataggtaacatctcacgattggttagtaatattctctaaaaactattttcttaaattatataagaatatgatacttaattacactactaataatatgacatcgagaagagtgttacacatcagtagagaccttttgtaaattaaaggtaaatgtcatctcctctaattgggcatatattctgtaattgattgcataatatgaatcaatatctgacaataaatgataaatattatgagcttaattaattgct

SEQ ID NO: 214889 - DNA, 577 bp, Cannabis indica
acaactgcgacatcccaatttgtaggacttactacatgtgtcgtccaaaagtttcaccttgcaaaattggccagtgtataaacaaactgttgggcaaaaaggagctacagtacgcgcactactaaggtctgacatagggaacaagatctaatttgcaaccgtcaggtttagcttcagattaggcattatggagttccaagaagatctggctaaggccttcctagatcaactaattcgccaccatcctgaagcgtgtgaaacttttgtttacttccagtagcaacaagataagatgagaattctcgaagtcctttctacatttactggtgaggagagcctccgggtagtacaacatcttctgtaaccctagtaaggggaacacataatataacaatatgcaatctgaagtggcacccttatatgattgccacgtacaagtcatctaggaacatggataacatttacccccaagctctcgagcttacaacttctcccggaggcccatctcatgtctctctctatactatatactcactcgaactctctctctaacactctctaatctcagttcattctt

SEQ ID NO: 214890 - DNA, 562 bp, Cannabis indica
tcatgctcctgaactgccccgaatacaacttcgttggttttttcctcattttgctcgtagtaagtatgtggcacagatgagtggtacatgttatgatgctgctgctgctgatgatgctgatgctgctgctgttgctgctgttgtttctgctgctgaaggtcatcgtcccaaccattgtaaaaggctcggctctgacgcaattgttgcaacttttcagcatccttggacatgaaagcatatgtttttcgaggtgttggggttcttgtttcaatggaaggaggctcatcctcatccggtatattgaaactttcttgcacaggccaagtattcaaatgcttttgctgttgtagattttgatattgatagtccaaaggtggttttcttcgaaagccaggaaagactgcacccaaaatttccatcccagctgttccagtgtttaccaatagctttccaatcgatccaaagaacccctcttcttgtttctccggctcgtcttctgttgggattaaaggtggcctgactgattttggaggcttctgatatgcacttgctgtaaagctcg

SEQ ID NO: 214891 - DNA, 524 bp, Cannabis indica
ttagatgaaaaatcttattatatggtttgtatgcatgatatatatgaagagaaagtttagagacatggtaattccaattgaaaaaatataagagcaacaaaatataaataatgttgataatgcatgtatgattgaaaaaaaagtgaagaatgtaacaccctaactaccttaggcgtattacgtgatttttaaacgtactgtgcagctcgttgctaatcaacgaggtttatggaaaaacgtgattattaaaattttgctttttaattaacttataaaaccatattacaaaagactcgggatcccgatttataaaatcatttacaaaagttttaactgtttaactgttacatcaaaataaagtcgtctaacgaccagttacaaaaactcagccttgctgtcccgaggatcgtacgctccaggcctaaccgccccgacatgtacaatctcataagctcgctcacggtccatcagctatagccttgcctttacctacacatgaacataaactgtgagtcgacagactc

SEQ ID NO: 214892 - DNA, 517 bp, Cannabis indica
agggcggagaagaatcaagatttaggaaaaacttttctttcccgctctgataccatgttgtagattagaaatgaaaacaggagaaacattttattgagtagtcgaataaataaattacagagtaaaaccaaccatatataggttgtgacccaaaactaactaaaccgacttaattaattaattagttaataacaagaataaaaacgagacaaaacaaacatcatcataactaagtaactcctgagagtaaggacaaacaatgaccaaaataacagaaccaattcttgtaacaatatgaaattatattaaaaaaataaattatacatgattcaaaaataattatgaaaataaaaataaaatgagtattataatttatcaaaataatattaaaaaattaaaaaataattaaaagtgatttttaaattattttaactttacttttttgttaatattgagatgcacatatgtgtagagggcaaataaaactcaaaaaaaaaaaactaaaaaaaataaatac

SEQ ID NO: 214893 - DNA, 478 bp, Cannabis indica
tattggatatcatataatttaatgtaatgatgtttaagagatatttctaactaatcacaaaataacatttataaaatgtacaaaatatcattagtgtctaataacaatattgttttaagtattattagtgtctggtagcattgctaattttttagcactagtgatgcttacagtatcatttttaggtgatgggttgtaaatagttatcgatattttataataattgttatattaaattatataaaattcaatatttaattacactaataataatataactcattaaatagtactaaaactactgttactttttaagtattccccatatatagtatatggaagccgaagacccgttgtagatcatgccttcttctacccaattaatatcaaactaaggaaaaataatatatacttagtttcactcaagcttcatcctagcttcatcctggtcatggatagatcacctaagttcgggtcc

SEQ ID NO: 214894 - DNA, 643 bp, Cannabis indica
gcaagaaagcaaagacacaacaaaaataagagcaatattgaatacaaagatacatttacaatcaaaaaattactatattagattttgtatgttccaaaaatcatttcaatatttgtttaacatgaactatatcttcaaacagaattggttatgaataaaaatgaaaattttcataacatagaattgccttataaaaaaaaattaaaccaaaaaagaaaccggttatattcaacatgcaccaaaaccaaagtaatcaaagaaaatgaaaccggttatatttaaacatataccaacatacatgttctataaaaaaagttctgtataatagatacaacacaaacaacttaataaacaaaaaaatataaggaccatatttactgaaaaaaaaaatcggttaattatacaaagaacatttggcaatctataaggaaacacgaaaaaaccggttaaaattaaagaaaaaactatacaaaaaaaaaacacaatgtaagaacaacacttcacaaggaaaatgtaaaaaccataaaaatatgtattacaaaaagaaaaaactgaaaaaactgaaagtatatataaacatataaaaactagttccatatattgttatataaacataaaattaaaatataaacataacataatg

SEQ ID NO: 214895 - DNA, 596 bp, Cannabis indica
gaacaagttagtggattttatataatattgttttgatgtgtttttcaattttgagggagaattatgttttcaaaataagaatagaaattaagtttttttttttcattttaaaaaatttaatggggtttaggtgtggttttcaaaattatttttagtatttttttaactaaaaaaaaacattcaatatcctacacaatatcatgacatgaacccatcatacctcagattgaatcctggacctacacccagacctagatccaaacctagaccctagaccccagcccgaactcaaacctagactcggaccctaatcctggacccaaacctggaccatgacctggaccagaacctagaccccaaacctacggggcgtaggtccgaggtcctagttcgaatctggggttggggtctgaatttggtatttagggtttcgggttcgaggtccggggtcgtgaggtctgcattcgggtccgcgtttgaattcgggattcgatttatttttcttaggttcgaggtccgagtctagggtccgattctaggcttgttggctgaggtccgggtgtgttgtccaatgttcggggttcagctccgggtct

SEQ ID NO: 214896 - DNA, 582 bp, Cannabis indica
ataatggccctaccaacacgagtacggagttggaactctagtgcatatggtacagtagtcgtactttcgttgagaacgttcttaatcatttggtaagctcagttgttgggctgaggacgacttaaacattaagtcggtataacactgcttatttacacgttatgcatattttactgtgtctattgactcatcagtttgttaccctgtgtaggtaaggaaaaagctaagctggaggagcagtgagttacagctttgtaaggattgtacatatcgcggcagtgcaacctggagggtttcggtcttatagaattttgaaccgccctgtattttgtaataaaaaaaatattgcgtaactttatatatttaaatgtattttgtaaatgtgttttatattcgggatcctgtcttataaactatatctgatttattataaaaaaatttatttttttttttataatttactatcttttctataaaaaaatgatctaattaaaaatcaaattttttttactaaaaaggaaactaacatattttctacgtgaagcaaagaaaatcaatgactataataataataataataat

SEQ ID NO: 214897 - DNA, 585 bp, Cannabis indica
aaaaatgagagagttatgaggttttaaaattttggtgcattggctatcgagcacctgctccctgcgtgcgcagcaattcagacaagttgatttccatgcaccttgtctgaagcccatgttttctatagcctccatattctgaataccaagactgcaagcagcctcctgcgcgcatggatgaggctgcacgcaaccttggaattcagagaaggtgcctttgcacccaaaaattcttttttcttttttttttttttttttttaatttttcaacctgtattttaaatttttttcctatttcaaatattaatattttaggtttgatcttaaccattgataaaataaaataatacaaaaataaaaaataactcattttaggttgatcataacaattgatgattatctaatgatgaaaacttagactcttcatgaaaattaatcaattttggatgtttgaatcttgtccgctgaataatttttctacttaagctctggaaaaaatagtcaactatcttgagcacgactttaggacatgaaatacttcaaaattgcaatattagatgtgagacacagcttgataaatcttgt

SEQ ID NO: 214898 - DNA, 589 bp, Cannabis indica
ttttattttctgggtatgtttgaaatgagggaggtattttgggtaagtgtaggaattaatagaattaatgatatagaaaagggaaatttgtggcataaatacctattttgttcattttgttgctaataagtacccaatttttaaaaattacggcattaatactcaaaatctcactttttagactctaccgttagtacccacttaacagggttaatataaggacacgtgtattgtcctcataatttctcttttttttcttcacctaattaatgaagaaaatacataaaactaattaaaataataataaaaaaacaaataaatatcgtttaaaacatatatgataaaaaaaaaacataaatcaataaatcacctagccacccacccacccacccactcactcctccaccatcacaccatcacatctgcggaaggaggagtgtccgacccacaaaagaattttcggaagaaaagactccgtgcggcgagaatacacctgtgtgcgtggactaatcgaccctcaacgattaatggcttcatatttttttgggtttttttgtttgaaaaatttatgtgagatgaggaagaagaa

SEQ ID NO: 214899 - DNA, 534 bp, Cannabis indica
cctccttaattggaaaagaaataaaattttaatttgagactacattcttgttaaaaaaaatgggtaactaggggtgaaacttttatattttatgtacgcatcaattaaattttacggttaaataccaattgggataggattgccactatgaatatatgtgtacatgtgactaaaacttcaaatctaatgaatatattgttgggatttttcaatataattttatttgttattaatagaagattaaatgtcatttatgtttacgtgtatttttcatgtttatggtttaatatacaatttctgttaaattcagagcatatagttattcacaattaccgtgatgtcaacacagtggatggtaattatgattatatgcttcaaaaaaaataatgtcacatgattcattagtgtactgaatttacactgatgtgatagtcagcgataaaacttacttacaccttggataagtgttatgttctttccaggacattgacaaagtatgctagaatggatgtattggactgggaccgatattga

SEQ ID NO: 214900 - DNA, 627 bp, Cannabis indica
gtatctatctaatcatccaacgaaaaataccgtaaaagcaatagtttaaataactgaatttagtcctctacaaaaaaaaaaaaaaaaaaaaaaaaactagaaatttagtaattaaaacaaatatgacttctaaagtgtgcaagtgctctcacttggcgaaaatgctgcttgtcacattatattagcaggggcacagtgtgcctctcctgaaatttgaccgttctaaacaatttgagagtcatgcttaaataaaatattttgagcttttataataaataataaataaataaatttcatgagaaaaacaacaatagtataaaaagataccaaagttgtcaaaaactaaattaaaaaaaaaaaaagaactttgtaatacaaaaacaagccgagaggttgatcttattttgtatattgcaacgaggtcgatgtcttattattttaatagttgctttgtaactgttctttttgttgtttttatgttgttatttatgtgttctatagtaattatttaatttatttttttttcctgttttactgatacacggttatttttgtaattttgaaattttaagataatatatttgaaaacttaagacaatacaaatagtaaaaataaaaaataaaaat

SEQ ID NO: 214901 - DNA, 633 bp, Cannabis indica
ttatgtaccatgaaaacatggagaaatcaaatccaggcccaaggagctaaaattacatgaacctgtaccccagaattcaacctaggcaccaagggcttcacccagcgcccaagttgacatcctcaactaaggtttcagtttacaggactgtcttaacgtaaatgggtcaaactttacattggaacacgaactagacataccacatacatatttgaggcatcataattggattcagagaaagtttatttttgagcacccggagcactcggtgccctaagtgcccaggttgataatttgtcaatctgggcgacttccaagtattagaccgatgattcgaattttgcatcttctttgtcttcattaaaaatagggaaacaactacttccaaggaagaaatagcacttcttgggtgccagaagcaaggccaatgcacaggttgacattttatcaacctcggccaattccaaggatgttttctgagaactctttaatgatattgtccattttcagcaaagattaagattcaactatatctagggaccaaacgaaacttccaaggggccaaaactgggacctagcgcccaagttgacacctaacactaggcccagtacacaggtttacatattgtcaac

SEQ ID NO: 214902 - DNA, 517 bp, Cannabis indica
cttattattgctttattatacatatatttttatgacatattgtttatcgcttataaaatagactcattgtcgtttgctaaaagcgaagtcaacaggaatcttagggcatagtgaaacttaatgttttttgacgagatctgtatcacccctgcacccaagccattttcattagatgctccatccacgtacatcttcaaattgtctatgtctcgttggataagtggactttcatctggaattatcccttctatcgagaaatttaccaaagcttggcccttgattgatgttcttgggtaataagttatgtcgaacatccctacttcaatagaccattttatcaatcttgcataagcgtctagttttgacaaaacttgtctcaggggttgatcagttaacacctttatcagatgtgcctggaagtaaggccttaattttcaagatgaggaattaggcatatggaaagtttttcaagaggggaatatctcgatttttgcgccagtaacctttactaacatag

SEQ ID NO: 214903 - DNA, 590 bp, Cannabis indica
attagccccaggagacttacttcgaaagagtgtaggttgctggtagacaatatgactcacagaattagaatatggagtaccagatacatctcttttgctggaagagcggttctagtcaactcggttctactcaccatacatacatattggagccagattatgttgcttccaaagaagattaccaaagacatagaaagtgtgtgcaaagctttcgtatggaaaggccaacaactaatggctggttcgggtcaagtggcttgggaaaacatatgtctgttggaattattttaccaggatcttagatctactcacaagtatgttgatttaacaacctaaatatgaacttctaaaacgatggaaaattaaacacataaaagtaagagaaatcttacattgggtgcagcggaatatatgtctcctcccactcagatctctaacccttgattcctttctgtcgcagagtataatcaagatctgagcccgaatgtccttctttgttgaatctgaattctacacagccttcctcactatgattgaggtattacttgatgtgtgtgggcactactctatcacttagagaatttcgaaaa

SEQ ID NO: 214904 - DNA, 792 bp, Cannabis indica
ttgtatgagaagtccaaagactgttagaatttgtgaataaaatgaatgaggtttcatcccaaaaccaattggcaatgggaggagtagcccattcctcttatatattctattatctttccacacattagcaatgtggggactctctaacatccccctcaagatggtagctatttcacatgctcaccatcttggacaactcgatccattaagaggcgctctcttttttggctcactatccctaatcacaagtgactctttttgttctactttttggatcggtacttttggatttttggtggctctttttatttttggctcacttatccccgaatcacaagtggtttttttttttctttttttttttttttttatttttttttttaacttggctcttggattcaattttttttttttagatttttggtggtctcttttttttttggctctacttcgtattcggtttattttttttttttggttggatagtcactagtagtattttttttttttgtttttgctttgattaccatgttagaatttgtgataaggtgaatgaggttctatctcaaaaccaattgacaatgggaggagttagcccgtttctcttataaattttattagaattatctctccaaagtgaggctctctaaaacaaatcaatttggtcaaaagaatcaccacactaaacgaaagactttaaggaagcttttcttaaagtctctattagacccactttttctcacaaggcaaaatctcatttttcttcaggttcaaattttctattgattgtta

SEQ ID NO: 214905 - DNA, 645 bp, Cannabis indica
atagctcttctgtgtctttctctcatcttagtcttctctttctcagtctcgctccttcctcctccactggccgccattacagctcctttcattggtattgttttctctcttggtataattgaagtgcagtgatcaggaatgtttttatatatcaagagtttgaaatgatcgtacggataggagaggtggatggttgatgggaatggagggttgagattggtgaagtgtatgagagttagagtggagatgagagtagaggattagatggtgtggtcttctttttgcatgacttgagagaaggtaggagtgagaatcgcatgttttctcttaggactcgtctttcacctttagaacttgactggctggctgactcagtggcttttatttatttatttatttttaaacatgatttattttataataaatggagccaaattcgttatattttgctaactcaattaaaattacacctgtacaattacaaattgttgtgcaagttaactatgtttctttttattctcccaaaaaaactatgattctttgttttatttaatatttctttttcaatttaaaaatttgatcactccatctctgtcatatttagacattccttttttttttttttccaaactcggaaaactcttc

SEQ ID NO: 214906 - DNA, 530 bp, Cannabis indica
gggaatagaacatttgtgaactcgtaattggaatggggattgcttccgccgacaaggacccgaccgtcgcggaggagaacggccgtggaatggtacatccgaggaatggttgttggtttctgagtttcgaatctggacccgatcttattctcgggtcggtaaataaccgggtttaaaaccgggtttctacccaactcccaagaagcagtacccgctccagctccgtttatgatcaaaacgttgccgtttggaagcaaagtcatgtctcccatacacctggctaaaggcatagtctccaagacccaatttggattcgggtcggtaattttaatccgggcacaagtattcaacgcttgaataaacttccctttacttgcttcagtaaaagatcctttcggggctccgccacacaccaaaacttcagcttcaacattcttggtttgaatattcttcaacggtaaaagcacggcggacccagtgctcgggtacgatctcgggtccccaccgggtatttgcgggtaagttttcac

SEQ ID NO: 214907 - DNA, 735 bp, Cannabis indica
cattgtcttgaatctccagttcccttttagcttccagatgcgactgagaatctctttcagtttagttctcgacactccatttccgtcgaaaaaactagctaaaactcctgtgcttactacttcagccgtaagctcaatacttggttccagatcaatggtcatagattgcaaaaagttgttacgcagggcttcaagctcctcattagacttttcagtgacaccattaggagtcggtatagcagttcctcctccagtttcagtagcattaacttccacattgttgttatggagaggatcaacagacccttccacaccatcaacttcattgacttcctcattaatatcttgaaagggttgttgaggaatgttaccgttgataaacccttcctccacattaataacattaacttctgcattggaatcttgtaacggttgttgggagacatcaatattcataatgtctgcaggatccccatgggaagattccgaatcacgtgaggcaacattaatgtctcccataatggcaccaaaatggccggcaacagaaagaatgatgagaaaaaagcaaggggatttgaagtaaggaataaaactgattaccaaaggaatataacttgaatgaacatagtatacaagaaggtttgggtatagaaaaccaaggtcaacacataggcagtagagcttcggagtgaactctggttaaagacatgttgtcaagttggacttccaacactc

SEQ ID NO: 214908 - DNA, 512 bp, Cannabis indica
aaaattaattatgttttgtatttgaatacttttttttttcttaaaaaaaattagatataatataataaatttattaacattatataatgaaaaactcctaaaaatacattaagatgtgaaaaaaacaaactttctatatattttagttatttagattcagatacgataccttattattcagatgtgcattcagattcagtggtttggatcttaataaaaacaaatgcaccctaaatcacccaaatcaattataccataaatattattgtattttcctttatttcattgatttagtttctcattattttagtcatatttttatataaataggtttaccccattaaaataaactacaaagaaaaatcccttttcttctctcactttattcttctctttgttttctctatatttaatattattttataacacgttatcgacatgagtctctgtcgacagtaaatatttttttttattaaagttcttaaattacttcaaagtcatgatacactaaa

SEQ ID NO: 214909 - DNA, 677 bp, Cannabis indica
gaatacacaatcttccatcctgggatagcttttccaacactattaattctctcagctgccttcaacacaacaccaaatgcctgtttgcaatgaaaaacagaaaaactaattaaggcctccaaaccagcagcaccaagaattttcttcaagctctttatttctgtgacattgtcagctgaatcgatttgcccattagttggtttatttctaaaagcatcaagtgaatcttttgtagtgtgctggcagtcgagaaacatcatgcccaaatcttcaagtctttggtatgcatctagatagttcttaagttgtcctggtcctacaacaagtattggttcatgaggtgtttctttcaataattcacgtctatgggcaagtattcttgccaagcctgcgtggtgatcagcatgcatgtgggaaatccagatgcacctcagacctctcaccacatcatcagctttgtctacaccatatctgtggcaccataacaactataagttagtacgtggtataaaagtgttattatactaatatgcatttggataacatgcttgggtttacctcgtttagctgtccaggtctcacacatctaaagcaaacccccttttgagaaaatattgatatggatagagctgacatttcgtatattttggatgggctgagatgatccagtcccccag

SEQ ID NO: 214910 - DNA, 768 bp, Cannabis indica
actaatgatgtcaaattaacagaaagccaagatcttaaggtatgtattgtatttatattatttgatttggacaaactactgaaagccacatggacaggctgaaagttgaaatgctttgtaaaaggtgcagaacttacttcaaggttggctggatccactcgcttaatagttagttgctcggaatcgggaatattgatctgttgtgctttagcatctgcgccttttcttaacaaaccatacttagccaaagtatcttttgcatccttcttcgcctaacaaattcagcaccaacaatcatttttaatttagtgacatcctggaagagagctacactgggccaaatggtataaaataaaataaaaggaaaaagcactatagttttcacgtttacccccatcactggagcaaagttatgcacattacttctcgcgtgaacatagccgcagaagaaaaaataattaaaaagggtactaaataaaataaacttacctttaattgcttgattcttttgtaagtcctcattagaaagaataccatcctctagttcaggtgatgtatttgctgttgttgctacagccaatctcttcaatgtccgaagacttgtatcagcagcaactagttgtctatcaaaatcagtcagttttctcttttttccttttagaatctttatgcccacttccaccatgttcggcactataatcatcatcattatcatcttgttccagttttctcttttttcctttagactcctgtccatttccaccgtgt

SEQ ID NO: 214911 - DNA, 690 bp, Cannabis indica
aagtgatatcaaatctgtgataagagcaatgtgacctgcacgaccacaaagttgacagattggtctatttccacgaccacctctgttgttgttgttgttgttgttgttgttgttgttgttgttgttgttgttgttgttgttgttgttgttataggatctaccacctctgtgtgagccacgaaatccacggtttgagggaagtcctatggtgttagccaaattggcttgaacattatgaagagaatcggttgtttgctgctgaatcctcatttcttgactctgtaacatgagctgaacttcttggagagtgagaggttcagttcttgaagttaaattgatgacaactgcttcatattccgttccaagtccaccaagaatgtaaagtactaaatcttcatcatgaataggctgaccaacagtagcaagttgatcagcatgttgcttcattttgagaatgtattcttcaatggaaagggagcctttcttggtggtttggagtaaattgcgaagttgcagtaggcgagctcgaaatcttgtggcaaagagttgggcgaatgtagtccagatctcatgagaggactgacaattgattacatggcccaacatatgttcaaaaacagagttcatgagccagtgcattagaaattggtcaagtctaatctagttgtgaaaggctgggtttggagtatt

SEQ ID NO: 214912 - DNA, 582 bp, Cannabis indica
agagttttttagttaatttttttgttgctgtagctatttaagattaattgtaaattttttcagaaaactctaatagtttatagtgctgaaaatacagtttgtgcataaaaaaaatagtcatgcatacaataaattatataaatcttatttttgacactttaaactatttaaaatttttaaaaaatttacaagtaatttttagtagctcgtatgcatgaaaaaataataaactaattaaaaagctctctgattgatactaaaactgataaaaagtaaatactccttgaagagatacaccgtagacttaccgtatactatacataaacatccaactacaaaataataaaatatgcatatggtgacaaaaaaaaaaagatgcatggaagtttagagagaaaagatatatagtagtgcagattaaggtagctatacataaccacatataataaggtaggaccatgcatgtggcccccttgtgagaagggcgcgccatgcataataataagtctttagacataattgatccatgtggtccattttttgagctaagggaaagcttatactctctctctctctctcctt

SEQ ID NO: 214913 - DNA, 702 bp, Cannabis indica
ataagcgagactaccgggttagactggtggctattggcgagttcagctgttatgcaccagtacgacttactcgcaaagcatctgagggggccagtggtgtggccagtacgagtggctcaacaggaataggcgcttggagcctcgaacacattagggttggagccaatatccccctatgagactatttcaaggacttcctaaaccatctcgggcttgccccattccaattgaatcccatttcatacagaatcctcgcaagttagaaggttctatacaaaattttgaattgggagtgccccctccccaagaaatagagtatctttactctgtcaaggttgttcctgcgaggaagaatgcagcagggggtttttactaccttgggattcacataggtgatcgtaagatcattgtggatttaccaaataaaactccctttaaagacgaattcttcaggatgactggtctttccccaatcgacacaaccaccttttgcataatacgtaagtaatttttatgtatgacttggtgaaattattccgtgtcttttttctctgcttttgttgatcttaattttgcctttgttttttatagaccagttctgactcctgagatggccgagcgacgcaggctcctactaggtcttcaatttggtcttctatcatctaagtttgttttgaatgaggtcaacttgaggtctgtgga

SEQ ID NO: 214914 - DNA, 886 bp, Cannabis indica
atagggctatatttttttgtgtaaaactgggaaatccaagaagaaaatagacctgaaatttgcatagtcgtgaactttaggaagaatgtttgaataatcgcacctttcctatctgtttatttcttgaatacacgcgggtattcagatgaacactttgaatactcgcatgcctgctttccttaggtttcacagagactttatcacttctagtccttgtttagaacctaggattttatattctctatatattttgtcgtggggacattggttaagtcttttgaatggtgggtgtatcgcaatattccaatgctcatacgtgcgatcgtatgttccttgaggtactgcgatacacccaaccatttccgacatacgccagtgttccaatataagcgtatcctttggctaccagatttgctcgaaacagtgggtgtttccaagtaacttcagggtcatgctcaaaaatgcatgctccttgggtcactgggaaaccctcagccgtttttgaggtacatcgctagctggagatgcgtgacacattcgcatgttgtgattggttaggttcctcgaaacgatgggtgtttcctagtcacttcagggtcatgctcgaaaacgcatgtcacttaggttactggcatacacccaatcatttttttgagatatccttctattcgcacaccagacatttcacgtcttggtgggctgctggttttcgcaagaattcaaatcagccttctaagacgattttacattttatatgcgggtgaggtcactaactttgttttcgcacattcaccatgctgaaaagatcttctatcttttagatgagcgatctatcggatagccaaatgtttggctcaggaggtaacgcgttcgatggcgatcagga

SEQ ID NO: 214915 - DNA, 723 bp, Cannabis indica
agcacgtttgactaagtttgttcttgagaatatcactgtggagttagcttccaaacacgaacacaggcgtcctcgccagagctcatgacatggtggtcatcggtgaaaactaatccataaacaccgcccaagtgagcgccttttatggttgaacggcttgctggcggcttgttcacttcataaatgatgacacaagtgtcgagtgatccggtagcaaccatgctactgtctggagaccaagcaagacaatttatacgcgcggtgtggtataccatgttctttaattttatctgcaaaaattgtgtaaagaaaagcattaggtttcagaattctactatttgttcagacaacgaatatgtgtttggtgcagttaatatatatatatagatataaattagactaatttgaatttttgtctctcaaactttgacatgtaccaaattatgttccctgaactttttaggcctttaaaaattctttcccgaactattgagattgttaaatttaaagacttttatctaattttactaacaaaagtctaacgtgaatgaaaatataaggagcatgatttagtacatgttaacggcctgaaaaaatatcaataccgcaaatatgcatcatgtaaaagtaaaagtacatgtcaatagatagaaaagacaaggaaacacgttttccatctagagaaaacagaaacaatttgattacctcacgagaggaacgatc

SEQ ID NO: 214916 - DNA, 1523 bp, Cannabis indica
aaaaatgttttggggtttattaaataattaattgaatttgttaagtctaactaatagatactataaatggaaattttattaaataaatagttttgacatttataggattgaaattgaaatatatgatattattgaaagaaggataaatggttgaaataaagtggcaaaattgtaactagtgaggcccattagtagccggccacttagtgtgtatttttgcccattatttaattcttttttaatccatttaattaaatcctaaatcctagttgaaatactataaaggaatatgatgctctcatctcatccaacaactcacttcaaccaaagtaaacctacttttcattctctgacaactagtagatgagagactccttttatagtgattttggccctcattcattgttcttcatactcgagccatagtgatagagtaccatgtccacacatatcaggtcatgtactcaatcatagtgcagaagacggtggtaaccaactcgaaggagagaaagagatctaggcacagatcttgttgttactctaagatagattcgaataagggttagatatctaagcggaatgagtcatattattctgctgccatcaatgtaaggttttctaaactcttacccgtttaatttcatcgtattagagaattcatatttaggatgttaattaatcatgcatgttagtaaatctagatccttgtaaaacaaatcccaacatggatgtctttagattaattaggtggtgctgacattggttgttgttgttgttgttgttgttattattattgttgttgttgttattgttgtcgttgttgtggctgtgttaacaatggcagagtttattgttggtttaattgtttttggagttttggctgtgaaaattgtgttaatgatggtattgtaatctgtagagttggttgcgaaggagtagtggatccacaaaggtcttcatctcccctagagaacgttgcctatcagaagcaaaccttgccttcttggcctccctctctgattggggagaaaggttccagcacttaattgtcacaagaacacccttcttggggaagactggcccatccaagctttcatccaagacaatagtggtctctacattgtcttgggttgctccttctgctaccaaggcaagcgaagcttccatcagcgcttggtgctccatttggcgtacttgagttttgccactcctggacacaactagttctcgagaaacctccccaacttgcgactaaggctttttcggttctaatgggagcctgataacttggaacctttgggggagccttcatcaaaggaggaatttcctaaaccctcgaagatgaagaagtggagctaggaagccttggtttacgagtcctagtggccctagctgtggccttcccttttgctttaacaccctccatcttggaacctatgtttgcaatcttatcacacaaggatttcaccatcttcaactatagagtatctttcaaacataacaatcacactattagcagaaac

SEQ ID NO: 214917 - DNA, 469 bp, Cannabis indica
ataatattaatatattattttgaaatattttttaattcatttttatgttaattattgaattttaggacaatataacatttattattttagtcaaacctaaattaatttgacttaactaccataatcataaattgcaacaagtatcttttttttcttttctttcttttcatttttttttttttttgaaatgggagtatcctttttttttttttgaaatagtcaacaagtatccttaagggttaaagttttacttcaaataatatttcacataaagtaagtatcgcaaaataataatttcacttattattgggaaatttttaaaaatatcattttttttatattttatttacaattttacggtttaaaatttttgtttataaaaatatccttgtaaagttttactattgcaataatacactttactgaacaaaaagtaaaaaaaaaaaaaaaacaacgataaatcaatctc

SEQ ID NO: 214918 - DNA, 1117 bp, Cannabis indica
ccactattttagtaaaatgactactttattttgaaatggaaagaaagtctatttcattacatgatgataaaaaatttaataatttttttattccatttatattcatattctcattcttatgtttttcatttattccaatcaaacatcacttaatagctgaagatataaataaaaaaaataataacaatgtataaagaaactttaaaagttgcaatatttatgataaaattatgtaccaaatatttttaagaaaatgttatatatcatgaaaatttatcataacaattcatcataaatgacatggcatgctataaatttttattatatatacttatgtttactttttcggattattttttataataaatatattgtcacatcatttaaaatgctaattcatgaaaattcatcaatccatgtattgcttatatttttaatacaattcaagtaatttttagcatgtaccaaatatttttaacactcttttggtttattgcagcaaattttttttaatttttttattataaagtcgaagtgatatgttaggcataaagtgagttataaatttaacaatatatcattattttttttttgaagggacaatatatcattaatttagatgctcttattagccacttgttaaatcattataattgacacaacaatatggccactaatgaaagctattataagtatgtataaaaatagtaccatctcctcaaaaacttccaaattatgtgccaatccattcaaacaaaaccccacactcccatattaaccctttatattgaaaaaataaatcaacaacaaacttttcatcaatatcaaaacaacacaagaaagaaaaactaacaaagccctcccccacaaaaataaaataaaatggagaactacatgaacacttactttatgctcttcttaggtcacaattctaatctcaaatccgccacaacccaccagagcagccggcgagagccttatcccgacggcgtgccagaatgtagagaaaaaaggttttctgcaatgcaatgcttgaatccgatcccaactccaacaacgccgacttacccggcttagggcttatagctctcaagcaagccgcgtcaaacgcctctga

SEQ ID NO: 214919 - DNA, 803 bp, Cannabis indica
aacaacagcgatatagacgattcaatgagtggtaccacggcgattaccgtgctcgtcgtaggtgacacccttttcgtggccaatgtgggtgattcgagagctgttattgctgttaaagacgggaatcaaattgttgccgaggacctgtctcgtgaccagactccatttaggagagacgagtatgaaagagtgaagctctgtggagcgagggttctgagtgttgaccaagtggaagggcttaaggatcctgatattcagagttggggcaatgaagagagcgaaggtggtgatcctcctaggctttgggttcagaatggaatgtatcccgggactgcatttacaaggagtgtgggagatagtacggcagagagaattggtgttgtagctgatccagaggtgtcaaaaggttcagctaaacaccaaatcatctcttctttattgttgcaagtgatggagtattcgagttcctttcaagtcaagctgttgtaaacatggtatatgccaaattccctactttgtttaaatccattataatctgtgatcacccaattggttttcctgttcaattaaagatcacccttcttagacacccacatagcattgctatagttttctctggtccccaaactattgcagggtcaggcagagaactagtttcaaaacaagtaaagatcataacaagatacacattcacatacatgtatagtagcatctagatcttaaggatagatgttactgctctaggaagcttcttatcagtcgtactttaatttgtaattgccatttgaatgtggggttatact

SEQ ID NO: 214920 - DNA, 512 bp, Cannabis indica
gaagaaatttttttcaagtattacttatttatctaaatctaactacatttgattctaagaaagtgtaacattcaattgcattgtgtctcattagttaatttatacactaattttacataacttgttcaatttctcaatggtaacctgattttgtgatgtaactcattattcttatcttttttgggttaaagtgagattagctagtgcatctgagatctatgcaagagagttcaattggagtgaattttaaaggaccaatacgaaataagacatttttataataattatatacaaaaaggtatttttataaatttgtgattttgattgaggaggcaccatttggagtagaaattaatgagagaattcctataatatatattaatttgtcgtttatgtattaaatacagagcattttgtttgatcaatttgtgatccaagcgggaacagaccactcaggagtggcaactgaattagtgtccatgaattcgacagtgaagctcacatttcgtaac

SEQ ID NO: 214921 - DNA, 694 bp, Cannabis indica
actagatcagatgctcggatcatatactaaatacctaacctaatttattcagtattggatctgtatttgtattcgtaccgttagttttttttttttttttaaaaaaaaaaaaattagttttatatctaaatttataattttatgttagtattattaatataatactatatttaatattaacatatattaataaattgtgtaaaaataatatattttcaatatattcaattttccataaatataaatataaatatatatatatatatatatatatctgcaaaaaatgtcagtcttgattttattacttttctctttctttccacataattcttgttcaggtaattattgtggtacgttttaagctacaataatattaaacaccatatatattacatgaattttgttgaatcattaataatttagtatttatattaatattataaataatttgttactttttttgtaatattattataatttgttattaattacattataaataattaattttatatcttgttaatttcagccagtagtacgttcaagatgagtgacccctgacccaccaaactttggccttactgaaacaaaaaaaaaaaaaaaaactactatcacatctatgagaagaaataaactactcgtatactatatatatagctatacatatatataataaaaaaaagtaaagttgttt

SEQ ID NO: 214922 - DNA, 777 bp, Cannabis indica
accacagtagacatgccacagtgtacacgtgacaaatttttagtgggtaaatattgacggcaaaactacttgaactctatgattagtgacacttaaccacataaattgatttgtttgtgtcaaaaccttctaagcctaacttttattagctatttatgtcatagtatacacaattatacttgtgacaaatttttagtgctccacataattttaattgattaaatattttaaaaataacttaaaatgataaaaaaaaaaatattggcgactaaacgctcacaactatcgtttcacttgcacttaatcctccaagattaaattttggtagtaaaatcttctaaactactaaactattagcaaatttaaggtgttgtctactactatagactgcttatgtgcacactcatgtacacagagcttgtttatattggtacacctaatattattatttcaaaattcattttaaaattaaataaattgtaaaaataaaaaataaaatatatcataaattttgaaataattttttatttaaataataatattaagtgtataaatataaacgtgtcacaagagtgtacacataagcaatctatattggttgttaactgtgaaaaatatatagcaccttaaatttgtattagttcagtagtttgaaagattttaccatcaaaatttaagattgaggggttaatacaagtggaatgataattgagtgggtttaaccacaaaaaactcttataaaaataattgaaaatactttctttttttttctttttt

SEQ ID NO: 214923 - DNA, 993 bp, Cannabis indica
tacaaggccacaataacactcttaatcatgatcagcatgatagtagatcaactataaattttgcttttgtagaacaaagatgccaaattgaagaatggtgagattgagagatggaaatcatgagagctcaacaagaagtgattgacaatcgatccaggtaggccgccgtactaatcaggagagcctaccaagtctccggccagcaaccaataatagatgcttacattcctcttgggccaaagcacgagccagaagaatgtccagctgaacacactcaccaaacccaagttaacggaccgtccaatccaaggccatagagtcaaactgtgggccacgcggtagatgagtaagttttgtcaacccgttacttaggagggaatgatcagcctaacatccatcctcaaacagaaatactaggccaacctcttgctcacaacaatcaggcaaaggaaaaaggaaagtgttttattgcaacgaaaagttccactggaaatccagtgtcctaagtttttggcaaagaaataaggtatttctaactttgttataaattcttgtgttttagagaattattatccctttaggttattaattttagatccactaaccatgtttattttcttcttatttcagctccagctgcttaaacttggattgttatcctagcaagttgagacagatgtttggatagtagggtggagattgtctaagttgaagatgaagcttgttatcttctttaaatttttgaattaattattttagtcattgaataatttagtttcaattattagaatggaaattttatttcatatttcatattatagcagacaattcattatgatatgttgagagtattaataaaattttctctttaagaggttttcattatgaattgatattatgaaattgagctttatattctttaacttgtatgtcaataccatattatatctatatgtttatcacgtttcatgtgttttgtatattattattgat

SEQ ID NO: 214924 - DNA, 433 bp, Cannabis indica
ttatttattttttttaaataaatttttcatttaatagttgattgataacatagtcatacattagtgaataatatgccaaatatagaaattctatacaatttaattatgatgtatcacatagtagaaacataatatattagattttcctatgtgtttatatatgtatcgttttaaaaataaaaagcatgtaaatgattaagattaattttagaattaacttggtaaactaaaattaaccttgaaattttaagagttttaaattattatttgataattatgacgggtaatttatttataatttaagatttttattataaataaattaatcaaaattattaaaagagttaatatgtattaattcttagaattaaaatataaaacacattaggtctaagatattgagtgggagaagaattacatgtcaatgtaacct

SEQ ID NO: 214925 - DNA, 558 bp, Cannabis indica
atcggcttgggcccctttttctttagggccggacctgactaccagtagtgcctggaggatcagaagaaaccaaggtcgcaagaaataagtccaattaaagaaagatgagtgatgatagtgatacaagttgtaaaggtggtgtaattgttggaccaaaccctcctccgcctatttctgaagagctggcccaagttattcgtggtattactggtgatcatcatgaccgatcttctctcaacctcaaattggttattcagagaaaactcttccaaactgatactctatcacgacaaaattgtcttcaaatgccacgcaattagattagttcggatgactttctcaaccatgatgagaagaagaagctggaccaaaatgagggaattaaagttggttcattcaacccaaccttaaagaaaaaaatgacttagttttcaagcggtggaaatataagaacgtgaacagtgccgattatatcttcaacaaaaattggcaccaaggccgaccctaggtataggcgagctaggcccatacttaaggcccacacttcctaggggccca

SEQ ID NO: 214926 - DNA, 448 bp, Cannabis indica
ctcgagcatttcaactcgctgagacaatcgctgatgggtaacattggagagaagagaagcctgcaacgagatggccactcaaagttagtaaaaatgataaaattagaaaatgtgggaactagaagaaaaggaaattaaattgatgcagaagtttgtaactccttctggccagattctcagaactacctcgcatgagaagatcacagtcgccgaacccaagagtcataatgttgcacgaaccattggtagcatgcttcgagtagagttctgagccttcagtcccaaccttgtggataggggacaagagggttcgagaagaaccatctctagatttgaaccacagagtttcacctggtgtactgatccggttggttgctccttggcattctccagagcagagacctcattcctcttctcgtagggacttggctagctccgatggtaagtt

SEQ ID NO: 214927 - DNA, 550 bp, Cannabis indica
aaccacctcaatctacaactttccctaagaaacaaacaaaacaaaaaaactaagaaacaaaacaacataacaatacaaaagttttagctttttattttacctgatcttccttcaagattttcagcaattaagttccaattttgaggaccatattgggttacaagctccttaagcttagcatcttctattggtctccaatggcctctagcacaaagctttgtgtgaacatttttcacaccagatgttgtcctgattctgatttcttctctttcaggtatttcatcaaacacattaagatcacttattctcttttcttctctgttttccatttggttaggaaaaatccattctttcttggttttctcagatgaagagctcaaaatctgaaaacccatttcatcacaacttgttttgaagagagaaagttgaggaggagatgggataaagctcatatttttattattatacccatttaaacagttgaaatcacttttcaagtgctgaagattcatagtgtgattagaatcaaaccaaaggtttgatttttaac

SEQ ID NO: 214928 - DNA, 1118 bp, Cannabis indica
gatatctacatctttagtagcttttctccaaacaccattaatgatatttgccaatctcagagtctcacttatcacctattattgggtacatgtatagatagacacatatataagagtacgtatagtactatatagtaatagtaatttatctatatatatatatatatatattatttcatcaaagtaatgaaaaactcacattctgagtaaatggcaaacactccatgtaatcagtccatgtacaattacctaagttatcaatcattttcttcttcttcagctccatattttcctcctgtccattaatcatagtcaaattttcctaaaatagaaataaaaaactaaataacagcaagttttgagtttgtaagtgacataaatttaataaatttttttagtagtataagtacttaatatttgtaattaaaactgtaatttttaatacaaattctattattgtcttaaacaagatataaggactgaattttaagtcattgagtctgaacatgaagatgtagtattagttatttttaaatgttttttaataaattcaaaaatagaatttgtactgacgaaatttaagaaaaaatacaatttcacaaatattgattatttatatcgctaaaaaaatcatttgatttaaattgcttttaaacttagaattttaagtacttatctcttaatttttttttaaaaaaaaaaataatcatataaatagatcatatgaaagtgacaacactatgaaattattatactcattttgggttatctgagaaattggataattgaatttagtatcataaggattaggtatatgtttttcttccaataactaaggattattataattattctttgttaactttttttttttttttttcgttttgtattatatatatatatatatatgagttggggatagtgacttgtttgctaattctaatttgtctaacatttattgtcacaactatttcgtgtatatatataattaattcatatatatatgtatgatgtatcaatcattgctacctattttttcttaatctattatcttgttaactaagtcctaagtattgtagtttctaatctaaacattggcctatatatcatcatacata

SEQ ID NO: 214929 - DNA, 649 bp, Cannabis indica
gaagccatgcttactcgtatgggattcagttcaagatttgttgctcttatcatgttttgtgtgtctacggtctcttatcatgtcacttatggagggaagaagctgggaccgatcgttcctgcttgtgggattcgtcaaggggatcctatatctccgtacttgttcttgatttgtgctgaaggactctcttctctcttaactttatatgagcaacgtagatggttgactggttgtaaagtggctaggagtgcacctcgggtctctcacatgttatttgctgatgatagttatgtgtactgcaaggcaaatggaagtgaagcaacacatgtgatgcatcttcttcaactttatgagcaggcgtcgggacaacaggtaaattactcaaagtcttccattttttttcagtaaaaactgccctgttgaaacatgtgctacactttgcaatcttatgggaatggtggaagctggggacaatagtttttatcttggcttaccttgcattttgggtcgtaacaagaaagctatacttggtttcttacaagagaagatgaagaagaaaatatttacttgggaaagtcgattcttgtcaaaagcgggtaaagaggtgttattgaaatcagttgcccaggccttgccttgttatgctatg

SEQ ID NO: 214930 - DNA, 447 bp, Cannabis indica
aaaagtcttcagcagcttctgatcaactactataagtaggtccgcaatcacgagtgtcgaagtagccctagccttcttcttcatttcagtgtactcagcgaaccacctaggccgccttctcttcctccagttctccataacttctagagttgtctctaacacctgcacctcagtgtacagaacatgtcatcatcatccgattagtaatcatttgggagaatgaagtcatcttctggtgtccgagcctcctcttctggttgtggctgtggctgtaaatctactgccgaccttctaggatcttgcaagagcgtcattatggtcttcaactaatccatattcgttgtttgtcctcttagcaaagcggcctgcccttctcttaaagcaatctgccccctctccacagtctccaaccttaccaaagtggcagggtatactggattgcgagcc

SEQ ID NO: 214931 - DNA, 1147 bp, Cannabis indica
ctttagtttttacgttttttttttttttttgttttttgttttttttttttttttgtagtagggggcctctaagtatgttatgatgtctgcttaacatttgacaaaaaaaaaaaagtagaatttgatgatgatgtttttaaaagagatgatatatgatgtaatgtgtaagttagaagtaaaaaaaaaaattgctgatgtgttttaaaaggtagagtagaaaaactaatgggagtgtggcacaggatgttcttgtttgtaaaacatcttgggatggggtgtttcctattatttttttctgccttgttggtatatatttttttggctaattaggatttttgccccttaaattttgacatgtaccaaatcatgcctcttgaacttttaaggtcgttaaaaaaacccctgaactattgagattgttggatttaaggacttttgtctaattttagtaaaaattctaacattgatgaaagttcagggtgcatgatttagtacatgtcaaagttcaagagacatgatttagtagacattaaagtctggggagtatgatttagtacataaacaatcactgaaataataaaattgaatgaaattagacaaaagtccttaaatccaacaatctcaatagttcatgagccatttttaacaaccttaaaaatttacgggcatgatttggtacatgtcaaattcaggagcaaaaatcctaattagcctattatttttactatttgaaactttgccttttatgaatgtatttcatagaaaaaaaaaaaaaaaagaaaagaatggttgattctcttgtgatattcttatgtttataattcatctttattatagtgtaagacagcttaattagttattcttgctaggacctagtattactttacaattttctttttcaaaaaaactaagacgccatgtggggccgtaggaaggaagatcccccatagttttcaatctgaaaaaaaaaaaagaaacttataaatagagctcaaacacaacgcgttataacagtctcaatttctttatcgtgctcgtataataaaaatttcaaagccagctgaaagcactagctatagtgtaacatatatatatatttatttatatatatatataaatacaaattaaacagaatggttaaaagtcc

SEQ ID NO: 214932 - DNA, 621 bp, Cannabis indica
gccatctcaagtcggctactggccctttttctactgatgatttttctgcagaacaatgtaattactttgagattttagctcaacaagagatttattggaagcagcgatcaaaacaattttggctacatgcgggtgacaaaaatagtaaatactttcatgctactgcaagtgctcgtaaacgtagtaatgaaattgttcaattgcaagacagtgctggtaattggaagaactggtcttcggggcttgatcatgttattgttgattatttttcctctctgtataatgccgaaggcatcacttgtgatactgttgtgagaggcatcaattgctctgtgtctaatgttcataatgaggctcttttgcaaccggttactcctgaggaaatcaagcaagctctatttcaaatgcatcctgacaaagcaccaggccccgatggcatgggtcctggcttctttcagcagcattgggaaactgttggtcctgatattgtgcaacttgttacgaatttctttgttactgaggaacttccaccaagtataaatgacactcacctcgtgctgattcctaaaaagaagaactttactactatgggtgatctgcgtcctattgccttgtgtaatg

SEQ ID NO: 214933 - DNA, 538 bp, Cannabis indica
aggctataaattcctcactccctcactgaacaagctgcattggagtaaggaggtttgggctcgattaaatgcacttaaacactattttatcctatggatggctatgcatagcaggttgaagacaaaggatagagtggtgaaatttggaatccaaattgaagagaaatgctgcctctgtcaagaagagaaggaatctgcaaagcacctatttttttaaatgtaaatactcagaggagcatctccaaaggatcaatgattggctgaattggaaagcaaggagtaactgcttctcctagctgatcaggtggattggcaaatccagaaccagcaaacttaaaaagcaaattctggctacagcttgtgcttcaatggtttacaacatttggaaagccagaaatgctagaatttggaaggaagagcagctattactgagcaggttattagttgaggagacaaaagagaatctaaaactacgaattacaatgttccagcctaagaaaatcaagcatgaagataaagagtgggtgcaatcattgta

SEQ ID NO: 214934 - DNA, 537 bp, Cannabis indica
attgaaatctggatcctttgacttactggttaaacccttcattggacctaccctgactccctttgcctcagaattgatgagtcactttgctgtcggcctagttcagctccccatgaagagatacgcggcatgtgcttctactaatttggtctaccaaacccaggacgtgagtgcggccatgactgcgataagttctcatctgttagagattttcaagcttctttcgacgcctgatatcacgcactcatatatatttttttgttgtcagattgttgcagagaccggtcttctctcgaagattttgattgaccataggtacaccatgtccgaatttgggggcatggaggaggccatgaagagtctccgggagtcggaggcacagaagagagctatccgggaggaagcgcagcagaaggaggcccttatggagcggagccatcaagaggcgctgaaagctaaggacaaggtaatgaaggccaaggatgcagctgtggccacagcgaagcgggaactacgggattctaaggaggcagtgca

SEQ ID NO: 214935 - DNA, 630 bp, Cannabis indica
agtgtgtaagactgtgaagtatcaaatttaagtgaaggagaatcggactcagatcttggtgatactctgctacagaaaaaaatacaagggttagagatctgagcagaaggagtaatttaattctgctgcaaccaatgtaagatttcttaaagtttatatgtgtttaaattacattgttttagaaattcatatttaagatgttaaataacatacatggtagtaaatctagatcctactaaataatcccctactggcctcagagccatagtaatgatttactttcatgaaatatggatttaaaatgatgtttgtgttgatttggatggtttcatgttggtttatgcgcatatttgatgattgtatggaaatcgtaatgtatgttgtaaaatattttttgttttgtcctggaaatatttgtactggaaagtagacaaaaaattaataaatttaggcttttatagaacctaatttggattttttatgaattagttatgattttttgaatttggatgaaaatatttggttttgggttacacacatgcgcacgcggggatgtggtgccgctcggacagcacacgtcttcagacaagtgcctgactgaggattctcagaaaaggccctgtctgaagg

SEQ ID NO: 214936 - DNA, 775 bp, Cannabis indica
ttgctgacatcttttttcgtgggcgcaggcttcttgtaaggggctagtcactgagtggccatgtaaacactttctatatcctcagtcaagatggtaaatgcagtgtacttggcttgattctcccggggagcttttcagttttgctggtgaactttcccttcttctgattcccttgtctattgttgttgccggaaggtttaccgtttgagcttgaattacttgggtaatgggggtcttgggcagatgttccagtggaaggaggttttgacttaccaggttttttctcaccttctgctcgctgaataccctcttcaagtttgatgaagccttcagcacggtcaataaaatcgctcattgagtctaccgaaccattcttccttatgtctttctagagcttgcaaaggacttcaatgtcccctagtatcgcagaaaactttccgtctttagttacccgtgaaaccttagtcgcctccgtcatgaatctgttgatgtatgctcggagaggctcgcctggtctttgcttgacttcgaccaagtctcctaggtgcaacggaagttggcgagaggaggataattgtgcatggaattctgaggagaaagctttccatgagttgaattttctaggtgccagcttgaagtaccattgctgggcggtttccgagagggtggcaggaaaaattctgcaacatacgtctcctcgtattccttgtagatccattttcatttcgaaatacttgaggtggaaaaaaggatcttctttttcagtgtacatttt

SEQ ID NO: 214937 - DNA, 836 bp, Cannabis indica
gaaaatcaagaaataatctaaaaaagagacatatatgttagaagatatggatgtatattagaatccttatatctacaccaactcacaacttaatatcaaatatggtggttactctgggggtggaggaattattctagaaggatgtaagaactcatctatgataatttagttccacctgtgaagccaaaaaacttagttggttttgaaaagcactagaaagttatataaacttaagaaagttcttgactagtctttatctctattctattttggaaagttcttccattatcttgtgacaaagtttggggtcatcttcataattggaggaacaaagttttttctaaaggggataaagaaatccttctcaagtctgttatacaggccatccccacttatactatggcctgctttcaccttcctacggccacttgccactctctggagtctattatggcaaacttttggtggggtttcaacgataataatcggcccaagacgcactggctggcaaaaactttgtaggtccaaaaaggatggtgggcttggattccgttctctggtccacttcaatcaggctctgctggctaaacaagcctggcgcatattaaaacaaccaaactcaattgtgtccaaaatcttggctgccaagtattacccaaactcatctttcctaaacagttctctaggtcactccctctctttcgtttggtgtagtatttgttggggaaaggatttgctgcacaaaggactcattactaaaattggtaacgggcataacacttccactacccttgattattggatcccgggttctcgtcaggttgtccctctttctt

SEQ ID NO: 214938 - DNA, 655 bp, Cannabis indica
atcaatttgacaaacatggcttgattgaaagcttgggaaggaatggcaaagtggaatttctgggaagggcattagcactggcagaatcttgagtggcagcagtcatagagaaagaagcaaagagaaggagaaaggtctttgaataccttataccattaccataccatgtaaattataacaagtgtttgagtgaaatagctcaagatcaatgaattgagatcttaacaagctttgtattatctgtagagaaaaagaaaagtcacaactgaaacacatcaactcacatgagcagtaacagacagacatttaactcatactagcataagcataactaaatatacaagtaaagttgttcagctgaaaaaggaaatactatacaatacaagcagagaagcctagccgtattaactaccactacttacaagttacaactttttataatctaacctatgtttggtattgtggaaaaatagaaggaaaggaaacgttatgagagtaaagtggagaaaaagtagaaatgagagtagtatctcttttttctttttgatggaaacaacagtttacataaaaaaaaattgaagtgttttttttttaatgtaagtaaaagcgtaagatatattagattcagtaagcagtcagacctcacggtcattac

SEQ ID NO: 214939 - DNA, 665 bp, Cannabis indica
gagaatgaaattactactctatctttgttataataccacatcatcaatacaaatagtatagtagtcataagtatagggggtgaaaagataatatcttttacataacattacctttttttgataaatataacatcactataaaaaattgtgtattaaaaagctcaagtacaataattaattttagttcaaacatttatttgattgtgcagcaagtcatcaaaaagtagtttcttttctttttggatggaaacaaagtcatcaaattctttttgaactataataatataaaatagtcttcgcacgtgtacatttccgagccccacgtgcggagaatttactacggggtgtgtgtgtgtggacggtctaaaactacgttcggaacagaacataaaggcaaataaaatccctctcaaagatttgttatatgagtgtgtcttattctttgctccccactttctaatctattttttttaattaataaattccaaataattatataccaagataatgataatgtatcacatttttctcatcaccaaaattattgattttcttctttatgaattttatcttttatatagaaaagttattttcataataatccgttccttatctgaaaagatatccatgatgatcttataataataaattggaaaaaaaaaaaa

SEQ ID NO: 214940 - DNA, 703 bp, Cannabis indica
tccattattttaataagagaagcaaaatagtcaatagtcaatagtcaatgcttgctgtcattgaatagttacaaattaataaccttttttagaaaagttttgaaccaaaatggacaataatacttcattgaaatagttactaaccttttcattgtaagattcttttattcattcatttacttatttgtaaaatgttattttgtttggcttatattttcatctgttaaggtttgtccaagacaaagttgatttggccttgttctgtttttatgtcatatgcccatgatctcacttagattggtgtttgacttagtagattcttatcagcttattttgtttactactaagaatattgtgttgtgcttagtgaaatttgaatgagacaaatgcatttagtagaagtaacaaaagggggttaaatcatatttgacataataatgagttgtgtaattgttcttgaagaaagataaaaaaggttgagctaattcaagctagctgcaatggtacattttttcagtgtattttttctgcaacaacaaaaacgaaaaaagttcacaactttaagaatttacagagaaaaacaatcaaaacccacttaggatttacccaaatttaagtacaacaacaacaataataacaacaatacattaccttgagtagtgagtagtcgataagcatggccaagagcaagagtctctgttgg

SEQ ID NO: 214941 - DNA, 539 bp, Cannabis indica
atatacctaagcacaactttattacctagctggaagtccaaaattatctacaaaccagagacaggttagtatcctttcaaatctgccaagattcagcatgtttattgtgtggtttagccatggaatcgataagccatctgttcttaaagtgtacatttagcagccattgtttaagtattttgaaagaatggcttggttggaaggtgagtgataaaatgctccctgctatgctgcggtggatatcttgagcaagcatgtctaagttcaaaaaatatgtactaagtgcaacggttgctgctttagtataccagatttggaaaaatagaaatgatagtttttggaatcaaaaaatacaaagaatagagatttgtgtacaaattgtgaagttcaatattacaaataggattacaaaagtctattgtaaacggattacaaaggaggatagaaaatggtttgatgctctttagcatcttgtaattatatagttttggttttgagttggaacaattgtaaaatgttgattgagatgagtgaaaact

SEQ ID NO: 214942 - DNA, 599 bp, Cannabis indica
attttcaatcacaaacggagcgttttgagcatctaaaaattagaattttcacccattgtatcttacaactccaaaattcattttaaatccataaaatttcttatttagcatattttctctcatttcaatccataagatctattttaccattataacctgaaacaagaataaaacaagcataaatctgaacaataaagcataaaaatgctaaaaacacacactaaaatagactctaaaaatgcataaatacaaacctaacaaattttcccaaacttaacttttactcgtcctcaagtaaagatcaagttaaactgacaaaaataaacacaataacgaacaagctaagccaccattaccatctacactattttgccactactcatgaaatctcaattgcattataaataaccagaatttcagtttaaccactttgaaaattaaccttaatgttaaaattagggaaattaacaatataattcacaaatgatcacaataattggattccattgtgtatcctctttgctgaaacttatccttcacagcaactatttttttccatgcccaactgcaatcttctggagtaacataactccaccagt

SEQ ID NO: 214943 - DNA, 706 bp, Cannabis indica
tgaggatgaggacctagagccttgtgtgaggaggattgttgaagcttcgctcccagagaacttaatgtcccagattgagctgcatgatgggtgtactaaatctaaaactcatttggccaagtacaacaagatgatgcaggtgacaagagtcagtgaggagaccaagtgtttgtgcttctcctgaccctaaccaaatctgttgaggattggtggaagaaattagctcatggatcaatccactcctagaaggaactacagtctccctttcagaaatagttcattgttgcccacgactatgacctagaaatgggttccatcaccaacatcaagcaacaagcgggagaaagcttgaagagtttcattcaacgaatgattgaggtggcaactaagattaaagtgtctgatgacatgaaattggtggtcctacaatctagacttgcaatcggttctctcccatcgggagaaatgcagaggagaaaggctgagacattgtccgaattcatagcaaaggtacaaggctttatatcagtttagaagacgcttatcagcaaacattcagtgtccctccagcactagctccagttacttccactcttggatttacctttccagttcctgttctcggagctcaatacaccctgattgtttacgaaccatctgcattcataccagcacccacacagacccatttctttgggtatggagt

SEQ ID NO: 214944 - DNA, 904 bp, Cannabis indica
tcggttagaatttgtgagagaacaagactttttgggtacgagataggggtaacaatcgatgcagcggactagatgactggaattctagaggaactaaaaaagaaaactggacaacaaagggttgccttcaaaagattcttcagaaacagcagtggaagttattttatggaatgctttactaactctaatggagctttcttgaagatttcaaccctgaagaataacaaagtcagaatggtgattattccagaagaaacagaagctgaagggtggtctgatctatataattgtctctttggtgtacttaaaaggaagccaggaaacgttcatgatggagtaaaacagcaaaaagaagtgaagataggagaatgcaagaagaactctcaatcatgggctaatatcgtcaaaagatcggggcagcatgtcactaaaccaatgggtgggaatgtggtgaaacagatggagaaactggcattgaatattcagcacaacaagggtgctgcggttcgaaacaggggaaaagtggaatggtgagaattatatccagaaatcaacctcgggttcaaaccaaaaaatctatccctgagaagagattttatcaacctaaattctatgaatattttcgttcaaaagctcaacctaaagattggagtttggcaattttccttgctagggacaacactcacgggattggagcactattttctttaattttttgaagagagctagagagaaagctgatagttagtcaattatttgatgataaatgtattacttggtgtaaaggatgagatggaaaaagaagagttagtcaacgtgcaaagaatgtatgttccgggggctcaatcatatgttacattttctccttggagttgggagaaccaaaagaataattgtaaaaggt

SEQ ID NO: 214945 - DNA, 829 bp, Cannabis indica
tacgtacgtactcctcctaatttaattgtaattaacgaatgatacctttacggaaacaacaataaaattaattaatccttcttaattaaccgcgtggatatctatttgtataattatgcgtggtccaatgtatttaaagatagaagtaaattatagtgaggcctactagtagatttgatgggttggatatatatatatatatatatatttaaaagctaaatcagtagctacaagagctagtttggaattccacaaacaaagggttatctagatagataatatatcactgtttttccaagggagctacctagaaagagacacaacatcaaagtcttagcctaccaacacgtggtagtgccatgacgtaacagaccacacacgtatggataatattcttaattattaaatataaatgtacctcataatctgattcattcaacaaaagagatatatatatatatatatatatatatatactagaagaaagttacgtgcaaggcacgtatacttagttttatgttaggtgctctataatttattaagaaagattcaataaataatcatataatttaattagtgtgtggggttatttgaaaatcaatagtaaaaagtacaaatttaaaatttgcagaaagagaagagaagaatggagattagcttgaaatatatttaaaaaataataatgctacacttactatggatacttaactcgagccggtaataataaaattataaagaataggggtagcaagcatatgacaaaatttgtcttaatatcatctataacatcataaccttttatatttagatttgggccaactttcttctc

SEQ ID NO: 214946 - DNA, 715 bp, Cannabis indica
acatttcataaggtatttttatgtctataattctatttgggcttatatttataaggtaggttgtgttgctagaacttccccaaaatggtttttctaatccgaaactgaacagtaaacatctaacattattcaacaggatttggttcatcctttcagcaacactattttgctccagggtcttcactacagatttatgcctagtgattatgaattcttgacacaacttgtcaaattcagagttaataaaatccaacctattattcgtcctaaggttcttattaattttaagatttgttggttttctacctgagtttttgaaattctaaactgttcaaaacactcatccttagttactaaaaaataggtccaaacacacctactatagtcatcaactatggaaagaaaatattacttactggttaggcaccttgtatggctcccaaagattgacatgcacatattcgactatctttttagttgtatgtcttgccagagtgaacttcagcttatgttgttaccctaaaacataagcttcacaaaatggtaaggcacaagaatttaaatttttaactatacattgtttgtgaaattctttgaggccttgttcactgatacgtccaagtctatgatgtcatagttgcatatctgattctagccctttcaccatggtggcttcttcggcttggataattacatataaactattgatattttc

SEQ ID NO: 214947 - DNA, 839 bp, Cannabis indica
attttgttgttagttttttattacttttatatttgtttttaaattgtttggacattgttttcctattattttcatgtggttttttattattttgtattattttaataaaattctgtacaaatgtatgaaaaaatatttgaacgtagtctaaaaaatttaccaaaaatagtactttgtagaaattttcctaacttaaagttacacattctagtgttcaaaaaaaaaaaaaagttacacattctatgaatttttatacaatgtggttaaatatatggcctttttttgaaaaaaaaaaataatatttatggaaaattttcaaaaataaaaggttaaaaaataatgaggaaaatagtataaaataactggttacccttaatatttcttttccatattttttaaattttcccatataagaattttttagaaaggaaaaaaaattaacactttgtaaacttgttcatttatctcataaaaataaaaattctcctatataaaaactaaaataattataaagtgggaaatttttttataaatttagaatgcgtttggtaatattattttaatcatttctttatttttttaattcattgttcttagttggcgaatttggcatagatacgacaccattgttcatgatgacaagcttctatttgataatatggttagtttttaggtctctcaactatctttggaggtatcaaaatgctcaagttagtgggtcagccttcctctagtttgggggtgagcactacgcctgcacccaactgggatctaactttgggtgatgtcaatttctttgtgaacgttgagtttcgtgataaacatttgaagatgggaat

SEQ ID NO: 214948 - DNA, 665 bp, Cannabis indica
attattattgtatggagaacaaaaacatggtctatggtttgttttctaaaagaagaaataagaaaaatcttacaaattcaagaattatcaaatggagttaattacctctggaaactccattggaaaccataatggcactcgaagcctcaatactgttagttggaggacgaattagaccggtaccattgttgtcatcgtcaagatcatcatcatcatcaatccgccaaatgaaatctttggaattctgttaatgtgtcatgaaatagaaacaagttattagaactaagctacctacaaaattaaaaaaaaaaaaaaaaaaaagatcgatatgatatacttacatggaaaacaactgactttattagtgcttcatcctcctcctccaatttcttctcctgccaccatattaatcataacaagtcaggggggtttcgttcaggaggataaaaacatgtattagcagcttagattttctatcataccttttgagcagcggtatgttgcagggcctcaagcattgcatctacactgacagtagcgtgtcttgactgcaaaaaacatgaaaatctgtattagtattaagagaatacatatcacatagttgcttatgaaacttcaaagtttaagaacaattaccttcatggacttcatctcatccaatgcag

SEQ ID NO: 214949 - DNA, 788 bp, Cannabis indica
actatacctttatcttgttgtctcagaacatgccatcagtgcaacattagtgcgagaagagggtaaaaaccaacgatcaatttactatgttagtcaaagattactagaggcagaatcgagatacccacctctaaaaaaacttgcactatgcctgattcatgcatctcgcaaattgtaggccatattttttaagcgcatcatatcaaggccttaacgaatcaaccattagtggcaagtactatcaaaaacctgaatgcttcaggaagattaataaaatgttcaattgaattaggaaaatttgaagaaacttactacccgaggacttcaatcaaatggtaggctttggctgactttttgatagaatgagtaaactcaggagaagactttggaatagaaagtgaggcagaaacatggaaaactgtttgttgatgggtcttcaaatgagaatggcttgggaacagtgagtaataatgatgtttccaaaaaaaatcaagttccactacgagcttaggtttcaatttgaaacttcaaataatgaggcagagtacgaggccttgttagcaagattaagaatagtcgaggcactaaaagtcaaaagtattacgtgctttagtgactcgcatctaatagtgaattaagtcttaggagaataccaagcgaaaggcttgaaaatggccaaatacttagagaaagtttagaagaacttgaagaagtttgattattttaaaataaaataaattctaagagaacaaaactctaatccagatgccctagcaaaactggcatct

SEQ ID NO: 214950 - DNA, 864 bp, Cannabis indica
ggttaaagtttgggataaaaattttagttagccgtttttcaaatatataactaaaattttattttttttaaaataattctaatatattttattcatttcaaacataatattctcgtatatattaaaactaaactctaaaacaattaataaaatatatttagaataatgaataattattttataaatgtagaaggtaaatagtaaattttataaaaagttttaaaataagaaaaaaatttaaaacatttgtcataacacgtttttagtttagttcttcaaatagattctctactttagagcatttgagtactctaataataatacgacttgtttaaaaatacctgctattgccaaacgattaagcccacttatttatttatttattttattgtattgagataaaagccaacctagttataagtatagtaaataattattaattgactaaattaataattatttatatatttactaccaagtacgtatattaaatcaacgtactcgccctaaaaaaaatcaacgtacatctatagattaatagatatattgttatgggtatacactcattacatgaaatttatttgtacaatataattttatattaattaatctcacatattttaataaaaaaaaagttaaataatgaatatcagtatgatacctaaaactacatagaattgttatatatcataccgttgatcactagtaagatacttaaataatctattacactgttcaacaccttaaagtgttttaatttaataataatattaaaactattgattaaaatttaagctaatatatataattataaatatatatatgcatgcgtgaacacataattgatcagtgtatatattgtca

SEQ ID NO: 214951 - DNA, 580 bp, Cannabis indica
aaaaatataagagtgattagaaaaagtgttactattacacctttcataattttcaaattttaaacgacacaccgtttcatcattttggtgtacaaactacaacaaagtacaaaccccatctgtttcatctaccggtgacacaaaacccatccaaaaccccgaaaattgaagccacccggaaatgttgcagatcaccaccatcgtcttcaccacaatttcctactcagttccaccatctctctacaaccccacttcttatccaactctgttcccattacccttctactgctcttcaatttcaacgcacccccaccacaagcagcgctacctacgcctacaatggcgaccgaaacaattgaagaagaaggcaccgtttgtggcctctgccgccacttatgaagtcggaggaggttacccagatgaagaattagaaccgcaagacagaggtaaggtcccccgagatcgtgggactaagaaatttgacccctcagagtgtgaagctctgctcaaaggtggagaacaagtcacttctgttctcgaagagatgattatccttgtgagctctctctctctctctctc

SEQ ID NO: 214952 - DNA, 705 bp, Cannabis indica
tacataagtgtcaatgatcatgaattgactataccttataaagggtctctttatatttatgagatttgagatgagataataccccatttttgccaatacctgaaaagacttcgaaatattataagggaagggaagtagtgtatgtacgtagtacattttactttcaattaatttagttaaggcttcatatcataattcatagcaataatatatgaaaaaagaaaccctgaatgaatcgacttgtacaactcatgatgatattccttgcacatgttccatgttccatgtttaattataacacttgtaaattttgagaaaatcaaataaatcatgaaaaaaaaatttatattagtttgatttttttttttatttcaatctaatggactctccattagaagaagaaaaaaaaaaaaaaagaagttcatattagtttgtatccaatttaagtttttcacgacttaaatataattaagcttaagctcaaaatgttataaataaagagaatgacaaatattattttacatcttgtgttttgtaaaaattataaattggtctttgttaaatgataaaatagactttgtattttctataatagtataaataggatcatgaataatttttttttgtcaaaataaaacttaataataatccagtatagaagtattatgatacaactagttaaattttttacttttgttcatgtta

SEQ ID NO: 214953 - DNA, 594 bp, Cannabis indica
cttttggtggtttggtattgtttgatttttgagtcttcttatccctgtatacttaaagaaatagttaaaattcgttcttcaatttctgcttcctattctataaaattagctactaataagaaaaaaatgaaaaatgtacctgaggatgaagaaggtagtgattctagttgttctgctggagttggtggatcctctaatggtagtcgtggatctgctttgcaaactaaaaggacaaaagtagctgagaaagttaagaaggaagatgttcaaaatttgaaaaagatgaagtaagttgtataagatttgcctaaggattatgatagtgaagacatggaggttgaagttcggaatgatttgaagatatttttatgattttatatactgtttgttatttctttttaatttatggtttattaaatatttaagtattttttttttcaatttttgagtttattgttatatgtataaagtattttcatcattcatttggatttttttggtttatatattgatcttaattagtttattattattattattatttttttgttttttctttcttttgcatgtggttgtttatgttttgtttttgtc

SEQ ID NO: 214954 - DNA, 1202 bp, Cannabis indica
gaaaacaaaaacataaaaaattgtagagttctcagcaccatacgtttgtccaagtaaacaaacacataataaaacactcataagcataatccacaccaccacctctaatgagaaaataataagcaaattgttcgtaaggccttatgcgatagaaattcagaaatagtgtttgattgtatactcaaattataagaaaactaaaaagagtaaacaatgaagatacagataaattgggggataaattaatcagaaataaaaccctagattgaaaaagagatacctgaatgaagagagtgaaggcttatgaagcgatggcgatggggataataaatgaggctcaaaagccaaaggaagaagaaaagggcattagtgtatgtatgtatgtatcacagaattgaataaagcttttctttgttttaatggttctctctgatcttcacttctggcggttaacttacccttttattttattttttttattgttttattcaagtaaaataaaaccaaatttacataaactacttgtatttttttatacactgttacgtgtttatatatatatatatatttttttttttgaagaaaacaaaaatatttttatattttcataacattatactatattttttaacgtgaaaataatattttttttaaataacctaaaaataatagttcataaaaaaattgttaaaaaaaaaaatacataattccatgaagaacttaaaagttttattatctaggatattaacaataaaattacttgaaaaatttatattttttcacacaagttttaatcatccaagtaatgttaattaaaaaatataattttaaatatttaaacaatttaaaataaataaatttgtttttaaactttttttttccttctttctttctttttctttcttaaaaaaccccaaatctctctctctctttctctgacctccctctccttctatgtgaggccctctttttctctctttctctctctcagctctccctctccttctatgtcagggcctctctttctctctctcgatcttctccctctcagaccctccttctcttctctctctcttcgtggtagactcgccagagccaagctccatgactctgattgagccatctgccctctcttctctctctttctatcttctccctcaaagagcaaaaacgaacaaaacggaataggagtttagtagtac

SEQ ID NO: 214955 - DNA, 709 bp, Cannabis indica
gaagaattcttgcccattgcttttatggcaagactttcaacttgatcccaagatggtgtttttccatccacagtcgacactctagcagttgacatcacgttcgatcctcatgctgctcctaatctcacttcctcacccgttcctcgcagaaatcaagcttccaggtcagaatacatcgaatccagaaatagctcattcacaagatcaatccaccattgtcgacaatcaccacaccatagctccttaagccactcgtcctatcaatgatgatcattccagtccttttctcctcagcattggtgatcaccttggacttgtgcttgcgtctaccgtcctcaatggcaataactatcaatcctggaaaagaggaatcaccatggctctagttgcagaacaagattgccttcatcgacggttttccttcctcacccagatttcggtaatctctatctcaattctcggcttagatgcaacaatatggttatgtcatggttagtcaattcagtttcccaagaaattgctcaaagcattatgtatttcgatttggccattgacacgtggaatgatcttgctgagcgatttaacgaaggtaatgaccctcaaattttttaattacaaacccaactcacccgtttacaacaaggtaaccaatctgtttcatcatacttcactaaaataaatccctttgtgatgagttgaaagaatttta

SEQ ID NO: 214956 - DNA, 892 bp, Cannabis indica
acatttttttcgaatttattttcttaaaaagttgaaaaagaaaattataaataaatagagatagaaatagaagatttgaagagattatattgtactctgttttttatataaaataaataaaaacaaaagaatttcataaataaaaaaaaacaaaatgtgatgtcccctcaaaagagtgttatcatattgcactatatttattggtacactgatatttaattatactaataacaatattatattttaaaataatgttaaatattatgagtaccaattagtataaatgaccacaaaagtaaaaaaaagagaattgctaaaaagtactactagtgattattgtacaagtaattaagtattagatcaatagaagcacactaatagatgagtccggtccaattgactacatttaactaattaaaaaataaaaaaataccaattgttgtgattcataaacaaacacaaatatcaaatgttgatcacaaggggatcaacttcccaactgttcacaaaaccattacaacaggatcccaatctctgttattctttgttcccttcccttgattgaagacattgagcatggagtagaaggcactacccactctccaatctggaggtcttgatctataaattccattccattgacgagctcgtggcagtctaaaacaatggtagctgatcgaatttggagcagttgttacgcctccaatttacttgttttataattgtattggtatccaattgttatcctcatccttcacaccctggattgatgttggattaagaattcaatttacaagttcttttccagaggaccatcccagctgatcacttgtgataccccatttgcaagagaaccagatggccctggtaaccccacacctcagatcaaagg

SEQ ID NO: 214957 - DNA, 725 bp, Cannabis indica
tttaaccctttttttaagtaaaaaaatatggaataagttgagcaattatttttttttatataaattaattgtatattaatctaagggatatgaggatatcatcataaaagtatatcttaaagaatatagaaagaaaggtaaaaattaaaatatataaagtaaagtgggtttataatttaatttcctcaaaaaatactactaagaaaattttaacaaaaaaaaaaaatagaaattatacaatatatcaaaaaattttaagaattaattttttatagcataattttttaatgtattgagattataaactttttgttcttttttatatttatatgggttttttatgccatacttctgtaattaagtttttaaataccatattttaagtctttttttttaatgaaaatagagatttcattgaatagctaaagccgctaatacaatagactaaagagcataaagaatattgctcccagaaaaatacgactagaccgataattagaatcgcaagccaaacaatgtgtgactttgttaacagatcgtttaacatgacaaactttaacattgttcaaagaaaataagagctttttgcaatctgggacgagaagaccgaagatagatgacatttcaacaaagctaataagagcttgaatggccacaaaacagtcagtttccatcacaacattgttcaaaatcttcctctttatccaacttagggcttccttgat

SEQ ID NO: 214958 - DNA, 711 bp, Cannabis indica
gtcaaatcttcaaaaaatcataactaattcaaataaaatccaaattgagttctgtaaaaggctaacttgcttaattttttccatactatccaataaaaataattccagaaataaaatcgcaattatttttcacgaaaatttcacaaacatcaatcaatcatcaaataacactcaatacaacatgataccatccaaagaacatacaaacaatcgttttaaagtccaaatttcttgcaagtaaatcaattaccatggctctgaggccagttgttggaaattattttaccaggatcttagatctactcacaagtatgtttattaacatcctaaatatgaactttctaaaacgataaattaaacacatataaagtttaagaaaccttacattgggtgcagcggaataaaatgactccttccgttcagatatctagcccttgattcctttctgtagcagagcattatcaatatctgaacctggatctctttctctgaatctttgatgctgaatctcctttgctgatgatctttcttcacgatcttcctcactatgattgaggtatcacttgatgtgtgtgggcactactctaatcactaagagagtttcgaaatatgaaggaaggtaaccattcttaaatatctataccaaggtatagacgacgcttttaaaccgtcgagaagtccacattagcgatagtttttaactatcgccta

SEQ ID NO: 214959 - DNA, 712 bp, Cannabis indica
tttatggaatatcactaaccaatcaatagagggtagacactccaattacctaacaatgctatttttaagggttaataaaaatgcattccattcccattggacacagactgttttgtggtggagtagtgtttgggtgttggaacttggaagttgggatggaaggtagacagtagacttttggaaatgtgcaggactttctcgaaggaattccggattcttcgtaagcaagtgttaatactttttagggacataaattcacaataaggcattagatccacctggaagggaagcctcctttcaaaatgcccctctttctccacaagttcttatccttatattgctgtttcaacactggtgataatatgttataacagtgttcttagtttttctcccacctattctatttttattaggtgccacattttcaattgcaactagatgatttcaaggacaaggattcgttttaagtgtcgagggttcaactcaagccttgtacataaaagtataaacaaaaagacgttgatgaagaatcagatctactaagaagttagaaataaaaatggattgaatctttccataccaacattgaaattaaacattcacaatttcaataacatgaacaaaaattgaatttcacttccaatctaaattaaattatagaataaatctaaaaacgaggtagtgtcgaaaataaaattgaacctttggctga

SEQ ID NO: 214960 - DNA, 772 bp, Cannabis indica
gtagtacttaatccaattttcctgtggttcgacctcacttgcgtgagatactacttgattgcgtacacttgcgtaataacataaaattcgtaacaaaagccccaaaacagaaagctgaagtaaagtcaatgaatgacattccccactcaaatgcagttgataatatatctcatagtgtgcaaccagatctgatcttgcacacaccatgagcatgttgagtaaatacatggccaaccctggtaaagagaactatataaggtatgacttacatacagaagacaaaataaaaacctaggcatcaaaggatataatgatgcagattatgctggtgacatggataacaaaagatcaacctctgcttactacttcatcatcaatgggtgttgcaataactggaaagtctagctccaactagtggtagccctatctaccattgaatgtaaatatattgttgttacagaagcaattaaggaagtagcttggctacaaggattgataaatgtgataactaaagaagatagagtccctatgatctatttagacagtcagagttgcatacatttatgtaagagcctgatgttccatgattgaacaaaacatgtaaataaaataccacttcatcaaagataaaatggtaaaggaacatatatacatacaaaagatttccaccaaagagaaccttgctgacatgaaaactaagattgttaccgtaaacaagttcaagctatgcataaacttgctagggatcgatactggatggtgagtgacacca

SEQ ID NO: 214961 - DNA, 967 bp, Cannabis indica
aattagggaaagaaattagaaaaaaaagatatcacaattttataatatgaaaaaataaacactacattcttattaaaaaactacactatattttggaggttttttcctgtcaaaaacaaacctgcaacaccagtaccagaccaaaatttcaaaatccccatgtcccaaaacccagttctccctcctatccgatctcatgagcccaccctttctctatctcgtctttatctcagccacgcccaaatctgacgccggacattctcggtcctgcaagcttgaaatgagcccagaaaaatcaaaacccgaaccccgatattccaccctcgagccccttgcctgtccgtctttctcattttctccttctcagatgtgcgcgacagtggtggtgctccaagcaccgcaggccatgaatggaggccacaaatcgtggtggtgctctggttaaactctcatggttggctgggatgatgaaaaagatgaacaagaaaaaaacgaaaaaaaaaagaaaagaaaaatatataataaaataaaataaatttaaaattttaaaatatatttttttaattttttattttattttaatttttttaattaaaattattatttggactaataaaaaattgacatgtggcactttatttgagtttaaccgatcagttaaaaaagggaccaacggacttacagaaaatgtcaccttgggactattactaccaattttttaggttgaggactaatcttcattaactctaagtttttgggaatttttacattatcctaatatataataataaatttgtttgaaattaaatatattcatgcaaggccgagattggacagttgttgtaaatgttcaaattttaaaaagcatcgaatagttattgtgttatcacacaatataagttagatatctctttgtaaatttttgtgcaaaatttagttcaaaaaatgaaggttttttttttttttt

SEQ ID NO: 214962 - DNA, 590 bp, Cannabis indica
tttttagcacatgaagagtgagtattttctttgaaaatagatgatcgagaaggtcaaacatttttcattgggaacaatgagagaatgctattgtttctgttttaatgatagtgtgtgagagggatgttctttatattattatttgttagtgcttgtaatattttgtctcatttataatttggtgtgtgattttgaattataccggttagtaatttgagaagatagaaaacttgctgctagagaaatgtgatgtgtggttattcaagatgataatatgctgccagtgaaaaagatttttttttaataagagagccttgtattatctttgggtaatttaaatatctaattggtatggttagtgttctaattaatcttaattattttttcttttgttatggtttggtgctttgaacttaaaactttaggattgtttggttagtgagaaagtgatttcttgatgatctttaatttttatttttatttttttttaaaattcagatcttctgatgattttcaatcatctatgtgtttatacaaatatatatatatatatatatatatatatataaattagataacaaaaaataagc

SEQ ID NO: 214963 - DNA, 953 bp, Cannabis indica
agaagaagaagaaaaaaaaagaaagcactttttattatacaaataatattattggttgagtcatttgccaactcaagaagaagaagaagaagcagaaacaagccaaagctattgtagtacaaaatttgaggcaccccaaaacaaaagagagagaaagaaagaaagaaagtaagtaaaagagtctgttttgttttgaaatgtctagtgttgttctttgggtacatgtaagtcctaaagagagtataagctctgtgttgagctttgttgggagcaaaaatggtggaacaaagaggtcaaaaatagtggtgtaataataataataataagttgagtttgtcaagtggggtttgggcttactcgggcacagttgcgaatccagcaaggtcttcagaagagaaggtgtatgaagttgtgcttaaacaagctgctctggttcgagaacagaggaaacccaaagagaaaaatttgaacttgaatccacccaccattcaaactgatggaaccaccaattggggtctcttgaatgaagcttatgatcgttgtggtgaagtttgtgctgaatatgccaagactttttatctgggtatttcttttttttttttttttttggtttatttaaagctttctggttcttaatcaaaaaacaaaagaatatcatgtttttgtatgattttgattcaattgatgtaaaccatttgggaaaccaatctaaattgatcagtttctttgttttgattctcaggcacaatgcttatgacaccagaaagaagaaaaagctatttgggccatttatggttcgtatgattattaccactaagcttatgatgcatgaaggtcattttggatgaccccttaattgatttcatctcttgttattcatttgtttgtttccttaattagtaagtgagcaaaataagcaagtagctagctagctatataggttggtttggtgg

SEQ ID NO: 214964 - DNA, 1015 bp, Cannabis indica
caaatttcattttaatatgtccaataaagattctattatattaaataataaataacactatatttagataaaataatatattatattaattattgcgataaattttattaatataatttaagttgtattatttaatacataataaatgattcgtattagtttatattacaatatttaaaaaggatctagggtcaacccaaatctctgactcgaatctagagacaaggacccagactcgaggcctggattcgaactcggatcgagatctatgactggacccaaacctcggacccgtgaccctaaccctaacttggacccgtacccagacctggactcgaactctaacccggaccctaacccggacctagaccagcgacccgaacccaaacccaggacttgaccaaaacctggacccgggactcggaccctagacccaaactcgactccaagttagtgtcggggtcgagtttattaaaaatatactataactttacacaacctattaatacagatcaatacaccaaacatactattgtattaaataatactaatacaatacaatacggcgtaccaaacaagccttaatgaactctctatttgtatggaaaagttcgctaatatatatatatgttggaatttttttttcccaaagttaatgaattttcacaagatgagaatgtcttagtgggtgtaaaactagaaagagttacacatggactataagcttttgtttacaagagtatataaattaagtacaactttgacacttaggatatgttgtgaatattttaacacgaaagtgtacgtattcattgcaagtatttactcacacaggtgaagtcgaagccaaaggaattataataagtgcgttaaaactaaacttttatttctattaggcaaaatcacatttttaagagaaaattaaagctaaaagcaataaaaacaaaaaacaaatagatctaaatgcaaattgacaggatcagagttggtaattgatttcagttgtatctatcta

SEQ ID NO: 214965 - DNA, 673 bp, Cannabis indica
cagccattagtgatagagtgagtgcccacacacatcaagtggtatctcaatcatagtgtggaagactgtgaagaatccaatcaacaaaaaggagaatcgggctcaagaaggagagaaagagatccatgttcagatcttgataatgctctgctacaaaaaggaatcaagggctagagatctgaacggaatgagtcattatattccgctgcacccaatgtaaggttttcttaaacccttatgtgtttatttcatttttttagaaattcatattaggatgttaatgaaacatacttgttagtaaatctagatcctggtaaaataattccaacaactattacttaattttttttttcattttttttataattttttttttgtaaaaaaaaaatcatatttttgcacaaaaaaaaaaagtattgaaacccacaaattttgtaattttctataattgttttataataaattagtagttatttttgaataaaggattagaagttctactgtttatatttatatataaaaataaaaatacgtttctaccacttaatgtaaataatatttttttaattaaatttatataaaatatataaacttgtaaatttttctaaaatttaacctatcccatcccaaatctgagtgttaatcatcccaattcttcttcttcttttttttt

SEQ ID NO: 214966 - DNA, 602 bp, Cannabis indica
taggaaacacgcaaaacattcaatttattagaaaatttttagaatatataaattatataaaaaaaaaaaaaagattacataataagattttgctcattatcctttcttgtaatataagaatgtaaaagaaattacatgaaattaaaattttagaatttttcgttaaaagaaaaaaaaaactttaaccttctaaagcactgaagaatttaagaacacttgcaccaatttaaagagctagtcaatattcttccttttgagatcctcatcagcaattttaaaactgtaaattcaataaatttgtctactattattataaaattccaaaattatattcaaaaatattcttgataattatatatataaacattctcaataatgaatcaaaaataattttgactcatttacataaatattagaacaaagcatagaacaaaaatactatacacttttgcaatatttttgtttttgagatcctcatcagtaatcttaaaactgtaaattcaacaaattttttctattctttattataaaattccaaaattatattcaaaagtattctcaataattatatataaacattctcaataatgagtcaaaaacaa

SEQ ID NO: 214967 - DNA, 1207 bp, Cannabis indica
ttttgaatagtcacattcatttgtggtgtgaccaatatcaccatgacattcgaactttttgtttggatctcttctttcttttctacctttgtacataggcgaaggcttcatgtagtgcaccatgttacaggttgccttgtatacattttcctaagtacctatgagacttgtgtactcagtgtatcttgattcttgggtttttacttttttgctgactcactccaatttggacccttcaaactctttttactctgcgagtgggttatattggacactagcttcacaaaagtacttggtccatataccgtgggagtcgtaaaacttgttggcaaggataaatggatggagttgtcatctaccagggttgggcatttattatttcagtggaaggagctgggactactccatatgcttgagcataagcatcttttagatttacaaatccttgagctcttgctaagaactcactcaatgtatctgccctttttcattgaagatctccccaaaacaatgaacccgttgtaagtcctgatgttagggtcaccattttaatgtcatcagtgaccttggttttagcagccacattcatcatgcgttggataaacttcttcaagttttctccttgttgttgcttgacgctagtcagagagctggcttccaaatcatagtccttggctgctataagctgctttttgaacattacttgtaggtctctctggagacaacattttccaccagtccttcgcggacttgcttagtctaattaaaaaaataaaaattttgtatcatcactggccttagtgagttgcataatacgattgtatatagacaaatggtccttggggtccgtacgcccttcatatagctccatttgtggcattctaaaattatccgacagtggtggatcaatgattctcatcacacaaggctccatatcttctttctcagagttagatatgacaccactttattttctagaaatcctttttgtgactttcatcaattcctcaatcttaaattcatggtgttgagtcttatcacttgaagattctcttctacaaacacaatcgttgatgtggtttctcaaatcattattgcgttgtcttgctttttttctttggctctttccctcttagcattcaatcttcttcgaagatcatttgtgaaaaggcttccactactgccatctgtcactgaatgtacttcg

SEQ ID NO: 214968 - DNA, 557 bp, Cannabis indica
atcaaagacttcttcaagatttccaaactcttatttaatatacttgctaatggagtgccttttgagtgtgggaaggactgccttgaagcctttcaaattctcaaggagaagttaatttcaacgtcgattgtcactactccagattgggagctaactttcaaaatcatgtgtgaggccagtgattatgctattggtgcagtattaggacaaagggtagacaaggtatttcagactacctaccatgcaagcaaaatcttgaatgatggccaactaaattatgctactgccataatgtttgcatgtgacaaattccaaccatacttgattggaagtaaagtgatagtgtacaccaaccattcagtaatcaagtatttgatgactaaaaaggatgccaaaccgagactgattcgatgggttcttcttctataggaatttgatttagaaatcaaagacaagaagggcacacaaaatttggtagcagatcatctatcaaggttggagctcgaagggagcaagaatacaaaagaggtatagattaatgaagactttcctgatga

SEQ ID NO: 214969 - DNA, 502 bp, Cannabis indica
gattttatgtatgtttttaggctgttctgttctaatctatacacatctcccacattaaaacacatcacctaatgtaggaagccaaaaaaaaaaaaaaaatatttgaactctttcatcattttcttaacagttgacggattttgggctctcaaaggttggtcttatcaacagtactgatgatttatctggcccagcagtaagtacgacatcactaatggcggaagatgagcctgagttatctttgtctgagcatcagcaagaaagacgaaagaagcgttctgctgttggcacacctgactatttggcaccagagatactgttgggaacaggacatggtttgtatagtcctctttctgtttgaggtgcattgaatttcttcaatttatctctcctgaactccaattaatttagtggcctaaaaggaatactatagttgtctgggagataagtttttttaatccattattatgttgtgatttcattctatgatgtattgaaataa

SEQ ID NO: 214970 - DNA, 609 bp, Cannabis indica
ttatctagaagtatggttgtggaaaaattaagagtagccgtgggctttgaaggggctatctcttttgatgttcaaggcaaaagtggtggagtagcgttactatggaggcatgagaatgaagctcaactattgggttatggtcgggattatatcgatgtggagattgttggggacaatggtcaaaagtggcggttgacgggtctttatggggaaccaaatagaagctatcgaaagcgtacttgggatcttattcgggatttaaaagccaagtctgtcttgccttggtgtattattggggacctcaataatgttacttctcaatccgacaaacgtggaggtaatagctatcctaattggttaattgatgggttttgtgatactttatctgattgtgaattgattgatttggagttgtgtggttatccctttacttgggagcgtggaagaggtagttcggattggattgaagtgagaattgatagagctttagtgagccaatcttggctgaatttatttccgtccgcaaagttatggaatcttgaaactacaaccacagatcattgcccaattcatttagttcccaccactcctttgggaattgtcaaagcc

SEQ ID NO: 214971 - DNA, 663 bp, Cannabis indica
taattaactttcttgattatccttaattagtttccaataactcttttaccttaattaattcaaagcatgatcatatataataaattaatattttatttgcagattttcgtgtgggatgttggaacttcatgctcgtattctactttaactggccatttatctttaatcaccgatattcaatttcaacagaattcgagtatttttgcatcttcttcctttgatggaacaataaaaatatgggatgcagctagtgtaagtacttaaatctttgaaatttttaaatagtagaaacaaaaattaaaaaaaaaaatacaaaaatacgataagataatttttatttttttatttttaagctttgaactttttatttacaaaaatacgtactccagtaaaaatagtaaaaataataaggcaaattggttttttttgttgttatattatagttgtcatgagattacttttctgactgtttttagttgttttataatttacttatagttgatttgtagttgtcgtgatgttgattttttattgtttcttacattttattaaaaaaaaatatatttttgtaatttcaactggaaaaacatatttttgtattaaaaactttgcatcctaatattataaataaaacataattttttttttttttttgaaattact

SEQ ID NO: 214972 - DNA, 844 bp, Cannabis indica
cttattttagaaagtatttatgcatgactaaaatgtagaaagtttttgagggggacaaaagtaggattttgaaagaaaatcaacgaaaactcaataattatgtggtgcttcaataatacaccctaaattggtgtttttgatatctaaatagttataaatttaattattattactttatataataatatacaatgtaataatataagacaacaatttacaatgccaatgctaggatttaaacggttaatttcatacatttataaataaaaaagacatgtataacaaattgtttgaatcttacttttaacatattatattattcaaaaaaatttaaaaatttataaaaattcttaaatagttacgatgcatatatagtgttatatattaaaaaattaaaattaaaactatctaaatatcgaaaataattttttaaaaaatacatccatacaatcattttaaaagggccacaataggatttttttttataatattatagttattaagtaatcaaacagtagtacttaattagtaagatttttgaatggatctaatttttttctgtattacatgaataaataatctgttaataaaatcattgcaaaaaaaaaaaacagtagcaagattcttgaatggatctaatatttttcttctgtattagatgaataaataatctgttaacggactactctagttactcaatccaattatttttctgcaccatggtcatggttcatgctatatatcatcaatatatatatatatagtcactacagatattgttttattgatgcttttaaggtttttgctaagtaggtactgttagtgtttggtttctttattaaag

SEQ ID NO: 214973 - DNA, 559 bp, Cannabis indica
ctgttaaccccaggtgtaataagtgcaatgcttgcaccagaaagttggtccgtgcagcttccattcaacatgcaatttccatgttgattcttcaagttcttgctgctgctcttgctctcgcttcttctctagttctcgcttttctcctaaatcttgagagatttcaagagatattcttgtacattcagccacaaagttggtaagggcttgaccttttatggccactctcagttgatatgtgatattgaatggtccaagttcaatggcccacttgagtagtcggcctgatgctttaggttttggcaaaacctgccgcaatggctggtcggtgtacacccttactttttttttggtaaatcattgtaatgcattacctcaacaatttgtttacaacctattagcatcttcaaagagaagatctatttctatgtgtgagaagaattcaaatcacaattttacatcccaatattacatgattcccctctatttcccatttgctattgttgtacaatctctaaaaaccattgattgtcatatgtagatacatttttaggccaaa

SEQ ID NO: 214974 - DNA, 427 bp, Cannabis indica
gtgtcctctttttagcagcttaaaaaaataaaaaataaaaggaaaatatataaaaatggttgttgctgataaactctttttatattacaattattaattatattaattatagttggatttattaaagtcaatatttagtttaattgccaaaatattctaaatatgatcaatattattttgttaccaatttgatttagttacataaattatatttttttattaattgtcaaaatattttgacaatcaattgaggtagatactttgatgaaatgtctcacctatataaatatagagtatttggccctaggctcactactcattatgtgaaacacaataaattcatctaaaaagagtagagagagtttggaaacccgattacccacactaatcaatttcttttgcggatccaaagcttgtgagggatttt

SEQ ID NO: 214975 - DNA, 943 bp, Cannabis indica
gttttgaaattttaaaaaactaatattactaatttggttacaaaaatataaaaatttgaaccaaaataaaccgtgaacacttctaagaggatgaataattgttgcattttgtgtggcaatggtttgtaatatttgtgtgataatttgttagtggtaagttacttaaaattgagtgctgcaaatgttgtgaatgcccttaatgcttaaataattactgtatagaatattatgaaaatcaaagtattgtatacttaaaatttgtaatcttatttttttttacccaaaaaatatatatatataaaaaataaatgatgtatttttcattttttaacacaaaaaatgtggaaaagaagtttgcgatgctccaaattttagtataaatcaaaacacaatattcaacttaatttttctacaggacattcccattcaaccgacaaccattgacaccttaaaacacttttacaaagtctcccaaaaaaaaccaacgatatttttttttattattataaaaaaattaaaaaaaaagtagaatttgactaaacaaattgattattaagttaataataaccatattccaacttaactatttcctaatactgatggctaagcccaattaggtttggtctcttctccgctttacaagccaaggaaagcctcctccctaatcttctacaattggcaactgtggttgggaaacatagcatccaaagtagatatcgccacacgaaaactcgcgagaatttgaagaacgagtcacgtgtgtagtaagaaaacgtacgtacgtataaggaggaggatgataagtatgtgggccccacgttttgtctataccataaaaaaagaaggaaaggaatccttggtttcccaaaattaaatagtaatttttaaattaaaaaaaaaactcaaatacgtgattatgaattatgattaggacatttctcaa

SEQ ID NO: 214976 - DNA, 538 bp, Cannabis indica
aatagaaataaaaaattacaagttacaaaaatacctttatataaaattaatagaaatagagaaattcgttaaaagaaaaataatgtctaacaattccatgaaaaaaaaaaaaaacctttctatttgtccaaaaatcctaaacataataaaaaaaaatattgaattcttgtctatgaccaaaaaaaataaataatgcatgtctatagaatttaacccccaccatgatgaagcatttaaagaatacctcctttcttaaatgatcaagcatggtataaaatactcgtaataaatcatgctttgtggccaacatattagtagtgtttaccgaattttttcaaaaaccgattaagaaatagattgagcttaaaaaaaataagtaaatataaatagataaagattttacgtggttagggtgtaataagtcttacaatatttaacacccaaatatgacttttactagcggtgattgtagtatagatcgggcggccgattccacaagaaggtgattatggataaaaacgtagtagaaaataattac

SEQ ID NO: 214977 - DNA, 578 bp, Cannabis indica
taaactcagaacgctcctcgggagaggaatcagatttcggtttcctaaaattctcaggcatgcaagcttcatatacattgttgattgcagtgttccctcccaaggaactaaattgcccacttcttcagcattccattcatctagcttcactgatagaacctaacataaaatttggatcaaatcataaggtaaccccttctaaattgtaaaaaacaattatagctacaagagagagactgacctaatctatgatgaaaaaagtgatttgggattttgtttttacattgctatgccttagagtttcacttgaataactagcaagatgatactaaatatggcccaaccaccattgctttcaaataaaaaagtattaacaaaatgaaatgatctactcaaccctcaaagtccgggttaaaaacttagaccattttatttccaacagaaaaataccccaagaaaatcggtatttaacaaacccaaatgattataggtaactaataattatcacttaaaagcttcacatgttgattctaaactaatctaagactaatacagtggtcactcttgaggcctcttta

SEQ ID NO: 214978 - DNA, 687 bp, Cannabis indica
taatcaaatcgagtcaattacatcctcaaaacgattctcttcaaaataaaaacttacaactcttttacattcaattttgtttatgctagataatttcttttcttgtacaagattaaatttacttttgaagctctttaatactattatctatacaactcagactcatacacttatttttatttatacacaaatttcgattcagctaaatgctataaattgtagctgctaacacatttttatgaatataatttaattttgatgacacattctaatatatattattttttatttttaaaattatatatgtattttttaaaaatcatatttatttattttcaataaaaaattaaaataacaaaatccattaacttaaagttaaaaaaaaagtttattaatgtatacttacacaccacatatataaagcagctcttttttcctgccttttttttaacatttttttttttttataaaacacttttttttctaactaaacaaaaaaaaataagacatgtatacatacacattaccatactatgtaacttctatttaacttattaatcttactggccaaaaaagccatgaggtacaaattaaataaagttaccatatatataaatattatatcacataattttatatattagttggggaaagttaaaaaccgaattcactatttcttgaagctcg

SEQ ID NO: 214979 - DNA, 915 bp, Cannabis indica
agtagatggcactgcagcagtagggtcactaataggctcccccttagttaatggtgcttatgcttaaccagtataacagcttcaacagcagggtcaacataggcgtcccttgagttgagtggatggcgctgcaacaagacgatcatcgtcaagacgggcacggggaatccacacggataggtggaaatccaagatgagtgaggacaatctcatgaaatgcttgggaacaagcctgatgctgagctagccaaaactctctgtgaaagtcatgaaagtcttgttgaagcttatcttgtacttccattccatggtgacgatttggcatcgagcgaggtggcaaagaaatcaaggcccggagcaagcatgtcttgccttttccttgtctgatacatcgagcgatctttcataaacgatgtataagacaagaaaaaggcaagacacgactggtgcctcacaaagccagcctaagcgttttcggaaccttgggcaaaaatttaaaaagggcttttaaaaaaaatgcatttattatccaaataatcctataagaagctcttaaagtataaactgaacattatattatgacagctggctcgtttggtacgcaggactagattggattagataggttaatttgtccaatccagtgttcgggcatgttagaagtctagataactaatccagctaatctcatatgtctgggattatttatcccatccaacagggtgggataaataatccaatccagtcctgcgtaccaaacgggtcctaaaagattgtgtttaacttaggattgtagttatgagattcactcaactccattcatttcattctttaaatataaaacaataggattagcataatgtaagcttactataacatttttataactacatatctatgtattcaagtaaaatt

SEQ ID NO: 214980 - DNA, 620 bp, Cannabis indica
taaaactaaattaataacaacttataactaaatactatgttttagtcacaagtaatattttgttgtgactaaaagtcacatttagtcacaaaaaagtatgttgtggctaaaaaagttgtcactaaaagtaacagtgttttgttatgattagaaaaaatgtagcaattataataagatcacgcgtgatgtctagcactaggatcgacccaaatattggatagtttagattattgcacaagattcttatattaaaagacccattttttcactccttcatataaaataaaatgtatttttttgttttgataaatatatacataaaaatacttcataacaaagtttacctaaaaaaaacctaaaaataaaatttgacttagtttttaatataatagatcaaattttaattttttgttcgaatgcccccaaactggtttgggccgatcttgcttaaccccctttaactatgtcatatcgctataggtaagtataattaaatatgaagtttcatataattttttttgttaagagaagtttcatataatttaatataatgattttatgaaatatcgctaatcaatcacaaagtgtcatctttaggtggtgctagattatactcttat

SEQ ID NO: 214981 - DNA, 754 bp, Cannabis indica
gttgtggcataatcgaggatcctggtatccaaatccggtttgtctttatgcgacacttcttctatcctgaagacctcctggcgagggggtggtgcctctagcagatagatgacaatgactgacttcttttctgtgagcttaaccgctgtgttgtagcattctcgcgagtctaactggattactcgcatagagcctactccagcgggagtagggaacttcattgtgagatgatagattgacgtcacgatcttcatctcttccagaattggccgaccaattacgacattgtatgttgagtattggtcgattactgcgaagtcagccatcgacttggctactataggggcggttcccaaagtaattgggagcttgatccatcccttttaatgcaatgacgtcgccagtaaaaccgtatatactcgacgttacaggtcccagatccttctcatgcaaccccatctgtttgaaggcttggaagttcaagagattcacagaagttccattgtccacgagtatacggtggacgttatccccgccaatatttacaacaatgactaatgcgttagaatgtgggtggtggacccatctggcatcactttccatgaacgtgatgtcatcgcactctctcttgaataacttctccggtcgctcgcttaggttgttcacattggggagtggcttctctttggcttcttttgcatatcgctcctgcgaatttttggagtcacctacaatatggggtccgcctatgatg

SEQ ID NO: 214982 - DNA, 965 bp, Cannabis indica
atttgcatctcgaaatacttgagctgggacaaaggatcttcctttctagtatagatcttctaggtcgcatcttaaacttgtggggcaactcctggatattaatctccgaggagaaaggggttccacgtgctcagtccaagtcgagatcgttgttcctctgaccggccatgccttggaacatactctttagttcgtccagctatggctgcacagctggactaacctgttcagcaccttggccagcctgagtcacatcagcatctttttgagcgcaaatttgagcacgggttccgggctgcacgatcggcgcgtcaagctaatcgtacactcgtctcctcctattgagatcgtttctaacatcatgagttttctccaacttatcaaatacggaaacgcctggctgtctatatgactgattggtttggccaatttattgactggcaccataaacttgattggaattgtttggtatgacttctctcgattaattactagacaaggtctgccggcctaccacttggcccacaggtggaacttttgactggggatttgagggctgaccatttatagtctgagaggtattcatcgctggatcttcgtctgtttcacccaaaggaataacgttcacgggctgctgcctggcagtttgacaggctttttgtataaacacagtggcttgcctgctgcgatcgtcaatgattgcttgttgagccttaacgtctccatctgtttgtccctccattcagtaaacatgcacctctgctcttcgaacgcgagatttaccgcagcacagagttcgtccagatcatgatgtagggtgttggtatgaccctacatgatccaaagagcggcagggacgttctggatctctgtgtcatctccaatggttgtttgaacattagtagcaggtggaatgactgtgttttgaatgccctagtcggttgctgaacttgtattcccagtct

SEQ ID NO: 214983 - DNA, 760 bp, Cannabis indica
tggggaatcgacctaatcaaacaattgcccaaaggcaaaggtggagtacagtacgcagtggttgcagttgattacttcactaaatggacagaagcagagccgctggcaaccatcacatctaagaagtgcaagacttcattgtgaaaaatataatttgtcggttcggactaccgtaaaagatagtctcggacaatggcaaacaatttgacagtaaatccttcattgatttctgtgcaaaccatgggatcataaaaagtttctccacagtggcacatccccaagaaaatggccaagtcgaagcagtcaacaagacactcaaagatactctaaagaaacgacttgaagatgctaaaagaaactggccggaagaactccctaaagtattatggtcgtaccacacaattgagaaaacagcgaccggacagactccatttgccatgacatatggttatgaagctatgatacccgtagaacttgaaccttcgtcccatagaagatggacatatgaccaagaagttaatcatgcactcctcgcagaatcacttgatgaaatcaaagaaaagcgaaccgcagcaaacttgaaatcggtagcccatcaaaaaaaggtagctccgtactttaacaagcaagtgaaagcacggaaattctttgtgggagatattgtcctcagaagggtatttttgaacaccaaagatagcacagcagctgtgctcggaccgaaccgggaaggaccatattaggtatcgaagttctggaatca

SEQ ID NO: 214984 - DNA, 805 bp, Cannabis indica
agtactctcccaagacttgatatactattagctatgaatcactaaagcactcaaggttcttgactttcaacatctcggctattcttaatcctgttaacaaggcttcatcatctgtctcgttattcaaagtttcaaactgaaacctaagtgcataatgaaatttaaagctttatggtgacaccactattactcctacccccaaggcattcttgttgaaagctccatcgatgaacagtttccaagtttcttatttcatttcctattctgaagtcttctcgcgagttaattcctgtcctttgattgaagttctcggatgataagttatcttgaattgtcctaactcattcgaccatttaatcttcttgatgcatcaagttttgacaatacttgtcgtaatggttgattcgttaggaccttgataggatgtgcttaaaagtagggtcgtaatttacgagatgcatgtaccaagtagagtgcaagtttttctaaaggtgggtatctcgattttgcccccaataaccttttactcacatagtaaacaagttgctagtttctgccttcttctcacactagtgtcacacttatggcatttttttgagacatccaaaaaaaggaacaatgtctccccaaaaattagtttggccaacactagtggcgtggaaaggtatttcttttttcctttgaatgcttcttcgcactcttcattccattcaaactttttattgcctcgcaagatattaaaaaatgggaggcatttatcagttgacttcaatatgaatctattgagctctaccattcttcccat

SEQ ID NO: 214985 - DNA, 783 bp, Cannabis indica
tttgttaaaaaaattgagttttggtgaaatctgcattttctctggttttttcatataaggtatgatggagtacgatagtggtctgatggtgtgtacgataatagcgtaatctgaaggttaagggatgaaggttcgatatggtatgatagtagtactataggtgataaagtatgatagtggtacgatggggtatgatagggtacgatatggtttaagttgttgcttaaaatttatataaattttaagcacttattgtaccactattggaccatatcattcatacatttatcaactatcagactatcatcgaatcatatcatacttttatcatggcataaattttaagcaactttcggaccactatcgtatacgtactgcaacgtaccttcatccctaaccttcaaattacactgctatcgtatccatcatcgaaccactatcgtacctcatcataccacatgcacatacaaaaaaatcacagaaaatgcagattcaccaaaactcgatttttactaaaaaatacaaagaaactacatatcgtttgtctgtacgtttgacagtaatggtcgtgggtcatcaatcacgcaccaaagagaatcaaagagaaggagggtcgtgggtctcagtcacgcaacaaagacagctagagagagggagggtcgtgggtgatggtcaccgaagttcgacgatggtttcgatggtggagtttggtgagaaccagagaaagagaaagagaaaagagctgagaaaatttgggtagtttttttcaaatgagaggggatc

SEQ ID NO: 214986 - DNA, 687 bp, Cannabis indica
gtccctgtcttggttttggtttttgtcctagtcacggtttgggttttggtcatggtctgggtttttatttgggttttggttcaggtcttggtcctggttcttgtcctagtcctagtcctagtcttaatttgggttcgggtctgaatctaagtctaggtccggatcttgctccgggtgtgggttagggtcttgggtctgggtccgggttaaggtccgagtcccaagtttcgatctcgatctaagtctgcgtttagtttcaagtctatgtcttgggttccatcaaattctgggttcgagtttgggtccgggtgcagctctaggtttgggtctgattctgggcttgggtctgagttcgggtcccgagtttgggtccaggttcaggtttggtcctaatatgtgttcgtgtctaggttcctgtgctggtttgggtctggggaaggttttgggtctgggtctgggtccgacttctgattcacgagtccagttcaggtcctagttcggattcgactcctggatttagaccttgctctaggttccggggactaggtccctggtctaggtcccccatccatgtcccgttcttaggtcttggtctgggtccatgtccgggtttgggtccgtgagtcttcattttagttccagctctcggtctggatttaggtccagattttagtccctattttggtc

SEQ ID NO: 214987 - DNA, 535 bp, Cannabis indica
ataaatatttattttagtaattttttaatccaccacatttttctttgaaaatacataataatttcattactacttagggtccaattaatttcaggaccgaccttgaccataatattaaaattgtaatttgtaatcaacatgagtgaagaaaaacatatagagttatcaaaaaataaaatagaaacctaattattaaaaagaactatttttatttttatgtgcaatgtataaagaatcaaaagattaaaataatagtaatgattgtgacataatgaaattatacatttaaacattttttttacacaataatacattataaattttaactatacaattaaaaatgatgtatttcttaaaactatttatgatgtttggaaaaagtatatgtctataattattcttaagatatctttgaataataataaagaattcggttgattattgtttggtgcttaagtctacctacactttccttttaatttgggtacacttatgttgcggaaaaaagaaacttttacataatacacttcaaatt

SEQ ID NO: 214988 - DNA, 585 bp, Cannabis indica
atggcaagaatcaataatcaccttggggccaaattgttcagtatcaattgtgccataagttgggacacacagttgccaaatgcttctatagattcgacaaatcattccaaggaccagaaactctgcaatcttttgcatgaagtgccaatattgctgaagctgcacaactctatgcctcacctgaaatgcttggtgactctagctggtatccaaacacaagagccacccatcatttaacctccaatgctcagaacatgtcattcacacatgactaccaaggagatcagcaaattcaaatgggtgttggttcaggtgtgcctattcatactatagaaaaaacatcctttattttaccatttcagccaaaaaatacttgttcttaacaatttactacatgttccatctatcaccaacaatttgttaagtgtatctcaatttgcatgataacaatgtttggtttgtaattttacccctacttattgtcttgtcaggacttggataccaagaagaccttgctggtttggtaggcttgatcaaggtctatgcaagtttgatgtcgttcaactccataccttatctccttct

SEQ ID NO: 214989 - DNA, 782 bp, Cannabis indica
tatattacttctgtctctctatttcaacaagcatcttattttaatttttgattttgcaaaatctaactcgatctaactttattatctagtaaaatcaaaaatattatataaatgtgatcttttttgtaaatatttattattaaaaatttcacaagaaatagtgaaatcatattagttaaaaccccacctactaagtaatttttttctttatttttttccatatatttttgaagaaaaatcttctttatttaaaatttagtgtagaagaaaatttacattgactaaagggtcagcatattcccaaaaagatttgacacgtttacttggaacaaatatggcgcttggcttagtaataatcttcaaagaaagggacataattttaacatttcattaggttatttgattattcatcattggcatatttactattcaaatcaaaattcagtcattttattaatacaacacaaaaaatttatacatttttattttgtaataaataatattattattaagagtaatttgtgttataaatactaaattttaattctcgtaagttatttttaaaaattctataagtacaaaactgttaagtgtaaattaatatccacttgtatcggtatagaaacaatgtagcttataaaatcatctcaaaggtttgatcgtctaatcttttgattatttttaattgtggcctagcatatggaatattcgaacaagcatatgtcttggcgaaacttactcaagagtgaggaaaatagttgaatggtgtggcaagtgtttac

SEQ ID NO: 214990 - DNA, 957 bp, Cannabis indica
ctactggaacctagaacatttgtgaccctattatcaataaataaatgatgtaactcgcattacgtgaggtaaacttcaaacttcagttatgagtaaagagaatcatttatattaagtaattacaaagtttcgttctttaaaaattacttaaggggcatttatgtatgattaaccggaattcatctggaaatacattgtataatgcaaacctgtcatttcaaaagaaatttgaaattcaaagtttcttagctaaacctctttaacgaaagtggagtcgaaccgttataactctctgaccaaatctttttgacgagagaggggtcgaatcgttataacaccttgatcaaacctttttgatgaagaagggatcaaacagctataattttttatttataacctatctgacgggaaaagaaaaatcgaaagttataactcgcgtataaaactgaatactaacggttctcgcgagctaggaaagtacaaaacgaggcatcgcgatgtctggataaaagtacttaaacctagaaaatggatagataatataactattcatacgagcaaattaaaaatatacaaagtgataaaatccttaaagtatatttaagtttgcttaaggcagattataactgcaatagcgaggcagaattgacaactgctcaaaaatcaaaaagtttggtagattactaactacttaaacaaaaagattacgagcaatggagaaacccaaaagtactgtatatttgatcaaaatatagttgtttacattgtgaataaaaacacaagcaaacacaattgtattaagttcgaatgaaaacagtacaaggcatttaggatgagaaaacctaagactggttacaaacttgtctttacaaaaatggtcactaggggcaaaccattaagtcattctcctaaataaaagatgagaggggaagccgatgaaatcgagaaagaccgtct

SEQ ID NO: 214991 - DNA, 664 bp, Cannabis indica
tataaaaaaaaaaacatttgcacatacaatattgttataaataacaacccatttgaaaaaaaaaaaaaaaaaaactaacagtactcgtaatatactcctgcaaaaggtacaccaaccatacaatttttcttttttttttttttaaaaaaaaaggttatatgtttactatttattttcgtgtattttggtagataagatatttacaatatataattttgtgctatacatatatataaggcagagacgtggtcaaactcttattgttctttgtctttactaagactataattaaggatgcagtgaggaaaaccacataacattttccaggctttaatgacttatttgtttatatatagaaagagtaattaaatcggatttatcttatatattgtgttctaatgtaacatagaatctacgtttacttttgtttggaataatatgaaccaccaacttggtattaatgtgtgaaacaagtacttatatttttagatagacaaatacttatgtccattttaataattagacatatatagtttttggaaaatggttagggagaatcgtaaaaaatgtctgtacatagaattttttttttcttcatttatgtgtcacttttcatatttaatattaatatttaattaattccttttattttattttttttaat

SEQ ID NO: 214992 - DNA, 553 bp, Cannabis indica
atatatatatatatatacatgaccttagcattgtagaagggactaagtctcccttatctcattaacttgagattttcctcttgattctcactattgtaatcttacgagagccactccagaatctacaacacttgtaatctgagtggtattatctctaatatcaatacaaccaaaagggaagtaggtcattatccactaactaagggggctgaacctctataaaaatattgtgtcccttttatttacttgttctttttgtgtacacgtggtggtgatatcagtcataaatacgactctactatcggttggcaaaatttgaggtcaacaatttggtgctttcattaagagagttgtggattgacttgatctatcaccatggttgtaacaaggagaacttcgtctataactcttgcctcatcaagtcttccacaacaccccatgactcctaatcttgattttcatgttctagccaccaatagaatcaccacatgtttgacagatgtggccagccctaccaactcagcaggcaaaacaaacttgaccaacataactc

SEQ ID NO: 214993 - DNA, 1290 bp, Cannabis indica
aaatataaaaaaaaaataaatttaaagagtaaatttaaaaattatatatagaaaaatgtgagtggagttttgtacccccataccaccactgattttagctattataaagtacagctaagatttgtttggtgaaatatctcattcaaattaataacttataataacttcatgtggtctctcatcaaattaaatgaaaagatatatatggacagtgcaagtcctcatccatttgattgaataattataatttggtccaaagccaaattaatattcaagcacagaataacaacattctatctaattacagttaccacttcattctaccaaaattatcatacaattttttatcttaaaataaaaacaaaaaagcgatattttcaaaagttataattataaaaacaaaattgaagaatcatcgtaaaaaaaatagaggtctaaaaagataattgataaatctctatagaaaactcatcatatgatttcaaaatcattatcatcaccgtatcttttttgttgttgtcactatattcaaggttgttgtcatcactatatatctcacttgtagttgtcatcactacattgaaaattaatgttatcaccgtatctcacttattgtcgttactatcattgtcatgctaagtttgccctcaatataaaataaatcaaataatgagttaactactatagaagaagaatattatgtgactagtggatttttttttttaaaaactaagttgaaagagaataatgtgagggtaatgtttttccttctaaaaaaaatcaaagacaccattatatatataaatatatgtaaagtgagattgatgtgcttagacactctctcttaagtgtcaaaataaggttaaaaaaaattaagttgcattatatattgttatacttatatttgtaccttttaattctaaaagcggtaagtatgtagattaagattaagcataacaatgctattataataatttcttgagccaagcttagtataattaatgctctattaaagctaattaaaaaattaaattgaagaagcaattgtattatattggaagatgtatatatataaaatatataaagatatatatacataaagattttaattatctcaatctgaaaaagaaaaaaaggccaaaaacgtgatgtgttatgtgagatttgatgttattatttttaataaagtaaggcttgtggcttctcttctcttctcctccacactactatatatacatacatacttgtttctctcttacacaaacacataatattatagttatctctttc

SEQ ID NO: 214994 - DNA, 980 bp, Cannabis indica
ttaatactattttagattttgtggtttgtaaaaattattaattgtatcatttattttattaaatgataaaatagaccctataatttttaaaatagtaaaaataggactctaaactcaattttcaaaaaatttattttttaatataacaaactttaagacaatttctagcacaaggagatacagaaaatataactaattttgtcataacatctctagattagattattattaagttttattttgacaaaaaatcaattcagattcttatttgtataattttaaaaaatacagggtctattttgtcatttaacaaaacaaatggtctaattaataatttttgtaaatacaaagtctaaaatagtatttacttttttttttgttaattttagttctcgaaaacgtatgttaaaatagcagtgtgttatacttccaataaatttaaaaaattttaaacacgcgtaataaattgaaatatcaataattttatttttaatattgtaaaatattttaaaaaattaagaaaataatattataataaaaatggtaaataaaaaattttaaaagtggagattgattaaaaagttatggtaagaagttgttaagtagcactctcttctctctcttctatttagttagaaaattaagtccattttcatgggtttaagtttacttaacaactttattcaatcctcttctcttaccaataataaaaaaaattaactcactcacactactgaaacgtccatcttttaagactctgaaagttcaataatataatattcttgagaatattaaatagatataataaataatataaatgaattattttttaaatttggaagttatttagtgttgcatggaacagccaacaacccaaaataagtggttttgtatttagctcattcatgcttatatttggctatatacacaacaagactcatgctcctttttacctcagcaaaagggaaaatcatgacttt

SEQ ID NO: 214995 - DNA, 1029 bp, Cannabis indica
aaaactgaaaatacaactaaacagatgccataagttttttttatcacattattcaagatcgatgttaattcgtgacaatttatcaagatatgtagcattattcataatatattgacgaacatttctaagacctccattcaacttctctgtactctttcgtacataaccaatacatatcgacgaaataaaaggtcaaagaattaaaataataacacgaggaaaattaattagtgacgactttgtcgtcattaaatgctcaaaaagttgtcacaagtgattgattatatgctttgactggtgataatccatttaagctttgattaaaagtattgatgatactctatttgttggagaaaattagtgttgcatccatccaattcaaaaaaaaaaaaaatccaaccgatttaatccaattataaataattgaatttgaaaattcatcatctaaatccaatctaattagacctcaaaatccaatctaatctaatccacgattgggtcaattttttaatagggtatgatcaattacacacttaaattttaatattaacttaaaaattaaaaatatgaagaaaaatacgtaaaaactaaataataaatattatcctttatttaagtttaatattctctaaagataagagtaatgcaactaaaaatttgaaataattaaaacaacaactattgtataagtaataaaatttaaaacatcatgaaaagaatataaaaaaaattaagtggcaaattcaacacaaaagaaatctactaaaaatgtaaatcaatatatattattttttaattattttttattatcttaataaatataaataattttttaatatataaaaatgtaatttgattagatcaatttttaaattggattttggagattgacatccactaaccaatctaatttaattagagcatctctggagatgtaaataagtaatacaaaggcaaaatatagctcactttgttaaaagtctagtctaatggtgtgctaaattatgatgcaaaaaatctcgcataacc

SEQ ID NO: 214996 - DNA, 584 bp, Cannabis indica
gatatttttttattatttagtacgctttaagaatttatagatcttaattcttattccaaaagcatttttctttagggagttttcgatttttgacaaagtactttcatagatttaacaaccgacagacaaagccctcctcctaaaactcctatctattccctttatttacatatcacatctttttcattttcactcgtaatttcgatttttatttcataaaacacaaatacaaatttatagtatttgtgtttttttattcgtaattacttattttatttttcatcacgttgccttgccatggtagtgtgatggagagaaatagagaataagttgtttttggagtggcgggcccacccaatttttttgccaacctttagtaatcataaaaaaaaataataatagtaataataaaaagaaagtaagaataacacatgttatactcgtatgggtaaggtataaaatgtgaaatgcacggtgattttggtaagtggtagtttatgcagtaacttcagtttgtggaaaaaatggttgaaatatgaatattatattttaaattatttatgtaataatcaaataaatatata

SEQ ID NO: 214997 - DNA, 500 bp, Cannabis indica
cctcttgggtcgcacttagccttttttaagttttatgattccattgagggagcttgtagcccttaggcgactctcgacttcttacattgcattcgtggcacttaaagtgtattttgaatgcaagaaaataggtattccttttagagaggcgtccatctcatagtcataccaaattctctttcttttttttagcgaggccatgagtttctttcaagactttcttctcggccgaccaaagatgtagcattttttacgacactaaacacttaaattttagtctaaatattttcttcctcttagagaaaaagggaaggactaaaaatccactttaaagcaatcattggaacacactaacataaatccaagacatcatttttctttcatctcgcttttacaaaaagggggtctgaaggtccttgcggcctttcacttatttacaatgaactgaaaggtaaacatgactattggggtcacccgatgggtttccaccttgattcaca

SEQ ID NO: 214998 - DNA, 886 bp, Cannabis indica
atgtcagttaggtaaaagtcataggtttccatatcctttgtctcaatccagagccaagcaacttcttgctctggtgcacgctgatttgtggggtccttcccatgtctcatccaaagaaaactataaatactacattgtgtttgtagatgattatagtcgattttcttggatctttcctatcactatcactacaagaaatctgaggtttagctacaaataatttacttacaaatatatatttggagctagaagaaaggatttacctacaaataatctaaacttggtattatatgtaggtgaagatattgacgaatttattttagattaaataatatatatttttttcatttaaatattttgaaggaattagaattaacttttgggggcaaagtttcccgcccattctatatgtttcacatttgatttttatttttataattaaataaaatgatatacgcctacatgcaaaaatatgtgaaatgtatatttgactagacatgtacaaatttttgtgacgtgtcatagattcatgaatatttttctttatattaaacttttattctattgatttagaaagatgaaaaattatttacaatttataactaagcttgacctaaccctattcagcttcttcataagacttaagcagccgcctctctgcggaggcacctatctcatcttctctattgatctaccatttttacctcatactttgatctttgatcaatactatcaatcacccttctctcccgtctccactaaagcttccatccaagttcgaagaaaccttaaagtcgccaaatggagttttgaaaaatccttgaagctaccgctggtcccggctcatcatcgtcgccattggtcctcctctgtggctcatcgtcgt

SEQ ID NO: 214999 - DNA, 503 bp, Cannabis indica
aaaatcacccaataatttctcaattctgttatatagcaatctctctaattaatattatttattttcttttttaattctcttatttttttttattttttattagcttcataaatattaattgatataaaatatatacgttatttattttttccaaaattctctcattattttattgtatttttttaaaaaataatatatttttttcatcatgtgagtgatgtagtttttacgtggttttgcagttaaaattctgcatagtccttaagtcaatcttattcagatttctgattgtgtgtgttttttagaaactctctcgtatgagttctcccccttttcttgatcttgcctaccactatttataattacatagtgggcagtaaattacaaaagttgactataatcgttacaacaattattctctcaaatcccgagatttgattacaaatcacgctaagtaaatgaggtttatatttataattgacacagttgtaagtatcccgctt

SEQ ID NO: 215000 - DNA, 829 bp, Cannabis indica
ttttatgaacacccctaatttaatgtatttttattatatagcgtaattaatatattttttaatttatttaaaaatttatatatactttatacattaaataaaaatatatattaattattatggcgtaattattgggctactaaaaaataaaacaatattttatgtgctatatcatatgtaaacatgtacagtaatcagtacataaaaatatatgggtatacatgcatttgaaaggttctttctcattggttgggttggggatttaatttatgtataaagtataacatctaacaaactcattttttggactatatatatggtctattttaaatttcaatgaagattgtggcggcgagtaattacaaacgtgacatgttcactggcttaattcatatgaccgcattctcttccaaatagtttctcttacgattattttgagctgtgcctcattcattttttatcaacttattaaaattaattaagttcttatttttctttagtattttttaaaactggccttattaaaatctcacgagtaaaaccagtaagacaaatctcatgatagaaaaagtgtccaagaaaaatcattaatcaataaatatcagctgcaaagaggtgctaatataactaaggtagcgaagctaccaaccaaaataatcatctgaaaaaaagtgctaaattttgtccttgagtgggcaacaataatcctaagacaataagcaaaaagagaaatcacagataataaattaaagtattttaataattaatacaatatatatgaatgattcacctaatgatttttgagtagcaatattgatgacactgagac

SEQ ID NO: 215001 - DNA, 650 bp, Cannabis indica
atacactttgaattgtattcattacttaagagaataatgtcttttttctagagaagagattgttcacctcttactctgtttatatgtattttgtattgtctcgagtttgtattcaagtctgtaaaagaagaagaacaacaatggtaacttcaggagaaggttctacaagcttttgtgacattacttttcaagtcttgcttttagaggaaataagcactctttaaggagatcgaagggagttcgagcacttgaagtttcaacaagattcgattagaaggtagaatacatcaagcttgcggcatacaataagagggagtctatttatacataagtcaattactttgtatttttgagatctatctaatgaatcttatctctagacgtggccccgtacactagttatcatctatagctatagaaaaattattttagtaccaattttattattccgcatttaattaaaaaattaattaaataataatgtggtaattttaaaatatagaatttcacatattacaattttattttgatttgtttcattttatctaaatagccactacaagaaatgtcacttttgccagcacatttttgtgtctggcaaaagtttagtattgtcgtggtaaaatagaatttacttctaatgtattggt

SEQ ID NO: 215002 - DNA, 521 bp, Cannabis indica
taaatatgtaattatataaatatgagagtaagattataatcttccttaagctaattatgagttaattagttaatgttgagtaaatgaataattaagataatttattaattatagaaattttatcggaatatgtgggtatttgtatactatttttgaaataaaatatttttgagttcgcaaaccatagaaactcgatggattggttaaagatgccatgacgataaagaatgagttatattggaattataccgaactagtttagaatattgaattgtcagtttagtcggggtagttggtaatgaccaaaatacccttaggttataaattaacttaagtgattattggagggataaaatagtcattttattaggttttatattgttttgtcctatatggttttctaggttgaaataaaggtatattattagattaatattaatggatatggatagttaaggttaacgattttcattaaaatcaaaataagaaaacctagcataatctattttctctctctctct

SEQ ID NO: 215003 - DNA, 564 bp, Cannabis indica
  modified_base (503)..(503): a, c, t, g, unknown or other
tcagttaagtggtggttttctttcatcttccctctctttttgtcgtttttgttccttttgtttcatgattaagggcattaattgctctgtgtgttatcccctgttcacacaatcccatcgtattaattgtaaacccactttttctctttattctctttctctttcttcgttttacttctctcctgggggtttatgttgggatctttggcatttaataccacctgagcatatctctagccatcttttctctcttgaagattggaaaatgggggcggaggtctgaaattatgaagattttaatatcttcaccatcattgcgcctcttcaggtggaggctagggatgtgactaggggcgattcgagaaggcatctacggggtttctggttttatctatatatagtaagactaaggtatggtttctggcactttcccttcatcttcttagtttcttggtctgtttgtttgtattctgtgtattttgcttttgctttcttttaaccgntggatgaatttctaatctgttccaatcttagtcttccatctgatgaaaacactatcttcac

SEQ ID NO: 215004 - DNA, 546 bp, Cannabis indica
aattacaataagttttcccaacataactaattaaattttatcaaatagaatatatttacatatatatttttttttatcattagtgcatttggtacttaattgatattactaatatcaataccaaaagatctaaggttccaattctgatcttatcttaattttcaaccccttcgcaaacctagtgattttgatatgaactattttattagttgtattttttaattaaaaatattttatagtttaactaataaatattttaataatgttcaaaaaaaaattaataagtagaaagtcgtatgctaatatattataataagggaaatttgcggcaaaagtacccaaaaacgttcacgttgatgctgattagtccccaaggtccgaaaatagcggcaatagtcctcaaggtcacactttttatttgtccgttggtctccaagttaacagatctgttaaacccaattcaaatgccacgtgtcgaaatattattggtgggtattattattttaatttaaaaaaaaaaaaaataaaaaataaaaaataaaataa

SEQ ID NO: 215005 - DNA, 527 bp, Cannabis indica
acattgtactatgggtaaacattggttggcacgggttgagcttcacgaatcttaactattttggcctacaaaaatttcgaacaaactgttagggttgaataaaaattaaaatatacgacgagtttattaaagataaaaaattacttacatgcagttgttgtgtatgttaatcgcaccatttgttgtccttgtagcgaaactttgcaaaagtatccacagtactagaaagttcacccatcttgggatcagcctatttttatacaatataaaaaattaaaaatatattattaaaaaaatatatgaatttttagacaaatatgttgacaacatcataccccactcacgatgtggctgactatggtcttagacccccatccactttgattcttcatctatcctcagtttttcacattttgtttgactcttgcctgtaatttaaagtaaatttaacgttagcaaaatgagcaaaaaattataagttaatggatattcaattacaacttttattttagacctgttgttttggg

SEQ ID NO: 215006 - DNA, 754 bp, Cannabis indica
gaagagtgttgcggcagttgttagaccgtccatggtctgttgctgaacgggagattcatgcgttgttccgccgccaccgggtcagtggatggaaggcaaacgagaggttgtggattgacgggaacgccgtcttcccggacctctggtttaagaaggagaacgtggtcgtcgagatcgatagctacgcctttcacgggagaccggcagattacgaggcgacggccaggcgccatgcgctgttggttggagctggattgcgtgtcattcgggtcacgccgaatatgattcgggataacccggagctggtactcgacaccgtcaggtcagcgctctggggccgccataggggtgtggttgcagcggcacgaagcggcaagtcgggtctgtgaccaggtgcatgctgcttgtgttggggtccgtcttcttgtcggatccggtcgttgcacgagtgcgaaaaatgtcagcacgctgggggttggggctggatcatgcccggtccgccggaggtcagacttattttgctgttcctcgtgacgggaccgcgaatgagcgggttttccgattaccgctgtgctaattcagtcattgctgcgcgaagagggaagacgtggataggcacgaaccgttgtattcggggacctcgtgcaggcttgtcgtagctgattcacgggtcatggaaatagctgccgatccgcctcggttgtcgtcgaatcggctgccgcgggcgatttttcgccggggcagcggttgaggc

SEQ ID NO: 215007 - DNA, 807 bp, Cannabis indica
gtttagacctaaagttgatgttctagaccctacataatataacgaaaaatatacacatttgttaaattattatgaaatgtatctaataaatattataatttatgaataatcatgatgatgagtctctaaaatacttaattaagtttgttagaaacgattaaattttgttcgaaaatcatacgtaaaaaaataatttgatgcaatatttttgagcatgttcagaagttataatttaagatttgtgtttggatgtcaaatattattaattgtgtatgaaatgaagcattacactcaattattatcacacaattattttattctaaatgtaaacttaattatgtaacttattggatgtgaatgaaggatatataaatataaatattgaatgtgatttattatttcatcataatatttagaataaatactattttagattctataattataaaagttattagttggatcatttattttgttaaatgataaattagaccatgtaatttttaaaataatactataaatagcatcaaaaactgattttttgtcaaaataaaacttgttacactttatgcatttgtttgtgttaggaattatcttcaatgtgattatattaacaaaaaaattgtcaaaaattgaactcatgattctatttatactattctcaaaaatataggatctatatttttgttatttaacaaaacaaaaagtacgtccaattaataacttttataaaatataaaattcgaaatagtattaaccctaatatttatcataacataacataaattcctttatatatatatatat

SEQ ID NO: 215008 - DNA, 533 bp, Cannabis indica
cttatgtcaaacatacattcatcaatagctaatataactctacgtatactaatattactattctaatgtaatataataggcgatcataaacatgtatattgagcatgtaatcacatatacatatcattatactaatcttacctcaattctgaattcatgtgggccagtcaacctgagtggaactgctgctcgacgatttacaggcccttaagtcacaatatttataaaattgatgagtgatacactacatcactttttagggacttaaaatcaaaactaaaagtttctctatccatggataacatggcaataccctaaatatcgtaaaaataggaaaatctagggtgccctaaactgccccaactggtagatcggttcccaactgaaaaaccattgctgtggggtctgcttggggatgaactggtaaaccggttctacaggatcatattgaaacggttgaccggttcagtacaggaacccccaaaaatcttctagaccaatcaaatcgaccccaaatgatcccaaaccttcca

SEQ ID NO: 215009 - DNA, 598 bp, Cannabis indica
tgtgttagcatgtcagttttttttagttgttagatagttttatgttttttgcaacttttactttttttgatttttaaattttctatttcaagttccagatttcactccaaatgttgttgttgaaaaggcagatgccattgcttctgatgaagaagcggatgacactgttacttatactcctctattggataagagaaagcgtgccccgatattgaaatcgccttttgttgattttgggtcggctgatgtgagcagcactctaatggaggtaatttcctcaggttctcaatctcgaagagatgagagggattttaagatggttacttatatgaagggtctttacgctcttaaggattcattttccgatcccatctttcctgaaatcgaggctaagtttgatgcttggattagcaaagggttgctaaaatatccaaggtgattattttctttattctatttttatttttttatttcattttattttgccaattttttgaattcaatattgtttctttgtcgtttttttatataggccttacaatgtttatgaggatggtgcgaagaaaatttctctgaggttcagattaggtgtagatta

SEQ ID NO: 215010 - DNA, 723 bp, Cannabis indica
aatatttaattaatttttaaacaaaggtctacttttacatttttttttaaatgataactttaatgtcaagtttcacataattataactaaagagcattgttattgggcaccagtggtgcccaacacctttcataggtggtaacctacgattggttaccgatattccctaaatcttatttttttaagttatatgaaatctgctacttaattaccaaggaggattgctttttagcatttctcataactaaaatatcacatttgtttttttttctttttgttaattaagatatttaaaaataataatcacttttattaaacatattaattaataataacagaacaaactaataaattttctgcaatgtcttaaaaatattaaaaaaaagggggtaaaatttgggatgaaatctaagattaagatatagatttggaaaatacaattatgtacggaacaaacgatcaagacgaatagacctcgatcgttcaaataagcaacacaaccaaaacgagagaaataccaccattaattctgacgaaatcaactggaaaagaagacatgcaatgatctaaacagaaaatgacgaaaaaaaaccagaaaaactgtgaagaaactgaaattacacatttgttttcggttttattcgatcaaaacaactccccctaatatcgaaatccagattcataaaatgtagatatgtaacaaacagatctagagccgccccc

SEQ ID NO: 215011 - DNA, 623 bp, Cannabis indica
ccacaaattactctttttttttacaaaatgattaggatcactcatgaattaatctttatattttgataaagggaaatttaatatttgtactttcattatctaatctgttcctttttttattatgttttacttttgaatgctttaaaaaaatggtttttattctcctctctccctattttttttcaaccctttctttctctttattttttctcaaacttatttttttttatctttgtatatacatatatttctctgttttttaatacttttacactctctcacaaatattattttaatatttttttagaaaaaaataaaatacaaacacttattctattttttctctctttttcattttcttattattctcactctaactactttaaactatttttctttaattaatcacattttctgaattaattaattttttttaacttttattaaaatatgattcttttacttttattttttttctctatattttttaactcttactctctcttacaaaagaattaagagcacgcttcttattatttttttttatctttcgcataattaataaaagtagtatttttttaaaaaatattttgtagtttgtttagagttaatttatgaataat

SEQ ID NO: 215012 - DNA, 1086 bp, Cannabis indica
taatatatatatatagataataagagtacgtacacttccttaagaaaaaagagaaggagaagaagaagactgaacttataaatgcatatctactataaataattatagaaaataataattcataaacaaacaactataacgtgagcagcatacatcaaattcaattcattatcaagagacaacatgtgatccataactttttagcatatatatagtaacacaaacaagaaattttattagaggcactttccaattccaaatactacatgccattatagttaatcacaccgactttcaatgcatgaaaattaaatagtcaacggctcccaataattaagtactcatggcataaaatatatatagaaaaattgttgttagtgatcatttttaattattatttgtatgtatttttaatattttatatatatataatattgcacacaattcaacatattttacaaccatagtatataaattttaattctatttttttatatgacagttacctataatgtacttataaagagttttttataaaatttcaaaaaattctaaataatttagaatgtaaaaatgatttttttaccgttcatttttttttttttttttggtgtgagcacttccaatagaatttctactttaacttaaaatttcacgttttttattttacataacattatgtattagttttttattatttttttttttataatatcaaaatattatatttttaattatcatttatctatttcaatagttactagtatattgttacgtgcgatgcacgtatgctatgttttatattaagtattatattatgagttcggaaggaaataaatgaatcaaaaataaataatatttaatttaggaacattctcactaccaagaagaaatcttagatatggagtcaaaaacagagcaaaatcaaaattaatgtgtacaagtattcctaagaagctaccactgtcagcctaccagaagtcatgaattttaacaatgctaactgaaatctcatctgctcattataaatcactcaaaatagcacaacaaaagtaacaaagaagtattaaaggtgtaatttttacc

SEQ ID NO: 215013 - DNA, 624 bp, Cannabis indica
aaccactccaaggttaaggttaaggttaataaaaagtcttacttgtgtaattgttatgtatatttttattttgtagtcaactgtaagataaagttatcaatcgtttcccactaataaaatactaaagttgggagaatcactaccattccataagattttagaacttatttatctgcaattaatatagtttgaatagatcttttttccttcttaaacgcgaatagatatggctttatatgttcatttattatatttgcataataatttgtacaggggtataattataccttgttttacttgccactattgtcaatgatcaatactaataaaattggcattcatttaattacgaacgtaagtacctactcaaattaagattattcttttgtgcattttatagaatataacgttcaacctataatgtacactactgttatagaatatatgtttagcatgcttttagatgaaaccctaattactcacctaattttaaaaggaaaatttaaatttatatgtatatatttggtgtatattaaatttttgaattacaagcttattaaaattaaaaaaaaagacatactttatattcataccacttatacttttctctcttgtcttctcttc

SEQ ID NO: 215014 - DNA, 888 bp, Cannabis indica
aatataataaagtataataataagccctttcaatccaaggttgtgtcttgttgacttgttgaggttgaaggagtagaaagagtgcatatagtattgtcatttgagagttttttataaaatatcaaaagtataatctacttagataataaaaatgcatacgtaaaataaatattatgatattaaactgaaattatgaaaaattaaaataaaatataacaaactaaatttatcatcttcgagcaatgcttgtgtttgaagtattttttcctcatccatgtactatggcacaacaatgggttgatgtgatctgctccaccaattcttgagacaaatttatgcttcgaccatccttgagctaagtgaactcctaaaatgatccaaaattcgaccctcagcaaagaatgccgccttagaagcaacagtggtaaccggtatagttaacacatcacgtgccataagtgacaatattttttatttgcacccactactagcccactatcctaaaacattaaattattgagttgactgcttagattcctcttcaaaatacctatcaagttcatttttcatcttgccgccatttttttctatttttcatgccacgaactcatcatggacattatgagacttcttgcctttaggtggactagaaacgatgaatgaggaagaaccatcatcattaataggttaagcttgtgattgagtgcttgagggatcaatacttgatgctgaatcattatattgatcaaacattctccgaattgtttgctctacccttttcaccatctctttgcattctaactccgtataaataaagctaaaacaatgatagagataatcaagtttgtatctaggatcaagaactaaggcaattagaagtgcctcatt

SEQ ID NO: 215015 - DNA, 518 bp, Cannabis indica
cgtatcagttaatgggacacgttaaaccaattacaccccacgattaagaatacattcttcctgttatgttatttcaatccattcatctatataatgcgattgaactgatggaaagaatacatctttcttatagcgaaaaaaaaacacagttttcaacaaaaaaaaaaaaattccatctgcgacatcataaattttagggtgtatttgacagttctctacagtgcaatggggttctgatatagttaagggtgttcatccgattcaatctacactattttgctcgtagtgcatccgatccgcactaggtgtgaatttaatattttggatctaatccgcatagtaactcaaatccaatccaatccgcaaaagtgcatattggatcggttactttttaatatttaattatttaatattggctaattaagatttttacccccaaactttgacatgtaccaaattatgcccctgaacttttaaggtcgttaaaaatgccccatgaactattgagattatttgta

SEQ ID NO: 215016 - DNA, 648 bp, Cannabis indica
ttaatggctaaaagagtagatctcatgtaaaaagcaatccgacactaatgtggattcatgagcttcagtgatccacattgagagactctaaaatgttttagtgacacttcactccgcgacactaatgtgagtgactggaaaaatactatttagtgaccctttagtgttggacactaaactcttttagagttgctcaccgtgcgtcactataagcttttagagtcacacctttttagactgtaaaagtaatagctacacaaacagcgcgtcactatattagtttatttatttattttaattattttttcagataacaaccacactcaaagtgtgtcactatatcctgcttttttcaataaaaaatattaatatttaattttctaatttcagcttatatattataaaatttataataataatttaattgattatattttcataatattttaattaaccatatatattaattatgaattaatatattttagtttaactataaatttaataaaaaattaatataaaaaaattacaattaatttttgaaaaaaaaatttaaataaattcattaaatgagcgaattatgaacaaatcatacaacaaaaaatgagctccaatttgaaaaagacagtggccgtattctacatttca

SEQ ID NO: 215017 - DNA, 731 bp, Cannabis indica
gtaagaattatgtaaacataattctacattgtcagagagtataatttcagatttattgtggagtaataattcaattaataaattggattattctattaaagagtttaataataattaagtgtttattggggcttctaggtataagtctatggtccctagatcacatcaatgcaacactatatatgggaggtttaatttaaaaatgaattgagaaagaattgatttttatgaaaaataatttttctgggcaaagtagtaattttgtataaattattattttaaataattatattaattatgaattgaataattaaaagggatattggcggataaatcatctgaactttaaatttaacacttaactacaataatcgattttttaagggcaaaactacctaaactcccatttcattttgctctgtacccctccgtccaaaaatcatagtgccacagtggactgcccacgtgtacacacttgtacacgtgccccacgtaatattaattttaaaaattaaaaaatcaaaaaaaaatagttttaaatatattttctttttgggatatcggcagctaaactacccgaactttaaattttttaacacttaataaatcagattattctattgaagagtttaataataattaattgtttattagagcttcaaaatataagtctatggtccctagatcacatctatacaatattgtacatgagagatttaatttgaagaatg

SEQ ID NO: 215018 - DNA, 524 bp, Cannabis indica
ttttttttctttcttcttcttccttttattttttcttctttaaactgagagcccatcataacccaccactaacacccacatcactcaccaccataaccccatctcttccccgtactctctcacttaagagtaggtatgaacattcatttaacctaaagactaaaatcccagaaatgaacataatcacatttggaaaaaattagaaacccatagtcgttcaaatgggaatctcacaccattcattccgaccaccaccacataatcgtgaatgagattcaaacagtaagatccaacgcccagatctcttcgcacgacaccaccaccacctccttcccaaacctccctcgaacataccacgccgattctcccattctggatctctctcactcctcttcttcttactagtggtcgtcgaggataataggaggttgggacgatgaagcttcgaatcttgacgagcttgaggatgagatagttgtctggagttaggcttctgagctaaggaaggacaatcttgttctttt

SEQ ID NO: 215019 - DNA, 624 bp, Cannabis indica
tagagcacgcctcacttcctccttagtgaccggatcaaggagttactgattatgagcccaagtaactgcactgggagtagcatcaatgaccggagaaaactgtaaagctgatgtcgtaaatagattcttaaaataattcaacataacatcaggaagacgatcatcccacgagacccaactacccgaatcatcttgaaggcgagaaatcgtattatgctttttcctagcactagctttagcatgaaaaacttggtattactatcaccttctcgaagccataattgcttagatctttgacgctagaaaatctcttgctggtttagggtctcacttaacctcaattcagcctcacgaaatcgttgaatagaaagagagtccctcccttgcttccatcgccgaatctctcttttgcactgcgagatttttttcttgaaattacctgtatacacttttccccaaatagcaagcctctcaccacaatacttcaatttctgacaaatcagctgaccactacactgctcccaacaatcagatacaacttgtagacacatgggctcacgcaaccacgcattctcaaaacggaattggcgaaaaggaacagtaaaattattcgagattggctcc

SEQ ID NO: 215020 - DNA, 586 bp, Cannabis indica
tgaagtgtaaaaatgaaaaagacacaccaaaataaaatgtaacaagttgaatgttattattaaggtaaatattattttggaccctgtgttttgcaaaagttaccgattggattttgtgttttgttaaatgataaaatggaccctgtattttttaaaatagtataaataggaccctgagcttaatttttgacaactttttttttttaatataatcaacttgaaaataatttctaatacgaacagatacaaataatataaacaatttagttataacacttttagatcagattataattaaattttattttgacaaaaaatcaatttagggtcctatttgtacaattttagaaaatacaggttttattttatcatttaacaaaacagaagttccaattaataatttctgcaaaacacagggttcaaaatagtatttatccttataatattattataaggagttgcatataagaacaagaaaagaaaaaaaaggcgggaatatcccacgtggcgtcagagatgagagactccaataattgtcctctctgccaagtggaatttataactattattttattttttattttta

SEQ ID NO: 215021 - DNA, 757 bp, Cannabis indica
gtgttaccaaacaccaccttaatgttagtagtgtctggttgaacgtgcgagattatttaggatttcatatatattattatgtctcctaaacttgacttgttataaatagtccctgaattatttacaatcttgtaaattagtcctttagtcattttttatcatacgtgacaaaaaaataatgatatgcctacttaactaattgccacatcaacaccacatatataatttaacattaaaaaaaattaggcatttttacgaaatcgttaaaataaaaattaattaacaattaaaaagttttttaaattaattacacatgtgacgttaatataaaattagcttgacaactcactcagcagccatatcatcattttgtttgccacgtgtgataaaatttaatagaatgactaatttacaatagaaaaatgctaaaaggcaccagtgaagcctagtaccttcctacatgtcaatatcgctattagtttaactaagtatcatgtcccatataatttaatgtaaattaatttagtgagtattgctagccaattacaaagcgacacgtctagaaggtactagacaccactagtacccaattacaatactttttataatattgcgattaattcataaactacttttaatagactgaaaaattcaacagacataataatacataaactataattaggtagggacaaaaatccaaaataacataattttaaatcatcttatttggattttgggttaggacctgtaaaat

SEQ ID NO: 215022 - DNA, 771 bp, Cannabis indica
atttagtcaatccctatggagtagtccataaggagtagactgctgagagagttcggtattatactacggtgcatgccactgaattgtagacagttgttgtcttgcaagattaaaggtggaaagaggtcttccaagttatggtccacaacagttttagccatcttttgggtcgtgtggttagagatgaatggtagaatctcaaagaaaaaaaaaaaaaaaaaaccgtaagacgacttgtgggatacgatcaaattttgggtagcttcatgggtgtgtagaacaaaaggctatggtgatctttctttccaagaccttactatagagtggggttgtatcttgtccgcagttactaatttttttggctttagacatcttattgttttaaacgtgtgaagctaattgggaagaggtcaagttatgaactttgtctactttttacaaaaaaaaaaaaaaggaggggggggatggggatttgaattagttgattcaccattattttgctgcttataattagagataatatcaatgttcagtacaggtcaagtgtaactgtgtcccatcttcacaacctgaggctgctagttacaatttgaaggtttgaaggcaatcccttatatatattaatgattcttctggtttatgagacttttaccagggaagaacaaactaaaaaccaaagaatcaactcctaaagaaaatcagatgggttgccaaataatctaactgaaactcaaatttgtttggcatttgtaaaatttccaatgttacatt

SEQ ID NO: 215023 - DNA, 731 bp, Cannabis indica
gttagaacacctctaaattaggttattattatgttctattttgacaaaaaaataagttcattatattattttataccattctaaaaataaatagtctgaattatcatttaataaataaaaaatttgatatgtaacttttacaaaatattaaatctaaaataatattcccctttattttgttctctaaataaatatttgctaagatattatttattcttataaataaaaaagttattaggagatttactaaatttttttaataaaaatacatctagtattaaaattttaccattttaatctttttcatgctaaattgaatgtgatatagtattagtactgtaaataaatatttgtaagtgatttagaaaaaacattaatacaaaatattgattaactttttaacaaattttatgcgcatattaaatataatgaaaaataatgaatgagaaataattacatgctgagtttattgtagagtctaaatgatatcctaaaatatatttttgtagtctatatataactacagaaagttattaaaaatatataaatataactacaaaaatatatatataactatagaaaataaattaggctcacaattgtgttagggcaggtttaggattagatggtgagtatagttggaatggctgtttgccttcctggctttcctgaagtttcttgttgggttgtattcttcgttataaagcatcctttttctcaaaaaaaaaaaa

SEQ ID NO: 215024 - DNA, 663 bp, Cannabis indica
ggtaatagccctaactttcataactaatcgttttctcatacaacgcattatagcatgctcaaaataatacatattgagggtaataaccctaattcaccgtatatatatatatatctttagggtggtaaccctaattctaaacaacttaactacttaggaaaatatccctaattcacaacacaagcacttacgggtaatgaccctaattcacaacacatattattttagagtaataaccctaattcatgctttcctttgattaacaatattatatattactgggcattattgctttcttatcctcatatattctagggtaataaccctagaccacatttattagtaaacttagggtaataaccctaatctcgatttctcgtcataacatatacaaatacagcatacatgagcaccactgcgctattatctatgtgctagtttactatcttacctggtaatccaagtatatggagattccaaatcctcgtgtgttcctaagcaagcactggtaatcctagtcacacgatctcgagatttcacaaatagggctaatcataaatccaatttcacataaacacataaattgcattctaattacagattaacatgtagagctcaaaacgagctttccaataatactaagaacgtcccaaatggagtccc

SEQ ID NO: 215025 - DNA, 668 bp, Cannabis indica
taatataagagaagtaaatgcaacttaaaataccctactattaggggacgtcatcatctgaagagtcttcttgctccgccaggatggcttttccttttctctctattaggggtatatggccgagtaggcaaatcaggttccctaatcctgatagcatgttccactggtgcttggtcggtcgggggaactttcctcttattcttgctcggcttctcctgctctgaatattcttgagcatacttctcctgctctgaatattcttgagcatactactcctgctctgaatattcttgagcacactgcttgactccattgcctcccctcaacttagcctcatgcttgagttgaatgagctctttctccagctcggcttggcttcaccttcttcttcttcttctccttcacgggctttggtacaaaatcatctgggaagagcctgtacttcacaaagttagcctcagtggtcaacaaagtgatattttgagcagcctttggcagttgaagaattctttgtgccctgtccctgagccccaatgtgaaaggagggcgacagtacgagggaatctgctggaactgagtgtgaacggtatccatgccctgcatgaagtagtactcgtccataaaatgccctattttttttacgtcggagtccacagtacccttcagcc

SEQ ID NO: 215026 - DNA, 528 bp, Cannabis indica
ccttaataattttgatagtttgattgaattaactaatcatattaattttggtggtgtgatcaggttaacttatttaaattaattttcactattttatcgttatcgttatacgtatctctagtgttcaaagaaattattgtattgtaatttataattagataggagttttattagaggacattatttcaatttaattttagacacccaatataactgcacataaattgattgtgcaattaataattgcatgtactcagagtaaatcataagctgtggtctatggacaaatagttttttttttttttttttttttttagatgagtaacaaaacttttattgaaagcaaagaaaattagtaaccacaagaggaggctacatcccttaagagaccactggcctcagccatatgcactctcgtccagcggggaagttttcatcttcttttattggaagtcccacattttaaattaaatagttacttttaaataaaaagattttcaaatataaaaaacactatactctctaaaa

SEQ ID NO: 215027 - DNA, 973 bp, Cannabis indica
aacgagtttcaaagctattgttgagcctctatacaattgcacgtggtagttgtctttctagcatctctgaacttaattcgaagcaaccatcatcatcccctctctagggtatctagtattctcacaaagaaaagcaacctagtctcaactccatatcggtctactaatccactttaggagattaactggctcaacgacatcttgttccagcatttagaccatcttagtccttccacacgcctatatcccctctaggacaagctaaccaggttcacctcccattgagatgaacatagctctgatataaacttttacaggctcacctttttacgcaatggaacacccgtgcagtaccttgacttgtcttagccaaggtcaaccttccaaccatccgagtaacaatgggctcattttttgcgtgaccgtgtgcctcgtgcacactttcgcctctcgaacaactcccgatgagttatggtcacaagcatccatgagtgcacccatgcatcgaggaactctagctaagaaactcacattgtccataggttctcactatgataagaaaaattctaacatcgtcgctcacctagtcactcctgatcacggtagcatgtgtggcaagatgccaacactaatctgacatgccaacgcttctaatcatgccccattcgatattgtttgaataatctttctcatcgcctaaggactcctatatgtccatggtccaatcctcatgcaccatgcctccacgcatgttggcaggcccttgagacaagccaccaaactagtagcatatgttagacctctgtctctttctagcatggtgcatctttcccatatgcgtatacaaactagcccacgaatgactactcatgtcatctcgtgttgaaactcatggccaaggcacaccacggaacgtcgtcttggaggcttaagccacgtccagtgcaaacggcaaataggcaagccaatggaa

SEQ ID NO: 215028 - DNA, 627 bp, Cannabis indica
aaaaaaaaaaatggataaaagaagatgagggttttgttcgacgaagaatagaaggttcattcgtactgtttcgtttataaacttaaaacacacatatatataaatttatttgaccataagttttaataataatataataataatgttaatattataataataatcataatattaataacagtaacaataatataataatattaataaaaattttatcattaataattatcttattatttcttagctactatttttttttttaattttacgatatttggtcaactccgagtacgccgaaataccaaaatattgctataatcgacttatctcaataatgtcatcaatattactaactaaaaccgttgtgatattttggcctggccaatcgggtttctagggtcgccgaacatgaaaatatttttatttcacgaataacttacattatatccacacattttaattaaatctccgtaattaataaattacgcctatttatccacttatagcaaaatttatcttaattttaagatttctctcttagtaactttttaatgtgtttcaagtttggtggtgggtttttgcccttgacgaaggtacttgtacgcctatctactgttctctctctct

SEQ ID NO: 215029 - DNA, 512 bp, Cannabis indica
tttctttgatataggtgaaaaggtctttctatagtcagtttctttttcttgagttattccttcagcaataagtcttgctttgtatttatctgtgttgaccaatgattctcttttagttttatagacccatttatatctattggctctcgtccattaggtaactttacaagttcctagtgtaaagactcggtttttgaccgagtcaaatatatataaataataaataaataatgataaatatatacatgtatataaaacaaataaaaattcaaattagatacgccctcgtatcgtctctctctctctctctctatctctctctctctcttaaaaccataacaaaaggaaacccacaaaccccatcaccggcagactccgacaacccatatccggccactgtccagccccacgcgccagaacattcgaatgccctagtgccggtgacctcaaccccccaagcagtgctgctcctttcgccgttgttagcccgggatcgctaatcaaactttggc

SEQ ID NO: 215030 - DNA, 534 bp, Cannabis indica
tagtagaggaaaatatggaattcttgtgaaccccaacttccttgataactcttccatattattttcgctaacttttgtttccataagaaaaacacagtctaccttgtacctacttacccaagccgaaatagcttggggagtcgggtctctagcgaggccccgacaattccacgagaggcacttcatggggcttgggggggcttgataagggccgcctcctcgcccgtaagaaaattttgagagctttcaacatgaacttcaaccaaattaagggtgtcaatgagattttttggagaaccaacctgagcaagaagagcaggaacggcttcagaggtggaatgtgtaccacgagtgctagtatccattgccattgacttctttgatcgggatcctttccttctacgcttgtcgtttttcagagatgaggatgaagcaccagagcccatcttaaaaaggggtgttaggggccggagagaatttagggagatcaggtacttcagttgtaaactcgatggtgttttcttctgtatgttg

SEQ ID NO: 215031 - DNA, 601 bp, Cannabis indica
aagaaactccacaaaattatggtcatcagtctacagatgaaagactcctagctgagagctcacgctgatgcctcaaattagaaaaatctcattgtcacagtggagtggattaatgatttctttcaaacagcatcaaaactgaacaaaagggaagccagtatctcagaaacaaaataataccaatcacagaaaacaagagaaaaataaaacaaaacaatgtttcaccttcacatgttattgagaggttggattctgctctctagtttttgccagctttgcttgtattagtttgtccaagatggggggctctaagggtattgggtcaagacaacgttctgccgcagccacaattacctgctcaatgtgacaacttagtaatagtattctagttgtcagatttcctgtgcagtattctcaagtaggagtatttttcattttacctcatcgagtaaaagtcgatggcagcttcatcttcaacgatttcctttgaaggattccttaggaactgaatatccaattgaatttgctggaatccacttctattgaaggtttgcaggcgtcaaaattcttgcagactcttgaggcccagtttttacaatca

SEQ ID NO: 215032 - DNA, 718 bp, Cannabis indica
agtttaaataattcaacaaaaaaattaaaggtacccgagttcgtttgactcccaaacggagcttaacgaagccgaatactggtccggattggcgcttcatcatctcggcttggatcttagacatatccattttggagagatcgctgggcttgaggtcgtcatccgaagaaggtggcgatttcttgccccattccttccaggactcgtcttcctcgtcgtcaacgacgtcgtctaggtcatcggtaatgtggatctttccctctgcgaatctcacgaatgcgccatttctggaaaatatgaaggacgatgtgaggaggaggagaaaagggaagaggaaggtgaaagaagtcatgtgcttttggtgaatgataaataaaatagtgcttatggaatgaaaatgtagcaagtaaatatatatataggttttgactgtaatctaatctaatattaaaattgtgatgattatcgtgtgagtattaaggatagcaattgcaatactaatctgattgttttttttttttttttttttgcctttttcggacatattcgtaatcaatgttaaattattcagaaaaaaaaaagtatattaagttgaaagtgtagagtctaagtctaatctcaagaaaagaaaaatgtatatatcacctattattttctatgtattatccaataatgggggccataatattataatctcgtcatttgagtaaaattgaag

SEQ ID NO: 215033 - DNA, 685 bp, Cannabis indica
gaaatgaatttgaatttgaatttgtgaaatttattattcttatgattgtctcctataaatgatgtacaatttcgactacatattaactcttactagttgatcatttatagtaagaatgttatgttattatgctttttttttttttacaatattggaatcagagttcttttattttactttttgcaatttgggagtcgtacagaactttgggataaacatatttcaaaagggttaccattatcactgtagttttttttttattaatattaaaaatgagtaaaggattcattcagaaaaaaaaaaaaaagtaaaggataatttatttatgatatccaacaacactattgtcaacttacatcaatataatttaatattagaatttctgcatttttatttaaattaaaatttgtgagagcaatgttatatagtttaaagcgtcttatagtgatacttcttttataagaaaaaaaaaacaaataataggtagtgaatttagtttctttcaattttaaaagggatataaattgtaaaaaaaaaatgtcaaaatccattttaagaaccataatctgggccatccatttcaggaaagaaaatgaattgaaaagttgggccaggcccaaacgaccaagaacagtacgaggaatggatgaagattgtacccgatacgacgacgttttctgtggcg

SEQ ID NO: 215034 - DNA, 748 bp, Cannabis indica
cctgagtgcattcaactatgcccctacctcgcagtgcctttccaaccatgtcagcatacgtggtgttgtcgtcagtagtaatcataaggtcatgctttatttttgtattcaagccatccaagtactttcctttattgctgaaatttgttggcacaatcccgaggccaacctagctaattagtcaaactatgttgtgtattcagtaacactcatattctttttctaggtcagttgagtaaatttatttctttttgcacttctaaccacttcgtgatagtactttgcattaaacaactcctggaactattcccaagtcatagtagtaacatcgcaagcaagggacaccatgtccccccaaaccacggcatcctcctagaactagaatgtggcacaagccactctgtcattgtcggtgacgcccataaaattaaagatccttgtaataactgtcagccactactcgactttcatcacatcaggacctcccaagaagattggaggtgcctcttttctttcatatagtggttccatccggttcactacaacaaccggtcctacctacacagtttgggtaggagccacctgcatttttggagcaggcattataggagcaccctgctgcctcaggcgtcttatttcttcctcttgcacattaattcaggcttgcattactgcaaacctattttcccattcctgggtaacctgtggcggctcaacatcaccctgactgcgtgccctgcctctaggg

SEQ ID NO: 215035 - DNA, 517 bp, Cannabis indica
tattgagtcaaacccttgagctagagtattttcttttgaaagcttttcactgctatatattttagcttcagtaggttgaaaaaagctaacattttttgcatattagatttcaactcactcacatacacaaaacaccaaaccagtaagagactttcttgtgtgtatatttgctgcattaatcattatcaacatagtcatacacttctgtttgttgatcagactctttaccaaatacaagtcctagatgtgtttaagggcactaagtttgagataacttgaagtgtggagctagagtagacacttttgtagccttgtccatcttaaacttctccatgaatttcttcacatgcttcttctggtgcagcttagttgtccctggatatggtctctctatttcaataccaagtacactattgtctttgccaagacctttcatgttaaacccagtatttaggccttttaacttgtcgatttccctttttgcatttaccaacaattaaaatatcatcaacatata

SEQ ID NO: 215036 - DNA, 804 bp, Cannabis indica
caaccttcatcccagtgtcgaagtagtgtccgacaaaagagacagctcaacttttctttaagcatatagtaaagaactggggagttccccagaatagagtgagtgaccgagatcaaagattcactaggaccttttggtctgcactatcaagcttcttgggtcataaatgaacaactcctcaagctaccatccacagacagatgggcagacagaaagattcaacgtgatgttggaggagtatttgcgacactttgtcaatgccaacgagaagaattggtcgcaactgctagatgtagctcaattttgtttgaactctcaaaagatttcttcatcgaacaagagcccttttgaagttgtgaatggacaacaaccactgttaccacacacggtgaatgagaacaacagacgaaatccgtgggccttcaattttacaaaagactgcaagaagaatacagagatttcccaagcatacttagagaatgcctcactaagaatgaagaagttggtagatcgaaaatgccgaccgttggagttcaaagtaggtgacttagtgttatcaagctaaggccagaacaattgagatagagacaaggacatcagacttatacgcaaatacaagggccctattccagtcatctccaaagttggcctttcctcctaaaaagttgaactaccttcttggatgaagatacacccggtcatgcacattagcaacctcaagttgtatcatgaagatccaaaagatctagcacgtaaccagtctaccaaggatgacattagtattcaacgacgcagcagtagaga

SEQ ID NO: 215037 - DNA, 543 bp, Cannabis indica
agaatagctcacaaggacgtagtcgaaagattgggatgaaccttaccaaaattatgtgttagatttctctaatctattgtatcctaattttttgtcattttatttttcattcttattccgcattaatctcttttgtttggattgtgagttgtgtggcgaattcaaagtagaattccaacatataagaaccatatgtagaagggtggatacactatatacactcaaagcgagacgttacatgtccacctgtgattaaatttaagagttttatgaaatttttttaatagttatggtaaggataatttttagttaattgaacaatatatacaacttcgtacgtaccataaaatttgggaactggatgttgacaccacaaaagctcaatattttctttgtcatccattgcatgaagtgcagttacaggtggatgatgtgaaatctaagtaaatgcaaattaattaatatattcaaagatagatagttatattttgtacttttttttggagagagagagagagagagagagagagagagagagagata

SEQ ID NO: 215038 - DNA, 699 bp, Cannabis indica
caatgtactacttggctaattttgttctataaaaagagttggtgaagttagagttagtaacaaaatatataatatatttcatattcatatagagaaatctcactcattctcttaccatggccaaaatgtattcatatggagcaatattcctatttgggctgctaataatcacaagtttagacaaaacaggtcatctctatcttaattttataagcaaatttaatcctacatatatatagtactagagtattattattattaaaaaaatgtacataaaattggaattttttttttatatatttttacgaatttttattttgtttgtttgtattttttttttttttaaaaaaaaacattattttcatgttgttttctcgtatttatagtaataacctgaaaaaaaattgcacctttattaatagttagttagaggttatgatttttctatattatttacactaattttattaataagctctatgataatttttgtacttcaagaattttgtgggacacttggattagaagaagaatatatagttcctccctaacataacatgaaactaaatgttaaatgatgaacaaattgagtagcacatgttgttgctagatattctttgatttttattttttgctattttttgagttataatatttgagtctaattttcaaagctctattgtattgagaatgttaata

SEQ ID NO: 215039 - DNA, 664 bp, Cannabis indica
tggcgacaacagccagaccccagtagcaagaggtctgatgggctggccagggatctcaggctcaacaacaccctcgattggccaacctttggttagccatccccttatttgtgcacccttggtcaaccaacagggtgaactcccatcccagagcatttgggagcaagtaacccaaaggccaatttttaattgacaaggtccaggaacaggtggaaacacccaagataaccacttaagaagtgagtccaatcacttcagttaattagatccaccaaactcaagcaattggtgtgatctacccaccgtcaataaacaggatgcaccagacaatcagggaagaacgggcagccagactctacccaacatagggctggccggccatgagcagtttcccaaagtagggttggccggcaaaggcatgtccctctacctaggtgtggccaacaatgacaaacaaccaagcttagggttggtcagccttgagcataccctttctcagggtatggtcagccagtctttggcccattcacttatgctgcccatctaaaaagggccaatcacctaggcccctaatgcatcggatccttctgtgctagcgcagttgggttaaatgagacacatggtcaagggccaagttggcgtgaaacctttaggtctttaattt

SEQ ID NO: 215040 - DNA, 1525 bp, Cannabis indica
aaaatgagatctcaatcatttatctctattcagccaagctcgaaggaaatcatcgtttcacttctaaatacctatagaagctatagattccatatctatgtttagcgctcccactcaattgtactatcatgttcccaaaatgtacgtatcaccctgaccaaaaagtaggcttaactaacaaatcaaagaacacgaataacactcttgagatcgaacctaatcatgtcaggattaagatcatttgatctaagatcaactagtgatattgacttagaaagatataacggtaagtttatcatatcttatccaagttcaatatcggtcccttccaatgtatactccatacatccgatactggtaaactttgccaatgccctggaaaggacataacacttatccaaggtgtaagtatacctatcgctgattatcatgccagtctaaatccagtgaactgacaaatcagggaattaaacttttgaacatataatcatgattatattccactgtgctgacaacactataatcatgaacaaatacatatgttctggacttaatagaatttatacattaaatataatcatgaaataaatcatgtgaaccatgcaacataaaatggatttctgatctttattaattagtaaatctgattatattgaaatggttttatttagggcacaaaacccaaactaggagatcctatgtcccctcctaatatttgtcttgataatagagtatctaaccaggctgcttagtcattactctaggaaaaaaggctttgggtttcatcccttgtgtaagcacctttgcttaactaacttgtgttttgcagatgacttagttatctttagtaaaggtaacctcaactcggtgagactaatttaagaagcctttgtgaagttctgtagtgcaacgggtttgtctgcaaacacttcaaaatctcaaatatattttattttagttttttttttggggggggggggttaaagaagaggttaaagctatgattcttgatttaggtcagattaaagaaggttcttttccctcaaatacttggggtcaaccttcgtcatacaaaatagaaagcatcagactgtggtgttatcatggacaagctaaataggaatctaagctattgggctagtagaaacttatcgtttgttggccgcgctcaattgattcactcggtcttgcttggaattaggaattttttttatgagtatattcatttattatttttaaggttatggctgccatagacaagagttatcgtgtatttattatgggattctaaagggtatagaagcaatctccaccttgcatcttgggaaaaggtgtgtctcccaaaaaatctaggtggggttggcttctaagacggcaaaaaatggaacaaggctcttatggcgaaacttctgtgggctctagccaataagcaagactgcttatgggttaaatggatcaattcaatttatttgagaggctataacatatggagttgtcctaagaaacaagattacaactggatttc

SEQ ID NO: 215041 - DNA, 726 bp, Cannabis indica
gtggatcctggttctgaccctggtctggttccagtttcaattctaattcggggtccaagtacgactttggggccgggtttggtgttcaagtcctggtccaaatttgggtctgggtctcggttccaggtctaggcccaggtctgagtcccgggttccaatctcagtgtgggtctgggtccagctccaagtttgagtcttgggtttcaatcctgatctgaaactaggtgctggtctaggtctgggttctagtccgattccgagtatagatcccatcctgcgttagagtctggttcttggtccgagttcaagtccccttccgtgttctggtcaagttaaaggttcggtccctgtttgggtctgggtttcgattctgggtccaagttcgtattcgggtatgggccctcgtcccagtcccgttccagggcaccagtccggttcaggttccagtttcaggtctcgcgttcaggtcctggtccgagtccaagatccagacaccgactataggtctagcccaagcctcgtgtcctagatccttgatctagatcttaatcttagttcgggtcataggtcccgcattgatatcgaaatctaggtctaggtcttgggttgggtcctaggtcccgggtcctagtctgagttctagggcccaagtcccagtcccaggttcaggtcccccatcctggtttggatcctaggtcttggttttattcgaacacagatccgaac

SEQ ID NO: 215042 - DNA, 900 bp, Cannabis indica
gtttaatttatcgttttagaaagttcttatttaggatgttaataaacatacttgtgagtagatctaagatcctggtaaaataattttcaataatagtaatcttccaataggaaccaagttgaggttttcgatttcggatgccaatttggccaatgaatcaacattagaattttgttctcttggaatttgttcaattctgaaataataaaaaatttctaagttttgttgaactttttccaaatatttggccattttgatttccttttcttggtattctccatgtacttgattcactattaattgggaatcactaaagcaatgtattgatctagcatttactatacttccgccattctcaaacctgctaaaaagtgcttcatatttagcctcattgtttgaagctacaaaatgaaattttatgacataatgaaaacttgaaaccttctggtgagacaaaggactatgcctgcctctgagccattgtcatttgacaagccgtcgataataacttccaaatttctttggtttgggattacctctatatctttgttatcatctattccttcaactaaaaatttgacaatgcctgccctttgatggctacttagggtgataagttgtgtccaattgcccctattttattaaccattttattaattgacttgaggcgtttgatttagacaaaacccgccttagtggatgattggtcaatacatggataaggtgttcttaaaagtagggtctcatctttctcgagacatgaattagacatagtgcttgtttttcaagtggatgatatctaaattcttcccctagtaaatgctcactaacgtagtaactaacaatttgtcttttcctttttcttgcaatgttgcggttattgcattctctgaaagagaa

SEQ ID NO: 215043 - DNA, 689 bp, Cannabis indica
aaaaatatttaaattaatattttaatatgacatcatcttagtgttacaatttatgttaaatgaaatcttttgggaatgaatttttttcatatataattaaccaaaataaatggtgtatttaatagtagtacatgagttgttgagattacacattagtcattaatatattagatcgtgcaatcatgcacaaacatgtaatcaatgcactaccctagctagtttatagtctttttttcttttactcttcaaaataatataaaattgtttgtgttaacttcttattataattttttaataaatttttatactcaaaaatatatgttaaaatatattttcttaatttttttatagcggagttttatgcttataatatcatcacggtaaatttttaaaattttttgaataaattatagtgccgaaaatacatttaaagtttttgaacacacatgataaactagaatatcatgaactctatttttgacattgtaaactatttagaattttttaaaaatttataaggatgatactgtaactataacaaatactgttttgaaaaaaaaaaagtatttcgacatgtgatttcgagaatagagattgactaaaaaattgaatagaaagttgtaattagcactcttcaaaataatattgttatttcaaaacaattgttatatatttttctcttttttttt

SEQ ID NO: 215044 - DNA, 600 bp, Cannabis indica
tttagtacttctataaaaaaaaaagtacgggcattttagttggtattagagccatagttatatcggtcccgaacgttctcacaaattacacatattggcgaaaaaggcttcgctcgttaccaagtaagtattatttttgcatgtttgtattttatgtacattttagtagtttcaaaatttcttttcatttttcagaatcttagaatcaactaaagcaccaacatcatgagatcagagtaagtagaacacattgtaggcacattaaagttttaaagagagttcctaagaccccacccatgtaagaagaaaacaaagtttttgatagaattaacaaaatacatggataagataagatactgttggaagtgtttattgaagtcacatgagtagtacatagccctgatgcacgaactcaatatgccacatgtccaacgtaatctaagagcaaattgtaaacatttagggcatgtcggcgtaaataagatcaaaagatatgacctactcatgatcaacctagtgcatcaatacaacattactaacactatatgtcaccttaatgacactaaagaagaaatacatcatcgacccaataatattgtt

SEQ ID NO: 215045 - DNA, 624 bp, Cannabis indica
ctgatgatccttccagagttgaaatccccacgactcctccaccatcgaatacttccgctgacaacccatctcgaacgaacactcttccttctcctactgttcatcgtcctcttccagtcgaaagaccagcatacgaagacgttcgatcaccctattatctcagtacagcagaccatcctagtctggtcttggttacatatgtcctcacagacaagaacttccaaccatggaaaagggacttcaaactctccattggagcaagaacaaaactccttttcttgaaggtactcttcctcaacccccttcccatgattctctctttgattcctggaatagatgcaatcaacttgtcatgtcttggatcttacattcggtttcacccgaaataaaaagcagcatcatgtacttagatactgcatctgagatgtggaccgtgttaaacaatcggtttaaccaaggcaatggtccacggatctttgaattaaacgaaacactaacatacctcaatcaaggggatgactccgttagtgcatacttcactaaactcactgcaatcagggacaaaattaatcaattaagaccctgcatttcttgcacatgttctgctgctgcccaaagattaga

SEQ ID NO: 215046 - DNA, 541 bp, Cannabis indica
atataaagatagttttagtaagattttttcgaagcaaggaaaaagttaccttataactttgaaataaaataacaattggagcacatgtcattgaataaccattgtcgatctagaaaaatttaaaacataaaaaattaagaaaaaaaaaacaaaaaatcttcaaaaatgaataattgttagtgccaagtaaatatataaaaatagaacaccaaaaattagaagaaaaagaaatataataaaaactttaaaactataaatggacacaaaacttaggtatgtcacactatatatataagagttatgtaaagaatacaaatagttttttttaatggaagaataaaaattgtttgaatggttaataattgtaagagttatacaaagaatacaaatagttttttggttataaatttctgctaaaaattattcattataatgaataagtgtgtacatattttcattgttattaatacatattatgttttgctttaaaaaagttaatatttttttaatgttattactataacaatagtaaaagatcaat

SEQ ID NO: 215047 - DNA, 736 bp, Cannabis indica
catgatgactcattctaccttacttgagccctatgaggagaaggcattaaagatagtagcttacattctaaataaagtaccacctaaagtagtttcaaggacaccttatgagctttggacaagttgaaagcctagtctaaaattttcacatttggggaaatgtctagttgagggatggccttataggtcacataaaaataaattatgctccaaaatagtagcaacaactttacccatctaggggcaacaacaacatatttctcagcatctacaaatatataaaataaactaaatttattaaaattctaataaaatagacaaaatggatgaaaaatatcaaaggatctcacctcgtatttttatttctttcttttatagttgacctgagttaaaaataatacaatctaattactagaatacgataagatttttttgttaaaaataattttaataaaatgtatattatattttaatataataaaataatttatattaataaattgttatgaataattatatatattttaattattttatataataatattatatatttaactaatactaataatataaaataaaaaattctaaaaataaaaaaattaatttcataacaatttaaaaataaaaatttaagagataatatttttataacaatataaaataaaaatttattaagagaaatatttagagataaaaattactttaattcgaacacataacaatataaaaatct

SEQ ID NO: 215048 - DNA, 560 bp, Cannabis indica
ccaagataaagaacaaccacacagatatatacgaaaataaactacatactaatctaaacgtttaagaaattctttgaacaacacttacccattattcatgtgaatgtgtatgattcttttcgatgataaggtctgaccattcaccgagataggtcgagagacagggagcaaagagattgagaaagagctagttgagatagagagtattagagagagagagagtcgagtgataaagagagaaccaagtgatagagagagctaatagaaagggagtgtgtgattagtttagttttttttttaattagctaaaaataaaatagaacaaatattcattcaaaaaaaaaaaaatagaacaaatatataaacaaaagaattattttgtataaattaattgagagtttaaatttcttttatatggtattattttttaaagagtattgctatttgttattagccaacagtaatacatagtatttttttttataagtgacaccttaaaattaattaataatattacctaaaataattatataagttaggcgatctaattgtagcttttt

SEQ ID NO: 215049 - DNA, 510 bp, Cannabis indica
ttgaggatttgaaaatgggaacgtacaggagtgattgcttttggactccaatgagatagtgttgttttttggcgtgtttccttgcctggcaccttcgagcctcatgttgtggaggagatggcattatttcatggtcttccttctgtcttaagttgaattttgaagatattattctaatagaaaagattaaaatagttatgtagaacaaagttagtagtgtatttttttttaagtgttagtagtatatgttatagtattataaaaatgagataatttgaaaaatgtatttcaaataagagaaatgttattgtgcaccagtagtgcctagcaccctcctatgtgtcaatatcgttacgggtccgattaagtattgagtcccatataatttaatataataatttttaaggagtattgctagtcaatcgcaacgcgacatatcgagaaagtactaggtaccactagtgtcttatagcaatgctcttcaaatagtagaataatatacatatatag

SEQ ID NO: 215050 - DNA, 794 bp, Cannabis indica
gtaaccctttgaggttcggggctcatcacttgaggtctaaaactcgtcatctcgatgaggctggggtttactccttaaacttaagctcactcatctatggaggttgtgtggatttttgatgttacaatttttaactaaaattatttacaaataaattaaaataaaaattacatcaaaacctataccacaattatagtgtacaatttttctagtaaaacttgtaaaatttctaacccaaaatttaccatataattaacgattcacgtttatgtataaaaaaattaattccatccattcataatatatcaacatatatataaatgcataatcactcaacacagtatttaatctatattattatgaagattgctctaatactaattgtcacgtacttttaatggtccatattagagttataaaaggggaagcaaaaattttgataaaacattttttatccaatatgaattgtaagcccaaggatctcaacataatgtatatggattaaatctaactactgaagaaattcaattacctcttgatatctattagggtataattaattcttttcatataataatcgttcatctaatcctagaacttgattgaaaaatccacacattgatcttctaagctagcctcaacacccaagaatagagtgggctattagatcttataggatgaacagatttaggtattacagtgtgtactcaacttatgagacattgtaatgagattaggattttaatctcacacccatttagaatagtgtgtaggcgggagagagagagagagaa

SEQ ID NO: 215051 - DNA, 1103 bp, Cannabis indica
aaaaaaaaggatatagtgacacattttgcaactctaagaagtatatttcctgacacctacatttgtgacacgcattgaagtgtcactaaaacactttagacactcaaaacgtgtcacggaaaggtatttttgtagtagtgatataattcaatgtaacaatttaagaaagataagaataacttatttataaattacatgtccatccatagctagcaacttctagtttcgtcaagctatgtataataaattagacagtccttttcacatgcatgcaggtttgcattgataccttgtttacctatttttttataatgaagaaactctcatttcctctaagcttaaatgaagggatgatcttttagataaacacattgttatcctgaatgttccatcctggaacaaaaggtgcttgagtagaacaaattagtcaaggaagaatcagtctaattctatttgcaatgattttcgagataactatgtatgaccacattctaaaaagaaatagatcggaactaggacactttttttttgaattgggcaccttaagaataaaaatcacattcgttgtgttaagttccttatcaatccaaacctaaaaaaatccactactgtgtcacagaaatccacaccaacagagtacgagtaatatttaaagaaaataacagacataacatctgggcccgaagcttacatatatactaccgataaagaagagcatttgtgatctaatttcatcatgctctgaaatttttatcatatcattgagtcattgtatccggtggtagtaggtgggcatgcgggaacttatctcatacagaggaatgcacgttatgaggaattaattacttaaataatatattcgttaaaattttagggtttttttttaacactttcaaaatatatatatatatttttagtatttttatgaaattccacatagcaacccacatagcaaccaacaaacaacctaaatcaaaactaaaactctacatagcatccacatagattctaccagagcaagcccaactgtaaatttgaaaaagaaaatgtaaaaaaataggtataacaggtaatttacgtctaaaatttttaaattactataa

SEQ ID NO: 215052 - DNA, 573 bp, Cannabis indica
gatcatccggttgtggtgtagtccgttttggttctaataaattttatttcaaaaaaattaaaaaagaaatgcagttatggaaaagatgggagatcgtgactgaaatgggaggttggaaattaatgggttagggcagaagagttgaggacagtttgatgttcgtgggttatagaaagagaaaaaacacgcagaaaagagaaaaaaaatagaaaaacgtaaaaaagagaagaagaagaagggaaagatgtcgtgtaatggaggaaaaaaagtatgacatcagcatgcataggtaaatttgtaattaacaaactttttaaaatttaaaaatgaaaaataaatttttaaaaaaagttcaattaaccgtacataatcataaatgttaaaaagtggccaattttttttttttttggggaaaggtactgttattataaatagcaaagagtcttttactaacaacagagacaatggcaggggaagtattctcataccacatacaatcattatccatcactaaggcttgcttagccaagccatgagcaacttggttagaatctctacgaacatgagagacac

SEQ ID NO: 215053 - DNA, 1038 bp, Cannabis indica
atagagaattttagaaaataattaacagtcttagaacatatagaatttaacaataatttttattttatttgctcattaggtataaaatggttaaaatggtattgtacttcacatactatgatgctaaataaattttagtagtttgacctataaatgttcatatttaaggctatagacaagtttttagaatttattcatttttgatgatttaaggaagattacttcatgatcctaaaattacgcatatacatttacattaaaaaagtttccaatcaatatttaattacatcttacattttattacgaaattagttacttttcacgtattgacatttgacagtgtaatatctatatctatatgtatataaaggaggcttttgaagaggtgaggtgacattttctcctttcatttttacaatttctctaatttgagatttttctaaactttttaattgaaaatactaataaaaagaaaagtaaccgcactattgatagtaatgactaataaaaaggctagcctaaatatcatttaattcatattaatatgttagtataaaaaaagaaatgtaacaaccttattttaatacaatttactatctaatttattaaaaaagagcaaatataatgtgtcattgtcgtacataatagtactactctttcatattctttttatcaattaattattaataaattactaattaattaaaattaaaaatcaatcaatatcaatatctatatatatatatatatatatatactaggcaaaaaactacgtgcgaggcacgtatactaaatttatgctagtttttttctatgttatttgaaagtgatacaattaaaaattaaagaaaaaatattattaattattaggtgagattattattatgtgtatctaaatattatattttataatgttgtcaattaaaagtgaataccgaatgcaatatattagtgtttaagaaagcttgatgatttaaatatgttcttaagttaatccaaaaataaattaaaaattgatgttccaatacttaaagaaac

SEQ ID NO: 215054 - DNA, 582 bp, Cannabis indica
ctgttcggtctcttggtcgatctgagtcacataaacatcttttttagcgcgggttcccgggtgcacgattggtgtgtcaagttgatcatccactcccctcctcatcttcagatcatttctgagatcatgagtcgtccccaacctatcaattacgaaaatgcctggttgtctcagtgactgatttgtatggccaatgtgctaaccagcaccattaacctgattggaattattgggtatgacttccccgatgaattactagacaaggtctgtccgcctaccatctggcccacaagtggaacttgtgaccggggattggacggctgaccatttatagtctgagaggtattcatcgctgaatcttcatctgttttgcccaaggagatgacggttacgggctgttgcccggcagtttgataggcttttcgtatcaacacagtggcttgccgactacgatcgtcaatgactgcttgttgagcccttaatgtttccatgtccttgtctctccatttggcgaacatgcgcctctgctcttcaaacgcaaggttcaccaaagcacgacgttcctcctgatcatgatgtagg

SEQ ID NO: 215055 - DNA, 701 bp, Cannabis indica
gaaagaagaaaaagaaaagggggaagaatatagacttagatgttttatcagaggattttggtggacataggttctattaaaacctatatttttaatatatataaattcataacagagtcgacataagtaaaggtatatttttttgaatggacagtaaagctatattacaaaacttgttataaagtagagagaaatgattaccgcaaaagccaagaaaagttgtttatttcattttccttcattaaatgtttcatctttaagctgattctttttttctttttttgattagaagggagtaaggagaagaaaggagaatgcttcactgttaaagtaaagaaaatgagaagaaagaagaacagaggaagaataggagaagaaagaagaaaaagaaaatgggaaagaatgtagacttagacgtattatcagaagatttttgtggacgtatgttttattaaaaactatatttttaatataaataaattcatagcagagtgaacataagtaaagccacatttttttagtacagacagtagagctatatcaaaaacttattataaagatgagagaaaaaattaaccttgaaagccaaaaaagttgtttatttcattttccttactttgaggttttcacctttgagcttgattcttcttttttttttttttatttttttttttattttttttagaggtaaggtagtagta

SEQ ID NO: 215056 - DNA, 647 bp, Cannabis indica
tattaaaaaagagtttgcattgaatgatgttagatttcaaaaaaaaaaaaaattaagtaacggtaattttaccgttttaaatttagatttttattattttttttttattaaatactcactaataattttatatttttcacacaaattcatcttctaaataatttcacatactcttcttttacatgtcatatttacgttttttttttctttaccaaataatggattcacaaaattctcaaaaagtttcatatacgaactcccaaaatctaaatttattgtattctcaatttagccaaaaaatttcaaattctccacagtctaacccctgcaatccaaattttcagtattctcaactcaatcaaaattttcccatatcctcattctctcaccaaaattttaacccttttgagacttctcaacatattccattattcacaatacgaaattcgctaccatatgatttttatagatcaagtatggaaaagagtacaattaatttaaatgtagaaacttcatcggtatcggcatctgaaaccctttatatagattatgtaaggctgaaaatgtgattattgacaataaaaatctgtcaagtcagagaagtaaactcaaatgaagcaaagaagcaaacatactactaaaaagtg

SEQ ID NO: 215057 - DNA, 1059 bp, Cannabis indica
ctcccaaaatctaaatttattgtattctcaatttagccaaaaattttcaaattctccacattctaacccctgcaatccaaattttcagtattctcaactcaatcaaaattttcccatatcctcattctctcaccaaaattttaacccttttgagacttctcaacatattccattattcacaatacgaaattcgctaccatatgatttttatagatcaagtatggaaaagagtacaattaatttaaatgtagaaacttcatcggtatcggcatttgaaaccctttatatagattatgtaaggctgaaaatgtgattattgacaataaaaatctatcaagtcagagaagtaaactcaaatgaagcaaagaagcaaacatactactaaaaagtggatggcttaatacatctgaggatgttgtggtaggaaatgaccaaacttctactgaattctgggatcgaatcacagaatacttcaataccaaccacaaaggtgaagaacgaagaactaaaaaacaatcaaaagatcagtggggcaagatgaatcaaaagctgatgcgtttcaatgggtgttataacgagtacaacaagcccatcatagtggttggtctgaagagcaaattattaaaaatgcacatgtaatgtataaatttgaaaataataattctaattttttgtatgtacactttggagattgataaaggatgagccgaaatagaatacaactttttaaccacaagaaggtggtaagagaataaagttgtccgaatcaggggcatatacttcatcgtccaatgcgaaaatgagtgagcatgaagttcatgaagtgcgtcctactagccaaaaggcggctaagtggaagggaaaggaaaaaaagaaacacataatgcatttatagatgttaatgcacgaaaacaagttgctttgaaaaaaatagcggcaataaaaaaaaagacggaacataatatgatgataaaatatatgaattatctcatcatggacacatcacatatgacggccgagcaaagaaaagatcataaaaatttatgtagtcatattaag

SEQ ID NO: 215058 - DNA, 788 bp, Cannabis indica
gtgaaatctttattcccttgtatatttctttgtttaattaattgaatctaaattatttatgactgaaggagcaagagagagtgaagaagcagaggaagcaaagtataaaggaatgtaagggtactcaggaggatgtacaattgaaagagtgactgtttcaacaggaagcacaagagcaagagcatcatcgtatgaatttgtatgatattagtactttttaatttaagtgagtttagatgttatgacttcattttcataataaatcctgtttggtgtatgaaacagatatacttttgcctgagaaattgatatgatggtgaagcaagaaatgttgctctctcgtctcgttattcacaccagtttgctcctctagtatgcatatatgtgtagttttacattatccctttcatgatttctgatagttttggctatatgtttattcgtattctatttttttttttaattatagaatgaacagcttacagaatggatcagcacactggggtgcataagaaattaacaaaatgttaataatggatgatcacattgaggacttgttgtgaataaggagaacaatcatgttatgttggaaacttttaatactcgaccacaccttgtaacaaaagctctgtgacaagtgaaaacgccttgtcaaatgatagcattacaaatgtggatattgtaaacagaaatttagttctatcttcaattttataaaaagatgtaaataaatgagtagatgtacattgttagatcagcacaataacagagttaacagctacctattt

SEQ ID NO: 215059 - DNA, 825 bp, Cannabis indica
cactatggttttcagtcatccaaagctgatcattctctcttcatcaaggtaactaactcgtgttctctctatgtgttagtctatgttgatgatatcttaatcatgggcagtgatgacatcatggttaatcatcttgttgctgatctgagttctacctttgccttaaaagatcttgggtttgtcaactattttctgggcattcaagttgttcctacagcagagggtgttctcctctctcaaacaaaatacttgcaagagattctttgcaaagctgatatacaaaaagtctacacacaaaataccccaatgaatagaggcttgaagctctccaactatggtagtaaaccagtcaaggatgccactctctatcgatccattgttggagctcttcaatatgcaactgtgacaaggcctgaaattgcatactctgtcaacaaagtatgtcaatttatgcatcaaccacttctgtcacattggatggcagtcaagaggattctcagatatcttgcaggtacacttgattatggacttctcatcaaaccagctcttgatttttccagtgaagccttttgtgatgttgattgggcttcggatcgcgatgataggaggtccacaacagggtattgcatttactttgggaagaatttagtgcactggaaatcccagaaacaaacaacctatcagccggtcttctactgaggctgagtttcgaagcttggcaagtgtagtcactgaagttacttggtctgcaatcattacttcaggaattacatgtttcatctcctggtgtcccttccatctggtgtgacaatcaaagtacagtac

SEQ ID NO: 215060 - DNA, 1539 bp, Cannabis indica
tttggcaaagctggtcactagttttcggagatattgctgttatgcggaaatgagagactcaaaactcttcatttctgagtggtttttccatgttagaaatgagaaatgcgaagttatgaatttgacttctctaacttcatggatcttagttgttatgaaaaattagaggaacgatcgaaacagaatcagaatcgaataagcagaacctagcgcaccaagccatttatcaacttaggcactggttgctcatttcagagctttcgggttgttgttttgatacttccatcgttctaaaacttgaggacgaggtctcctaccctaattttaaccattacggagagaatgctcagatcaaatttggcatttgaatgatcgaaactagcgcaccaagttgattgtcaacctgagcgctgggcctagcaccgggtcaacatgggcgttgggctcagctttggggccttaggtttgtggttttctccccgagtttgcttgaatctttattatttttgatgacgaaaaaaatgtccaggacacttttttcgagaatctaatttaaaagataaggcctagttttggccccttggaagttccatttggtcctcggaaatagttgaaccttaatctttgctgaaaatggaaaatatgcccagaagagttctcaaaaaacatcatcggaatcggcccaagttgacaacatatcaacctgggcgctgtgccttgcttttagcatccaggaagtgttgtttcttccctggaagtacttgtttccccctatttgatgaagacaaagatgatgcaaaagtgattatcgatttgatacttagaagtcacccagattgacaaattctcaacctgcgcattgggtgctcaaaaagaactttctttgaatctgattttgatgcctcaaatattttcgtggtatgtctaattcatgtcccaatacaaagtttgacccatttgcactaagacgatcttagaagctgaaatcctagttgaggatgtcaacctaggaattggtaaaaccctaggtgcctaggttgatttccagggtgcaggttcatgtatttttagctcctggggcctggatttagttgctcaatgtcttcatggtacataataatgaaagatagtgagttgaaaacgagttatcaaagttcgaacttctatttcggaattcctaaagtcaacttgggcagggaacccctcccaggtcgacttgctatgactcgagagtactcaacttcgagatgtcatctttcttgccacgtgtcaaacattgatgtccacgtcattaaggctacttttagtgaacatttttcccccaagtcaactttacacttgtgtgagattgacgtaatgacgtgaactaagcccgtttctctcgaaactgttgggttttgtgccctaaataaaactctatttcaatgtaatcttgaatattcatttatcaataaggaaatagatttatttcattacttgtttaatgtgtgatttgattcacatgtttattatatggttatttgtttgatttataaattc

SEQ ID NO: 215061 - DNA, 1319 bp, Cannabis indica
agccaaacattaacataaaaattcagattaaaaatttgtattcaactcacataaatacaagacacgtaaaagcaaaatgaccattttgcccattccacactaaaaatcataaaaggtcacctgggactatttttgtcaactctaaaatctcaactattcctgacatttccaatgtctaactatactgccccgctatactaaaaaattctaggatgtgattctaatagccaaacaccgcgttctaatgttgttgggcacaaaacatgtaaaattatgaaatgctatatatgacatataaattgcattctgaattcaaataaattatcataaattaataattcaaagttaataaataatttccataattaaatcctaattatttgctaatttccaaattaaggctaagcggtctttacacttatagtctattgatataatcaatataagtagtttgccctccaattattagttcgtaattagatttggtctaaatgaatattttacccttctaattatttcttgattctttatgtaccattaattaaatttgaatagttaatttgttatcttattatagatttggatccaattgttagcactctcagaattaacaatataagagaactaatattctgttagttttatggtactaaatcatgtacacagtaaaagagtttcgtattatctgattatcattgtagtatagtccctaagatctctatatgtgtgtacattaaatcaaaataataaaaacaataagtttagagtatatatcttaaagcctatcagggtatcctccaaacttctcgtatgttgcatcccttaatccagttgatgaggaattagcaattcggactcacactagtgtcttctaaattgatccaccacacacaaggaatagtgtgagctattaggatagagtgtataaccttgttgttgttgagttctcaacacatgagaaggaacaatagagagaaaaaatagtttgcttttctctctatagattttgaaatatgtagtgtaaagaatgaattaaattctcaaatcaggctcctatttatagtagttaaatccatttaattaaattagtatttaattgtttaaataaataaatacctataattaaatttggttactgatatttatgagcgaatctctcaactacttgagagaatatctcaacaaccttgaatatctataaccacttttcaaattagatatttacctaattgaattaattaacccaaaaagacaaatttaataggtacagaaacaagctaggcgcctacaactatctttaggataatattggtatcttt

SEQ ID NO: 215062 - DNA, 877 bp, Cannabis indica
ccatggtggatagcaaaggatgattactagctgccaaatcactcaattaactatgaatttcacaaatctcatgataaaaattattggaagttacatgcaatgtgccactaaactttaaagtaatttcatagtgttatacccgaaatttggctatcatttcaaaggagaacatgtgtcaaattgggaagaatacgaattaatgaatgtaatggtaattatatttgaaaatagaataactcattaatgcagaattgacagagtatatttacaacttgctaactgaaaggtcttgtgcaagataaatatacaccaactgttgcctcgtacattaacgagaaaccatacgactttagatgtacaaggcgaggcatcaacctcgctacgcattagaagacgagacatggtgactggtaagacacttagtgtataatacaccttatacaaactaagtataacaaccgggtaaatctaaacggctattagtgaggcacccatctcgctataggaaggcgtgctcatgataccttcattaatcaactccagactgggttcaccgctccgtcgagtcagctgtctcagatagaagttgacatacaaatgatgttgactgctaaggtccaccttgtcgccaagaactgcaattttcaaatggagtattatgtcttcaagcgcaggaacgacgaggcttacatcatcaacctcggaaagacatgggaaaagttctagcttgctaccaaggctattgttatcgtgttcccaacgagatatcccaaatgttacagtttataacatatttaatacacgtttaccttgacccggtaaaaaagcggacctatcacagttgtatgattttgaaatattaaccacatttatttta

SEQ ID NO: 215063 - DNA, 678 bp, Cannabis indica
ccttaatcattgtaatatttcctgtagatcaattacaacaatctacatacggacaatgaatacgtttgagatttttagaattctttaaggcaaactctaaaaacacatcgaaccctacttgaaattgcagtgtgtctctctcctcacgtatccatgatttatccataacaaatatcgtaacaaaaaaaaatcagtatttattaactaattataactagttactacttacacaatgtaactaactaggtttctcacaattaattcatattaatttatatattctaaattttttgtttgagtttggttcatgttattaagttgtaaaagttgtaattaactaactagggtagtgtttagttgattggaatgtttggtaaaattggaatgacttttcctaaagtgaatccattcatttgtttggtttgtcatttataattgaaaagtttagataaatgtgttatgcacctagtttcttacaactaacaagcaattaactagttatttatgttatgtacttttcctttaatatttatagtttttagtaaaatttattctaattctaccaaaattttggtcagcataacggctgtaattggacgtttccaaaacttttaaaaagtacctaaagtaacaaataaaataaatataacaatacagttaaaacaaaataaacataac

SEQ ID NO: 215064 - DNA, 1322 bp, Cannabis indica
agtgaatacctaaataaattgtgagtttggagagttttatcatcaaaaaattagtttgagaaattaagtaacacaaatcgtattaaatagtattctcgtcaatattcctaaaaaaaatatattaatgtccaatgtaagattaacatgatctttaacatgtattaaatatcatattattgtgtgtatcatgaatttatctatttataactatattaattaatattcttgtttacattttataacattgatgttgaatcagtgttaaagataatcataacgtgtcaaaaaaacataaaaattgccagccttatatctttgtatgtatatattcttatttattaatttattataaacaatatttacgttagtattagtagtatttgcaattctctcacacaactaacacaattgttttaactaattattcaaaaacaatttcttggttagttagtttgtttttactcacaactatagttattagatgttgagtttatgttttgtctgttacaacttcacttgtacttttggtagttgttacttattttgtatttgcaaactatttaactagagtttcatgtcttttttgtaagagcatctccaactaaatttttataaggtggtgtatagatatattttagtctaaattggtcatatgctaaaaaattacaatttaaaatttgacacaataaaaaaataatataaagtcaaatttatagtacaaaaatattatattttttatttattcttttgtcacttgttaatgtacttaataactatacttttaaaatttttgttgagtttataagttaatttttgcacataacatataataaagcataattataaaatttggatcaaatataatataaactcaatttttgagccaaaattaacttaaaatttacaacatgaattgaagatggtttaacatgttatgtaaacactaaatttttttttttttttttgtaataaatattcataagttttattaaacttcaaactctgctatcaaacacgataacagatcagttgggatattccccatactgaaagtacatccagaatataaactagaagctctagcaaaagcatgagccactacgttcgctgaacgtttaacaaaatgaaaagaacatttcttagttctacaagcaacaatttacattctttaataattaaaccaaataaagaaacgcatttcacaagaagttcgcagcgcttgcacaacaatcaaacagtcccgtctccacaacaacttgattcccatctttgatttttgtatccaacttacgagcttctctgaagctaattgcctcagcatc

SEQ ID NO: 215065 - DNA, 663 bp, Cannabis indica
ccaatgtgtgccttttgaccagttaagtcacaaagaacattgttgattagtgaaattgtggatcttataacatttttggtggcaatcgaaccataaattaggtgtaaagtactttgtgattattgaagctgagtaaattacagtgacaaaaaatggtacgttttatatttatcaattcgcaagcgcataaatctttattgtagtgtagagattatgaaaaacgaggttgaactcatgggacgtgttactttttatttctttatttaggtaggttgcacttgaacttttgtaaccattgggtttaataaaatgtagtataaaccgaccgacgtacacccacaataaaaattattgcaaatatcatcctatagttacattatgctcaattatttaaataatttgttgatttagcatgcgacattatacagaaaggtgccatgtagtgtttggactatgacagtcccctgcccaggctattatagaaacatgctttgactgcttagggatcccaagaagctgtttcttcttggtgttgccatgtatttcaagattgtcttaaggagaatcattgtctcttaagataaagtactatcttaagactcgaacgtgaatctaggaccattgtgataagtttactcgaaacttaataaaacttatataaat

SEQ ID NO: 215066 - DNA, 1234 bp, Cannabis indica
ataactaatgtttttacgacgaaactcttttatagggattcattggcaggagaaatatcctctctatgttcgggtgcagaagctgcggttcaacttgggctcaaaatggtgatcttccagagtgattctgttggggcgatagaggcagttaagagcaacagtcaaagcatatcaacactgaaccataatgttcagcagctcgttgccaaattccaaggtctaacttctaagcttgatttatgggagatcaattggattcctagaaaactaaatggtgtggcccatgatgtggcgcaatgagcaatccgaacttcaatctgtggtagagttggattgcccaattttgacagtctcctgtcgaatgtgaggacggatgctgtttgtagttttttttttcagtttgttttagcttcggttgtttgtttttgttagtcttttgtagtgttctgtttagttcttttgaactctgtttgttttctttgtgctggtttgggcacgtttaataaaaaaaaaaaactttcattgccattttttctgaaatatatattgataaatggaatacattttctaacttaattaatacgattaggaatatgaagtgaggtttaaagtaatttatctactactcaaagtttaataaaccaaaaaaaatcaattggaagaatatctttctagagaaaaatttaaacttatctaaaaaatttgaacacaaactaaacccacaaaaaactagggctgaacatcgggcgggtttaccgggtttcgggttggcgggtttcgggttcacgggtttcgggttcaaaaaattgaaaccgaacccggacccgaatagggcacgggttggcgggttggcgggtttcggttggtcgggtttagcgggttgacccggtcaactcagtcaactcggtcaactctttaaaaaaattaattttttattcaaataattattttttttatttttttatttattaaattaagcatatataatataacaatttgttcatagtatctactattgaagaaaaaatacattaatcaatccaaccaacaaacaaacaacctatttatcaaagattcaaatcaaacttcatattcatgttcatgaatcatgataaaagtgaaaactaaaatatttcaaaatacatccatatccaatatccatagtccataaaaatctaaagtccatattatatatataaaaaagagtaataaaaaaaaatatataatataatat

SEQ ID NO: 215067 - DNA, 820 bp, Cannabis indica
tacatagctagctaatatttcctaaccaatatataatatattatctattagtcaatataatataatcgtgattattatgacatcatcgtattacttttccgtttttttttataattatttcgatatatatatagttaacaattaatagttactaattgatgatgaaaaaaaatattattatatgtacataatcttttattatcaagctggcttggcttaggtatttatagtcatctattttacgtggaatatatacatgtaactacgttataaatatataataaattaatatatatctggcccccaaaaaacagaatacgatatcgatcgatgggtgcactgatcaaggttttagaatttatataagtacattttgttgattcgcaatgtatatgaaggggctttcgtggggtccattattattattattattgttagaattattattagaattaacgagtatttcactgaatccagaaaaaaaattaattttaactctagaatattaattagaagggtttattccctatacaattggtttcctatgatcagcaatgcatttcacaatataaattctataaatgagaaaatatatatgatttatataaataatgtataattatatataataattataacaagcaatcatgatcaagatataaaattatatatgggaaacagagagatccatcatatataatgcctccccacccacgtaccccacgataaatagtgaaagtacatatatagtgttacatatatatacatacatgtgtatatagttcattcatacacacaaattatatatatatatctatat

SEQ ID NO: 215068 - DNA, 577 bp, Cannabis indica
tgtatcaaaatttataggataagctaatttttcattaaatcaaaaactattcctcccatttgaacacacccgcctctcccttcctcctttctctctctcgctcagacccaagaaggtcgccctgccaccgcagccacgaccacagcttctctgacccacaacaatccactaccgcggccacgaccaccacatctgtctctacaacccacgaccaacactcgaacaatcacggcatcttgcaccggcggccacgagagttcacaatgtcaaaggtaagatttcgttccctccccttttcatttatgttaattgaatttttgcatgatttaggattaaaatgaataaaattattgataggtttattgatttatatatatggttaaatctttgtgatctgtgagtttaggttagatttaaggttgaatttggtgggatttgtgttttgggcaagaaattaggtttttaagtcaggcccgatacaatcctgatgcagacccgatgtcttctttgttgttgaaaaaggattaaggttgaagacgtaggtccaatatagacctgatgtacggttcgatagtgg

SEQ ID NO: 215069 - DNA, 958 bp, Cannabis indica
taggattcttcaatcaataaattaattggtcaacaacataataagatactgttacattacaaactaattagctttcggaagcccctctaatatcagaattaggactcaacccttttttttttaaagacaaatctagctaattaatttacatgagcattcaatttattcatcatcttataaactaaaaaagaaaaagattttattggtcaaatacatcataatataaaagcgcaggactaaaccaaaaatggagggtaataactaaaaaaaaggttagaataatactacttgacttgatactaatttcattttcttaaaagaaaaaaaaataacaaaatggagatggtcgatatatgaaaatgaataataaattaaagtccaaacaagcgtttacaagccttaaggattttgatatgttttttcttattaccagatctcgttgtaaccgcttcttcttcttcttcttgaatatcctgatcagctgatgctaaagtgcccgagtggtcatagatccggctgtacctgtccgtcacagacgaagatcttctcatcgaccaacccctcttcaccgttggtttcaccgaactgttcctacgcagaaccgccacattattattacctgatccgttcatcgttacctcaacggcgccgtttcgatgatccatttcttcttcttcctcttctttgtgaactttcttagtagtagtagtagtggtggtgaactgttcaacatctccatttgcagtagtattaatattaatattaggttttgggtatttggtcaggaaacgcgtaagtatcaggaagatctgctgctgctgatgatgatgatgatgagaaatctatggatctcgattttgtgtctgctactctctccaaagttgctcatcgtgtttaatcttcgaatccctttcatttttgtaatattaattaagagagggactcaatgctaagtgta

SEQ ID NO: 215070 - DNA, 557 bp, Cannabis indica
ttttggggccatagatgaataattccttataaagatcacacgaagtcctttgtcagaggacgagtcatctccaatctgatcaacgaaaatgtttcaggaattgctacaactattatcgcacaggatggggcaaaatggggcttcttggcaacggcataatggggagattaatcgacatagcttatcagcaacggcagaatgggacttctcgacagtgagagaatggggagattagtggacatagcttgactgacatatcaatggaggtgacagaaaaagattaattgtaaggggaagctttctattttttagccttttattttttattttttttaaaagtttaatcctaagagaagcttttaacttttaatgttagtattctgtctatttttttaaaaaaaataaaagaaatgtttaaaaaactattaaactaacaaatgttcttagataatcactttttatatataaagatattattttcatatatattatataatttttaaagaaagtgaatataagttatatatatagttataataaaatataattaaaataaa

SEQ ID NO: 215071 - DNA, 642 bp, Cannabis indica
gatagctcaatcagagatcaatcttaaagaatattatcttcccttaaagctaatcgaataagtcatcgaccctgggtaaaggatacttgttcttgatagtcagtttgtttatttctcgatagtcaatgcacatgcgtaaagatctatctttcttcttaacaaataacactagagctccccaaggtgacacgttgggtcgagaaaaccctaaatcaagcattccctaaagttgaatcttcaattctttaagttctatcggggccatctataaggtgctttagaaaccggctctgctccaggtgctaaatcgataacgaaatctatttctcgctgtggtggtaaacccgagagttcattgggaaatacatctaaaaattcttaaaccactctgatgtattctggtcgaattgattcaggccgtgtggtatccaataccactaccaagaaccctaggcatccatcttgtaacaaatttctagctttcaataccgagatcacttgaatttgggatccctgaactgatcccacaaacacaaatggttcctcgccctcgggtaggaagatcaccatcttccgcttacagtcaatactagcagagtatttggataaaaatccattacaagtatgatatcaaaatctgct

SEQ ID NO: 215072 - DNA, 685 bp, Cannabis indica
ctggctttgttgtggaaattgacacttatggtaatattcagatgtcgagtttgttacagcctgcatcatcaccaaactggctgagttctcaaagtagctcatcaggtttaattgttaagcgaacaatcagagtggacattccggttgaacattaccccaatgtacttgttaaaaatttaaaccacttttctcagagacttttatttgattaaagtctgacattgattgcttttgttcatgcagtataattttgttggccgcctccttggtcctagagggaactctctcaagcgagtggaagcgactaccgactgtcgtgttctaatcagaggtcgtggtagcataaaggatccaactcgggtaataataagattttctagcatgttgtttctatagtttttttatcataaaaatgttagtaatttattctgttgttcatttctaacaggaagaaatgatgagaggaaaaccagggtacgagcatctgaatgagcctctacatattctagttgaggcagagttaccggttgaaatcattgatgctcgtttaatgcaagcacgcgagatactcgaagatctactcaggccaatggtaattcccccatttctatcatcttaaaaaaaaatcatgtctttacaatctgctatcacaatttacttccctttacaccttcctaccattttg

SEQ ID NO: 215073 - DNA, 642 bp, Cannabis indica
ttaaataatatcacatgactatttttatttttgtaccaaaataacatagttagcaaagattatgagcagatcccattagagatactagatactatgtgttaattgttagaaattaaataagaattatattaaattgcatcaatagttaaattacacatgctagacacttgacctttaatctctctctattgagtattcgagctctgaattggctacgtagaataattatcggaaaataaataaataaataaataaaatttctaattggtttggaggtctcagtcgaccctatgtccatgtgcaaaactttaaatgaagcttcagaaatcgcattcattggacacgaagcagccatgaattttctgtcagcgtttttttagttttaaattttaataatattaatttcttgtgttatcgtcactctttagtctttttccttcaatttaataatattattatatataatcacacataattatttaattaatttgagctactcatatattttttaacgtacgtattacaatacatgatatcggcatcccgaaaatataggtaataataaactgtttgaaattaaaactgaacatttttatattgcatatagcagttggaatatttaatcaaaaaaaaaaactaata

SEQ ID NO: 215074 - DNA, 350 bp, Cannabis indica
caaaaaaataaaataaaatcagattaaagagattgcagcatcacagttaaccttaagaatacctatattatgtttcatcactgcttagaagacacaacaatagaaattgttacagcaagttcatacaacatcgtagctttagcactcaattattgtgtaaggtacttaactgcgctactaacaacatcttcagtcgcagagaacttgttattcacaaccactaacaacgatttgatggcgagccatcgaagaacaaataagaaccaacaacgaaataaaacaaaacaaaatcatgcaacacaaacaaaattaaaacactaaaaatacaaaaacactcaaaactatgtcac

SEQ ID NO: 215075 - DNA, 730 bp, Cannabis indica
ttttatgagtttgtgtgtgtttgaaatttttgaaggaaatggtgaaagaaaagaagatgatattctcattcgacactactaaaaaagcgagattcggtgttcttcctcggtatgcaaaggatgaacttctaatcaaatggtttgagcttccaaattgcttcattttccataatggtatagtgatcattatttctcccttatattatcttaatttttctacatcttgttgtgttatgtatatgaccaattaatattaattcatacaaaaatatagcaaatgcttgggaggaagaagatgatgaagttgttatgatcacttgtcgtgttgagaatcctgatttggacatgtatagtggggaagtcaaagaaaagtttagtgtaaacacttctttgtaagagtttttcttttatttatatataaattcacttatttattcatattaatatatacatagtgaaaaataacttttttgaagccttaggtaaaataattttttttttttggcctttattataagaatagatagtatttaattttttaaaaataaataaatataattttttaaaaaatattttttatttgagtctttaaattgggtgcgcactaggcgcgagcgtagctcggtttagcctaaggtcggacatggccttgatagtaatatatcatttttgtttaatccccattttaggtatgagatgagatttaacatgaaaactggtgtagcttcac

SEQ ID NO: 215076 - DNA, 761 bp, Cannabis indica
tgtaattacattcagttctcatgagggaccatgaaaattggagagtgtaattggaacccctcaattacttccaattacacagttaccgtataattacatggtcagacaaacatatcaaattgtataattacctccaattacacacaaatccaattacattgtgactttccaaacgcacccttaaaaatattattagtgcctaagtatcttagtattgcatataatttgctaactaatcctataatgtcccttatactagataattacttttaattacacttaattctaatttattcttaaactttccaaacatatttataattacaaggagagtgagaattagagtacagtgaaaaccgtcaattacattcaattacaattacttagtcaaataatataattacttccattacttccaattacaaggttacttgacactataattaaatactttttatttttaaaagtaaaacatatatattttatcaacaaaagtaaaaactttattttcaaatatcaagaaaaaaaaaaaaaaaaaagaacatcattttcacaaaataatttttaaaaatagaactataaaaaataatttttttaaggaaaattcaaattcaaattctattttttttctttaatgtacataattacatatttcaaaaaaaaaaaaaaaatcaaccattccttatctcattgctgtatacagcactgtacactgcattcattttttttattttttatttttttgtaaaatatactcattg

SEQ ID NO: 215077 - DNA, 470 bp, Cannabis indica
taaccttgagggtaaggtttgactgcaactttcaaagggtagggtggatgaaagtcgatggaagttaccgatgatgatgatttacccctttcagctttaaggagaccaatcaacttgtcttttgtgtacgaacttaattagaggaagatcgggcctcttcaccaatcctttcagtaatctcataagttttgattccttgatcattatcatgtgttgcttgagtttgttgttcaacattatgcacttgccctatcacagattcatttatcgttcgttcttcatgtaagtcgctcctttcaacatatgcttcttggtgtgtctgtggtagaagcgaactcagtaattgtatcatgccgtcttgggccttttgaagcctttccaatctagctaacacaacctcatatgtgttcgtcggattagtattattgttattcactactacaaaaatatactttttatcccggttttga

SEQ ID NO: 215078 - DNA, 616 bp, Cannabis indica
aaactgacagcttaagtttcactggcctttcaatcaaaaattgagtcttctctttctctctcaatttttgaatctttctctctttctctcttcaaaattcaaacccttatagtgatagagtacatgcccacacatagcaagttggtactcaatcatagagtacacaagcacgcgcgcggatgtggggatgcacctcggtcaagaccgagcttcagacaactcgtgaccgaggtgcttcagacatgttttgtctgaatagatgctcacgttgagctagctcagccaacagggctccactgcagcctttccctcgcacacatccccctcgtgtgcgcgcaggggtatgcagtgcatagccatcatgtgcccaaatcttatttttggtgatattttgactttcaaatatcatttttcattgaaataaaattcaaattttggtagaattttgtgtagaatccaaattttcaaataaaaatctaattatcaaaataaaataaatgttattaattttttaattaattaaaattaggtttagatatcagtagtctttgaatttaaaaatttgatttttccacaaactatccttatggttaaattttgaaattttgattatttt

SEQ ID NO: 215079 - DNA, 614 bp, Cannabis indica
tcgaccaaagggtgcaaaagatttattctattttaacacgtgtgtacattgtagacaaatgaactaggtagttttccttgcgcatcgtgaacaaattggaccagtcaagaactcgattcgagtgtcgccaaactgttcttgcatatttgcaaccgaaaagataatggccaatagattcccatgcttggttgtagatagggctgagcaaaaaatctaagaaattgacaaaaccgagtacaccgaccgtccgaacactgaaaaaaccaataccaaaaaaattgaaaaatcgaaaaaatcgtctccgattaaaactgcctttgcacggtcggttttagtgtcaatagcaaactgaccgattgaatcaagaaccgaatgaacatatatattttacactatacatatgtaacataattatttttgtacatatttaatatacagttttattaaactagttttactcttattgttttctttaaagtctcaattctccattgcttttatgttattataatttgatgtatttatatattataaacacacattcataaagtaatacaagtttttaaatataattcattaccatactagtaatacaaataatttgagcaaattca

SEQ ID NO: 215080 - DNA, 595 bp, Cannabis indica
ggttagatagataatattttgttatgtttgttttataccatacttttccattagttttgctctgtatctcattatctatgtaagactcttttctttactttgtaataatcaattcaatttaataaaaacaattcttctttctttactctatgtgttatggcctttgcaactctacttctcacagatcagaactttcagtaatggaaacatgacttcaagctctctattagcgcacgaaataaaactcattttcttaaaggtactttacctcaacctcctcgcaatgatcccttgcttaattcttagattcgatgtaaccaaatggtttgtcttggatcttacatttggtgtctcctgaaatcaagagcaacattatgtatattgacactgatgttgagatgtggacagagttgaacagttgattcaatcagggtaatggtcccgaatctttaagctcaataaaaccttaaaataccttcaccaaggtgatgattctaatacatatctacttcataaaactcatggctatgtaggatgaaatcagctagttaaggcctcagattccttgcacttctgatgttgctgcacttaatcc

SEQ ID NO: 215081 - DNA, 651 bp, Cannabis indica
aaatcatttcaacatttaatgttatgaccattctctttccattagttcccatccattcaatctatcattttcgtgatcgaacgattattgccttttgggtataaattttaataatccctccactttcgccattaccgccacaaagcttttagaacttgaaaaaatctcaaccacttccatttctgaaattgcataccctcactgtctttcacttttttttcttcgtatttcatccgattgtatttctcgactttggaatcaccaagatctagattttctcgaacccagggttctcattacaagcttctctgacacccaaaattttcaccgaactagtaagtgatatttccttttgttgacttcttttaacattttcaatctttggtttctttgtatgtgttttttttttggtaatgttaattttttaagtgagctttatatgaatgtttgagtaacctagggctagaaaatttaaggttacgtgattcgcaggtcctgatttttatttgtgctctgttttttcaagaatttaggcattattctctgtcatcatgtcctaatttaacccagaattcgtactctcagagtcctcagaatcatactgtccttaatttcaggccatagtttttaaatctcaaacccaaaaatctc

SEQ ID NO: 215082 - DNA, 546 bp, Cannabis indica
cttattaaagaagccctaagaagttgagacaacaaaaaaaaaatcattaaataaatcaaacatagtgtttaatcaattactttctcttctattggttactcagattagtggaagaaattatggagtcttaatattcctctataagtgaagatgtttagttagcaaattacgatggctgacaaccgctaggttttgccttttgagggaacgatgaacgtcaacattgatctgacacttgattctgataatggacagtgtgatatgggtatggtggtttagattttcgaggtaatgtgattggctcggctgtttggcatgtaatgggtgggtattcactaaaaatgactgataatggatgggtatttattgtcggttgctaggtttggataatgtttgctttgaatcagactgtttgagtgtggtgttgaagttcaataaccctatctcgttggcttcttctttgcgtttaatactaaatgattttagacagttttttttagtttattcgatatacttgtttttcttgttgttctagaatatttacgg

SEQ ID NO: 215083 - DNA, 868 bp, Cannabis indica
aaatatatgttggtaaaatattgtatattatatgcttttcttactgagtttgttgactcaaaaatattgctttcgtgtgtaggtaaagagaaggccaaagctgaatagcattgagttcagaggttggggatgattgtacatgcgagacagtgcgacctagagagttcagtctccaacaacttgggcttcattttgtgtaaggtttaaaaatgagatcccagttttgtgtatgaatatatgtatatatttataaaaatttgatattatcacgattttcaagaaaaccctttgattaggaaatatgtgcaatgtaattagaaagtcatcgtagcgtgcctaatcattagggagttacaataatagccttttgaatgagaactttggactctcaatgaaagcacaaaaatgttgactatgaatttagccaactgacgcagagtctgactaggataatatttcatttatgactgtcacgtgcggaatgataataaatatcaaagacacaagaatttctaaaggtttggcccctttgattaggtaatgacctactctccattattgtatttactgttgagataataccatgcagattacaggctaaaaccttgtaatttctacctatggctttcttaagttgttacaatgatgagaatgtggattacaaatgaaaagtaatatgagaagtatgagaagagtatgatgttatgagagaatgcagaaacattgaacacttaggatcttagtgtatcatgagtgtatatgaagagtaaatgaatggagagaggtcattttcacataatgttaaggccctttatatagtgttaggattttgcaacttataatttgaaatataaaaaggataacaaac

SEQ ID NO: 215084 - DNA, 643 bp, Cannabis indica
aaagagttttgttataaacattttaataatttataggcgaaaaattgctaaaggatccttatttactaataaattacaaaaaattaactaataattataattaatttaaatttaaaatgtaattaatcttcattaaaattttataaggaaatcaattattaggtgattattaggttataagttaattattatttatttttatataatttgctaaattaatcacaattattcaatggctaaaaaaatgtaaccattgtaaccattaaaacctcctccatatataatatattatatataataaatatatagtataagcatcatagattttttgagagattatgatagtttgataatctcttcggtagttttatgagaatggcagtttttattttcttccttattaatatatctcatattaatatatatacatatatatctatatgaacatatataaatagaagttacagagtagttacaatccactaaacatcaatttgattctaatttaaattactttgcctttattttttatttaccttataggtattaacaacacttatttagaagtgatgttattgcttatttatatttacttaaaaaagataagtttaaaaatagtgagagttattagcaacacttattc

SEQ ID NO: 215085 - DNA, 632 bp, Cannabis indica
tattgttgggagataaaacaatcttgactcatcttctctctaaaagcatttttcacagctactaagcgtttccaataccagttgcagtgtggatgagtactatactcccaccaaataaacactatttatccatttattaaacaacttgtttttttttcttggaattacctagacattattttctcattgcagctagattccaatcttgaaattttctaaatcccaagctacctgtttttttaggaagacatatattattccaatttccaagcaactaagtcaggagctaaataatactaaaaccccctatataaaaaagctctacaaattacttcaacctctctaagtaaattttttgggaaaatgataatttgcggccaataagagtgtattgagattagaactgaattaattaatgttatactctccccatatatgtttctcgtagctccagattttaactctatgagtcattttctccaatatactattacaatcattagttgaatttttttggaggggagttgacttcgtagagaaaaaagagactttaagcactcatttaacttcttcatcggccataccttcacagcacattattagttttgcttcactcgacattaattccaaag

SEQ ID NO: 215086 - DNA, 519 bp, Cannabis indica
gaggctcgagcatcttgccgacgatccgatatctttgatagtcacaggcgaagctttcttgagatcgatgcaattggtgaaggattttgtctttggaaactatttttcaatttggagaagatgagatttagcttggcgtttttaaatatggatgagattaggaagaagaaaagagatccagtttaaggttgctttgagtaatcaaagtgtcctacgaacgatagcatcgaagctccaggttttttcgttcctacctatattcttaaattcttatattcattatttcaaaaaaaatctattctcttcatgattatggtatgtattttacaatttatttgctctcaaacatcttttagagcactaaatatctctttcaaaatttatattcatttttaaaatatttgttttatattttgctttttgttgatgcgtgaccatatcactatgccattgtcaaatttttgtggtttttgtttgtcactaatggccggggtggttactcatgcaacagttactaat

SEQ ID NO: 215087 - DNA, 632 bp, Cannabis indica
tcctagagatgttcatgtaaaaaaaagagagctttttgttagtatccaaagagagaaaaacagagagaaatataaagagttgtaaatcaaaagtgtaacctttgtttggtgaaattttatataaatagtcacatagaattctctgatgtaaatactagaacttatctattctcatctctattgctgacggtgactacactacatttgatgtgttatattagaccaaactgatcttacaaaattaaaactagccatataataactttacaaaaccaaaaaattagccatgttagccttactaaactaaaactagtcatactgccttacaaaattaaaactagccatactggccttacaaaactataaactagccatataaacaaaactagccatattggccttacaaaataaaaaactagccatattgaccgtacaaaagaaaactatccacattggtcatacaaaaaaactagccacattggccttacaaaattaaaaaacaagccacttacaaaattagacatattgctttacaaaatcaaaaggcacattagccataaaaactaaaaaaccatattaatcataattaaaataatttaaataattatgtaaaaaaaatatttaatataaaa

SEQ ID NO: 215088 - DNA, 623 bp, Cannabis indica
cattcatgcatcattagatcttcttttgggttttactttttaagagggggtcgggtatttgaacagaggtgcggttagcaattaagttaaacctgcagacacattagttctaatgaattgagtactaggcttcatcactcctctctagtgcttgattaaaattcaaacacctctttcaattttaaaaccgattgacaataacttcgaacttggaccataactgttgctaaaattttctattgttaataaaagtagatcaacattgcatgtgtactataataagaatacttaaataaaaacagagcataagcaaaactgcataagcatgaaaggtaacatacttcaagttggaagtgagggcatctcaatttcttcgtccaatatcccattcgatatatctgaagtttgaaaagaatctttcctacctcgttccaaagaagttgcttcatatatccctacaaatttcaatcaaatttataagaatcacacagaattaataattataaaaagtaacaaagatgccatccacgctaaatactgaatccagcaagtgcgcatctcacagcgaagaaatgtcgaaacactaagtggcagaagctattttaaaaattaaactataaaaa

SEQ ID NO: 215089 - DNA, 1164 bp, Cannabis indica
ttattgtcactaaatgttatttttcaacaaaaatatattttttttattaaaacaattactttcaaaaaaaattgtttttacttttaaattttttaattaagaatcttcttttttcttttttcttttttaaaacaattactttcaaaaaaatttaaataattttttaattaaatattttgaactcttaccgtaacttagaccttagaaattgaactcggacttaatcccaagcttggatttggacctactcccaattctacctcagactcggccctagaccctaattcaaataaaattaacaaatgaaaataaaaataaaatttatagaatatatttttattttttgtttttaaaatttgaaaaaaaaattaataaaatacattttattttttaaaacaaaatttaaaattaaaaaatactaaaacaaaattattagcaaaggtgacctaacctaacacaataaactagatgatccaattaattacgttatatcctccaagtgcgacaaaaggatcgaccaaatgagtagacggacatatatgtatcatatgaaagtttttttttttttttgtaagtagagggatgcccttagagggaaagaaaagaaactaaattgcaggggtcatcgccaatccaaattgctgcttcatctaaccccactgcccacttagcgaaatgatgagccatggcatttgctgaacgactaatgtgagagactcgagcgttggggaaaagagataaagctccttaattgtacgaatgatgtcaccaaaaaagagagagatcttccttagtactggtgaggcgcgacagtaaagttagactcattgaaaaatatgattatctaaaattgatctgatgaaacaattgatagatctgcattttgggcatatacttccttgtccttagtgccaatacatagctcgctagctaggtaggttattagtgcctagcctaccgtcaatgtcaattaattaaagtaaatttaatatacattatttttttttatatgaaaaggaaaaaacttcattaatcacttgcaaaaaaaaaaaaaaaaaaacgtaaaaaaggtaaacgcaacgagaacaaaagtaagcgtcgtaaaaaaaacttaaaaaaaaaaaaaaactttaaaaacttaacttaattttaactactaactaa

SEQ ID NO: 215090 - DNA, 645 bp, Cannabis indica
gtgttaggaaccacaattgaaacacacacctaatagctattactatagacccatagctctttgcaatgtagcttacaagtgcatctctaagctcttggcgctgcgtttgaagcccctactgccctccatcatttctccggctcagtcggcctttattcatgggcgttttattgcggagaatacagctgtggctagagaaattgttcattccatgagaagaaagaaaggaaaaaagggatccatgatgataaagctggatatgaagaaagcgtatgataaaatggattggggatttattcttaatacgctgaaaggattaggtttccatctcaatttggtgaagtggattgagaagtgtattaccatccaacaaatgggattgcttataaatggatctgttcaaggcacaatcaaacctacttgtggcctcagacagggagacccctatccccgaccctcttcattattgctgcggatgttctatctagattaataactacaagaatgatcgaggggcacattcaaggattcaaggtatccagagatggcccggcaattacatatctgatgttcgctgacgatgtaatattattcgggaaagcttcggtcaaggaagcaaaaagtttccttcggtgccttgaagat

SEQ ID NO: 215091 - DNA, 517 bp, Cannabis indica
atttgttaattttttttaatttttaaatatgacatgtactttctttttttattagaaattgaaatagtatttgtatttgccttgaagtaagtgagaaacagagataagagttataattttgatttaaatttaaatttagtggatggttttgggccgttgattgtgatcgttgatgttaaagaaaagatttttaaggtaatgatgaaagctgtccatttcttctttacaaaaaaaaaaaaaagaaagaaagaaagaaagctacccacttttgttttcatgcaaaagaaatataataaagtaataataaggttttgatataatacaaactccaattatataatggattacataaaaaaaaatataagttgagactttatttataagagtattactaaatatattaatattatttgatattatttatataattaattaaactcactaaatatattataaattctaatggactttaattacacgattacctacttagaaaattagtgggatatttacacac

SEQ ID NO: 215092 - DNA, 769 bp, Cannabis indica
aaattatatgtataaattaagctgtttaaattatattttcttataaataaaaatgaattatatatttgagttttgaaatatatttatatcatatatattaaatatttaaattactattgtttacattaaaatactaatcgtatatataatttttaaaatatatataaatatatgtatgaattggattaaattagatcggttacttttacatgtcaatcaacattcaatccgtataagtgtagatttttattttctaatccaatccaatctacacaagtgtagatatatccgcactttacagattggattagattagttattttatgaacacccctaattaccatcataatctcattcttatttcttttttccccatcatatatatacataaatactctactttaaggagtaaactaagtgggataggagctacatcattattgctggtggactatagtttaataagccaacatataatcattagagtgttaccgtgtaattcaaatgtaattaataaaattgatcattctattatgattctaattacataatccgcattgtaccttgtatataccatttatgtaagtgagtaatatttaattatgttaatattctaataatgttaactctcatttttagctaaaaaggatttaaggtttgagaaggagttagtttgaaatggtccaattccaactctcaatgttgtgcaacttgttcttaagtgtttatttcaatgaaagtttcattttataaaaaaatataataaaaa

SEQ ID NO: 215093 - DNA, 1086 bp, Cannabis indica
caccgaatatatctctatatattatagcaaaataattaattattataataccaactgtatatgcccttggccttgagaatgacacctaacttgcccatatttgtaataacatcaaagttaagtttaggcaaatgtaatttgttgagttgcttagactatttgtctaagtttttttgttttttttttttctaaaccaaaaacaaaaaaagctttaaacaaaggagaaaaaagtcagtgttaattattccttgttttgacttcaaagtcagacatgaaataaatcgtaaaaaaaaatgctttaaactcacatggtggggtcgtaattactttggagccttaatccaatataaatgcgtagcaatgaagctatgactgtaaagaactaatggcaagaaaatatgctgttgtcttttcttgttaaagggtcattttctaatacatggattagtgactcgataataaagaggaccacttcaaattttgggacaaacctagaacgaataaggaatagtttgggccattctttatgacccataaagccatgaaagttgtttgttgaacttggatcaagaaaaatatatgtactttctcctatataaaatataatggggattgttgtttaatttattagataaataatatacaaaagcttgaaaagttgccaccttcaatgttagcatcatagcctcataggtgatgtttatatttaagcattgagaatgagaatatgactactcaaacgtgatgagagataaattttccaaagtattggtttgacaaggtgagcattgcaaaacacaaaatgattctatgtttaggatcaattatccttattccaatactgtttttattgattatatgtatgttatttatgtttttgaatggacgacacgtgacattttcaaaatataattagtttacataaatctaggctcaagtcttccggcatataaaagtctagtccaagttggagttgagcccgagcccaactaaactccaaaagccttgcctccaaagacaaggctactatgcttccggaagcctatccaaccttccaagagatagaacaaacgaagccctccgaaa

SEQ ID NO: 215094 - DNA, 704 bp, Cannabis indica
tatgatggtgtagggaatgatcgacgatagagcatcatcaaacatccatttcaagcaagcccactcaaaatggtttagcattagaagacaagaaactatacgaacagctcatgtatggtttcaacggagttgacattcctctatgtggcaagatcaagctaccacttactgtcggcactactccaatgcagaccaccatcacggtcgcgttcatagtggtggacatgaagtgtctgtacaacgtgatgctcaaaaggcttggcctctatgaccttcgagccatctccttagtataccacttgttcgtcaagttcccaatggcggctggtatcaattgtctctttggcaattaaggaactgactgcgagtgctataatgcatcatttatcacttgccaagaagacctcctctgctgctatggcttcagaggggacgaacaagacctcccttgctgctatggcaccagggggacgtgcaaggcctctcttgaaaaagccgaaaagatgacaaagacctctggaaataaaattatgaagaagacggagacggcagctaaagtcacttgaaggtgcgcctaagacggggatgacattgacccctattttggggaaatcgactcgggagttggtccaaccaaggaacttagagaacttcccctcaatacatcagactcaaccaagattgtcaagattggaacaaacctg

SEQ ID NO: 215095 - DNA, 957 bp, Cannabis indica
atcttcatctttcttctcatttttttccaccaagatcgtcatcaactgatgactgacttttttatgctgcaactccatgcgatagcaatcgagagccagcatctggtcaccacacaccactcccaccccatctgacgtttggaatttcaaggataggtgcttgatcaaactgactgcccctagtccgatcagtgatggacgacctaacaatatgttgtaagccgagggtaggttaacgactaagaaatcttggataacagtagcagattaaggtgactcgcctaaatttaatgcgatctcgattatgccaaggctggcgatactgtctccggtgaatccgcaaaggttcaccatacaaggccttaatttttcctttttgagccccattttctttaaggtctgcttataaaggatatttaccgagctcccattatctattaacactctcttgatccttttattggcgagctgaatggttatcaccaatggattgaggtgaggatatgtcatgtttttctcatcttccttcgtgaatgtactgggaggtttcttggttttcaccttcttggaaggttctagggcaaagactgactgcttgttctttatttctttcacatatcttttctgggcgttattgctttccactgtgatatgtggccctcctgaaataaccaggatgtcctctccttcaacaggaataggttgtgacccctcgttatttgggttattgggtagactgggctggttgtatccctggccatgtcttttgacatactgcttaaaatggcctctagaaataagactttctatctcatctttcaattggaaacatgcgtcagtcgtatgtccaatatccttatggaatttataatatttgttaggatctcttttgctcctcaaatgcctcataggctcgggttcgccaaaggaaactttctgctcatgtgcaaggtaaat

SEQ ID NO: 215096 - DNA, 504 bp, Cannabis indica
ttgttcagtgggttaccattaacatcgtaatgacccaaaggacagttagggaggacaatacaggtgttgtacctcctcctcctaactgatgcaacctcctcatgatcagactcagcatccggattctcaaccccctgatcaaccccaggatcaccattaacatgaggctgattagcctcttctgcaaccctaactcgaccgcttgtagccaccctagctatattagggtcactcgagaggtactctacgacaagtctgcttcattctggctatacatacaaaataaataagggacctatgcggtcgtcacctcccttatccaacacccagagctacctgcatagcagagataaggggaggtgagcaacctaacaaagctacaaacacattataataaattgtaatcaagggtaccttccaggttaattacaatgtacaaggtcatatcgaccagtagcgtctaagtacactactaagacatatagtaaagtcctaaagttacta

SEQ ID NO: 215097 - DNA, 605 bp, Cannabis indica
tatgtgtacatttttatacatgtaacacatttatgttgatatacccagagacgggctcactcatattaatgtgggggttactaacaaaaatattatcttttcaaaaattaaatataaggttttttttttttttaatttgataattatggaccaaaatagtagaaaagcttctaaaattaggataattacataatgcattattttttgtaaaaaaaattacatttttacgtttaaataatttttttttacatttttacgattttttatagagacaacaagaaaactacataaaaataacatgaaaataacatcaaaataacaacaaaaaatcaacaacaaattaataagagtacaacataaaatgaccgtattttctgtaaataaaataaaaaaaaattgtaaaaatattttaaaaaattttgtgaaaccgtatttttataatttttttgttgtttgtgtgtatttgtgaaataatctcattaattaaatctagtaatagtaattataatgtaggtatatataaatattctttttataataaataagctcccacaaaataaaattttttgaattcgtcactggatacacttaatattattatttca

SEQ ID NO: 215098 - DNA, 753 bp, Cannabis indica
aaaaccttactacatagggcatttagaaagcggatacacctccaaatctgttttgcaagaagaccttgattgaacatacccaaatctctaaatcccaaccctcctttctctttcggtttacatacataagaccatttgcactaatgaagtttcttgttctgcttcgatgacccccgccaaaatcttacagccatttgatggaggttctttatagtattctttgataatcgaaaacagctcacagtatatgtaggcatggcctgaagaatagccttaatgagtacctctttacctgcaactgaaaacattgatctcttccaacctttaactttttaccatactctaatcttgattgtctcaaacagtttcttcttgcttctcccaacaaaagatggcagccccaagtatcgcccataattatctaccacacgaacttcctttaacgtagctaatctactcctcaaacttctatctatccttcttccgaaacacatctcagatttgtgaaaattaaccaattgtcccgatgctatcgaatatttattcagtagctccctgaagcaactacactcctccatattggcctcaaaaaagacaagactatcatccccaaaaaataaatgtgagacctctaattgtcttattccaaaggatagcccccgaagtcttccagccatctcctctctgtttatcaagcttgaaaatgcctctgcacagaaaagaaacaagaagggaggcaagggatcaccttga

SEQ ID NO: 215099 - DNA, 837 bp, Cannabis indica
ttaaaaactttttcttcctttcttcttcctctttttctatgtgttagtgaaccgggttgagacttgggttgtaaaagttttgaaatttcttttatctccttacattgtacaaaatagctacccataacctaagaatatatgtaaattgttggatagtccttcaaaagaacttctatttccttttgatagggaatttcttctctatcatagacaattttttaatttctgaaataaatcagacaaattctcttagggtccgtttagcatgcaggattggactagactagacttgacaatttcactaatctagtgttgaccatgctggaggaatggataactaatccatttaggtggcatttggttgggaggaatgaaaatataagaataagaatgggaataagaataagaataggaatgaaatgaaatttaaaatgtataataaaaattgataaaaaaatcattaaattttttctcttgttacatttgaatgttctttccctcctttttaaaatggaatagtcattctaccaaaatggtggaaagagcattttattgaaatgtcattccaatactttaaaatgcaaccaaacaaaggaatgaaatagaaattgtttcctttccattccattctatttcattacctccaaccaaacgctaccgtctgtgttatttattccatctaacactgtgggctaaataatccctgtacatacgattattttttaatcttttttttttatttttaattttgtaaatacattttagatttaaaaaaaatttaaatgaaagaagagaatatttatgtataggttttcttttaaattttaaaataatatt

SEQ ID NO: 215100 - DNA, 558 bp, Cannabis indica
atgtaataaacacaacaagtcagtaaattcgtggagaaatatttcgcataattagcaagcccaagccagtgactggaataatattaaaatcacacaaaactttattcctgaagcctacttcaatggtttggcaaactgataaataattatgacggcctccagtcaaataaaaaaccaatctgaaaagtcgtggaaaagcccaatctaatgacaacacaacatgaattcaacactcaacaggccagtgttctaattaggaagctagccagcaatggttttcttcatatgagcattgaattaccacttcaattcagtaagcttctaccataaaatgcaattttgaaatagactccgtaagttcataaccaaaagtccaaaataaaaacagcaaaacatacaattagatttaaaccaaattgcaattgaacactccaaacagcaagaacccaaatttcagaacaaaaaaaaaaacacaaccatctactgtcacacgagcacatttaccgaaacagatgataacatacgtcgcacgaatcataactattcgtaaaatgttct

SEQ ID NO: 215101 - DNA, 1338 bp, Cannabis indica
agctacttatattgccaagctaccgagtccgaggctcgtcgagtacaagaacttttgagaaagtttgaaatggcatctggtcaagaggttaatttaacaaaggcatctatcttctttagcactaatacctcggtcactgataaaaatgtaattagccagcagctccgaatgtccattgcttctgaagacagcttttacctaggtcttccaagtactatgactcgtaaaaaagctgtagtacttggttatctcaaagaaagagttcaaaaaaagcttcaaagttgggaaggcaaatttttatcaagagctggcaaggagattttggtgaagactgtggtttaagctctactaagttatgccatgagtgtctttttacttctgaaggaaattagccgtagtattgaaagcatgatggcaaattattggtggcaatccaacaaggatagtggcaaagggatacattggatgtcatgggagaatgtgtaaacacaagaaagggggtggtatgggttttcgaaacttgagagattttaatttggctatgcttggcaaataagcttggagactcctcaccaggccgaatgctttggttattagagtgttcaaggcaaaatatttcccttatagtgactttctttcagttacgattggatctaatccgagcttcgtttggaggagtatctgggaatcacaagagatagtgaagaagggagttcgatggtgtattgggacgggtcaagatattcctattctaggttctccgtggctgcctgatgctattaatccatatgtcatctcggatcaccctgctctttcgaatgctactgtcaacaatcttgtcatggttgatggctcgagttgggatgcggaagttattgatgacctttttatggatagagacatcatggcaattcccctgcaagtggatagtgtggaagatcattatgtttggtctaaggagaattcgggtctctatacagtaaagagtgcttacaaccttctccaaaagcttaagggtggatggtatgatgacaatgattcgaacttctggggtaagctatggaacttaaagttgcctcccaagatcaaaaatttgatgtggcgcgctgcagtaggttgtcttcctactatgaatcaactccgaaccaagcatgttgatgtaagttctctttgccctgtttgtcgggttgctgatgagtccattatccattgtttagtcacttgtcaagtgatcaaaacttgctggaatagggtcgggattggcactttaaatgccccgacttccttgttcatggactggtgcagctttgtgtttaacaaggtaaatgcagaaaaaaa

SEQ ID NO: 215102 - DNA, 646 bp, Cannabis indica
gtaggccagtgctgcaatacatgttaccaaatacactgaacttgagatatattcgtgataaccattcatcgaatgcattgaccaacaccaacaaccgttattttatatgaacataggatataagtatcaccaaaggataatgatctaggagcttataagcagtttatcagctagaggagctttctaggagccaaacctttgaagatcaagaatccacattcaagtacaaatagataataatcccagtcaatcaaattctcctatttcattcaggatagaactatactatatacacatacataccacggggtgacataggaagtgggttcttcaatttcctatagaagttatttatccaagtacctactactatgttctgccttttccatataaacatttccatcagaacttatttcacacaaggatgtgacaaatcaaggagttgagaaagaacatatccccattgttgggaaatgaaaataaacaccatacattttaatacagtgtactttctggaaagcataaagaaaaaaacatgtattttacatctttcgaagccaactcacaaactacattatgttgtttatttaaacagtctaaacgcgacaaacctgactcttttcgttggggtgtttctcaacccaac

SEQ ID NO: 215103 - DNA, 1336 bp, Cannabis indica
gaccatgtaacttggcctttggagcagaccaattcaacccaaaaacagaatctggaaagaaaggcattaacagcttcttcaactggtattcttcaccttcacttttgcaaagatggtatccttgacattcattgtgtatgttcagtcaaacataagctgggcttgggtttaagtataccaccaattcttatgctcatatccactctattcttccttgtgggttacaaatattatgtcaaagtaaaagctagtggaagtccaataacaagcctagcacaggtcattgtggttgcttttaaaaaagaagactggagctaccagacctgccatggaaatcactctacacatatatacctcccaaatccatcaattccaatcttccttacacggaccaattcaggtgaccccttttctttcttttatttatttaagaggataaccctttccctagtaaactgaaaaatacacatatttctcaatttctttttcttccttttttttattttttttaaaagtagaaaaaaaaaatacataataaacataaactatcatttttttaagccacaaaatctcttattatcatgtgctacgtgaaatatgaatgaatttattatctattagtagttgcacactaagatattgtagcatctaggtttggattttgtctgatattattctaaagagtaatttgtatatatttatttataatatttttaataaattattaataacaatcctatcaatctgacaaatacaagttattatttgtatttattttttaatattgacacctcgaagaagaaatataatacccaccaaactatgtgaatgaccacaatacaacctattattaaaattgttggaccacttatttttccaacaaaatatattttatataaacaaatccatattcaaagtacaaatttgatcatttccccaaaaaaaaatactggtctcaaaaaacttgtctagtacacaatcttcaataacatggatattggtgtgtctaccagattttctaaacaaagcagcaatattgactccagtaagacctaaagtagaacccagatggatcaccatctcatccatggagacttttgcagcctacaacaagtggaagaagttaagtgtctaatgagagttttaccaataatgggttacatctatggtttaccatgttgccattgtccaaacaacaaacttatgttgttttccaagcccttcaatccaacagacacataggaaatttcaagtttgagattccagctgcatcctacactgtcttcaccatgctcagcatgacattgtggatacctttgtacgatagaatcattgt

SEQ ID NO: 215104 - DNA, 550 bp, Cannabis indica
atagtgaggggtagatgaatttgcgccaagggtgcaacactctggccggagaaaccatacaccggttgggtacatgggattagatctttgagttggagtcccatattcttatatgctgtcttgaatagaatatttgcagaagctccattgtctatcatggtccaggccactgttttatttgctatctgtacttctaggaccaagggattgttgtgtaggaagtgaacatggacaacatctacatcagtgaatgttatagtgggttcgcctacccatgacatttttggctttctctcctctacggccaaaactactactttttgctcgtgctgtaaggttcgagcatacctttctcgagcttttcctgagtctctagctaggtgtgggcccccaataatgacttgtaaattcccgtccagtggtggaggcagtagtaggtcttaattattgtctgcttgggcggcccgctgattctgattggccttgacatatttctgcaagtgcgtgttattttttctgattaagaatcaatttcccgctttaggttgtt

SEQ ID NO: 215105 - DNA, 525 bp, Cannabis indica
tgccattaaaaaactgttagggaaactctaccaaagtagcattcatcctactgggggagtctttccaaaaaagctaccaagtgccttgccatccattggaagaaactgactacccaggagatcataaggcgcatgcatgcatctcttggagcttcccagagcttggaagacacatgtgcatcacttttcgtgtgtgaaaggtcactaggcatacgacacgtcttcaaccctccatccaaaaatggaaggactgcttgaacttctgttgcacgcccaaagacctatttcacccctttgatcttttcaagcaaagtcgaagcttgaatttttatgcgatgtcagccttccctcactggaagccgaagcttgcttcgtaaacttcagcatgactctcgcgttcacaatgtttttcatgcgtgaaggatcaccggaggcatgacacatctttaaccctccttcacgaaatagaaggactgcttaaagtctgtcttactccttgtgatgctttcaccctttaatcttttc

SEQ ID NO: 215106 - DNA, 727 bp, Cannabis indica
gtcattccttcctttttaaaatggaatagccattccaccaaaatggtggaaagagcattccattggaatgccattccaatactttaaaatgcaaccaaacaaaggaatggaatgaaaattatttcctttccattccattccatttcattacctccaaccaaacgccaccttaatgtttatctcatctcttgtttagctttgacaagtactgattcggcctataaccataacataaatggaagaaaaattcaataaccattcttcattatgcaaaatcataaattaagcttgcataaaataaattatattacaaaaaaactttcatactctcttcctctcagtatcgctataataatatgttcaaagaatgacatgtatttttttttttaaattaaaggctaataaagtagaattttgccaacttttttccactattaatactcatctcagaacaataaagatgagagtagcattagaagatattattattggtgttacatggaaaaatttgccaaaaccatggtctacatgagatctgtggtaaagtgcaaatattgcaccagacaatagataccatatctaacttgaaaagacaaatgttcatactttgcaatgaaaaataacaaaccactattttcatagctggcacaaaatgaatatttagtcttacttcttttgacatagccaatgagtttcttccattcttccaaattcaagaattagttga

SEQ ID NO: 215107 - DNA, 1124 bp, Cannabis indica
tcgacgagctgagtttagtggtgaagacggctcgcaaacgaacaccggagatagaccgaaaagtccgttacaaagtttcgaaccccaactttaactgcgatcccgagctaacggcagtgaaagagtggcgcgcttgagtgtgaggtcgcgtggcaccgagggggttcaggtggtccggtgcgtggggtgggtcgccggagtgtgccggtgatggagctttgtagttttcttttgtgttgtgaagagagaaaaaaagaaagagatagatagagagagggatgataggggtctgctgttttttttttaatcatatatacatatatattattatttaattattattttatatatatttgactcagtcaaaaattgagtctttaccgtaatactcacaaccaatcaaaatctttgacaccaaacttgctttagatctatgagaaataaagtaaatagtttcacttgaatataattgctgaagaacaaaaactttatatgaatcatcaaagacatctccttgatatccaacactaagtttagacacttccacacatgctatgagcttgagcaagatcgatcgaggaagatgagaaagaagtaagaaacacacaataattgtgtgactctgataccatattatagtaaatgaatagaagataattatttttcattaattattcaaaaattacgtaataaacttatatatatagctcactatgctcaactaacataagagaatagttacaagattgtaactaaaactaatcacaataggtaactagtggccaacttgtgcagctagtcgcaaccgtactaacttagacactaattaatcatcacctatatttgataattatgttcactatgccattattataatatgtagacttttggccaaataagttttacttttgaaactacaattaattcgtaaactagatcctctaattaataatttgacgttactacgtacagaatatatatatctattatatatatataaaatgaaatgatcggatgagtactggagacatatataaattcatcgaagtgagaccaatccgaagttacatatatattcgatcatttcatcacattcattgtacctcattatcacaaaattaata

SEQ ID NO: 215108 - DNA, 877 bp, Cannabis indica
tttttccatttattcatttcttttgctgctttgttcttgaattgttattactattttatcaagtcttgcatgcctcaaaagtgttaagaggacacattgctcatattccacagaggtcgatgttttttcgaaaaaaaaaacagaggtcgatggtttgagagactataagcaacgacaacaacaatggtagatagatctatttaagtttttcatatttgtaaagattataaatctaaacttttaattttcttgatttgagattttgaattgttctgatttatttgtttatgaatttattgaaatacttgaatatttatttgttctgattttgaattgttctgatttattcatacttgaatatttatattgatgattgttaatgaaattagtctgtagctttatgtttctagaaaaaaaaagtattttttaatatagagtttaaattttatattgatgattgttaatgaaattagtctgtagctttatgtttctagaaaaaaaaggtattattttatatagagtttaaatttaaatttatataaacatatttatttttaaaaagaatcgcataaatatacaaatacacaaaaaaaaatacacaaatatataagcccaatgaataaattaatttaaagtagaacatacttctaattttagattgttggtgattagtcgtaataattcaaacttttggaaataaatcagctcaatcttttcgtgccaatataattggaaaatctttcggctcaattttacctgaaagttacttattaaattaattgtaaccatataattctttaaattcctttttcttggttatatatatatttttttttgtagataagtctgctatataaattcaaagagtcatttacaa

SEQ ID NO: 215109 - DNA, 672 bp, Cannabis indica
ggtaagatatgggtaagagttttcgcggatctccctattaccgggaaacctacagaagtaagaatgggaagaggaaaaggaaatccaacgggttggattgctcgtgtgtctacgggacaaatcctatttgaaatggatggtgtgagtttgtcaaatgctcgacaagccgctacattagcggcgcataaactatgtttgtcaaccaagtttgttcagtggtcgtaacgtaatgggttagtggggaaaaagcgggccgggattcaaaagaattaggcgaagtgtttgttcctgaacgacggaagtggaaagacactaagggagagggatatactcctttatttttgtaatcgccgaaattgtacgacgaacctttttgttccaggcgtactaccctgatacgttaatgttttttttagccggcccggttttaaatagaaagtgataatagttataataaataagaaagagaaaaactaagattcaggaaaggaggctttatgggagaaagaaaaggaagtatgtatctggggggggggaagggaagttggcgagaattttgtttaggtcccgaactgaaggggggaccgacgtcgatcgacggatgcaagctagactttgtaacaagatttctatagaagaaggaaaaatacaacgtggcggatgaacaggaag

SEQ ID NO: 215110 - DNA, 699 bp, Cannabis indica
taaaaatgttcattgtgattgtttttagataccctgcaaaattttataaggtttggcttagaatttcaggagttataaaagttttaaaatgagatagtggaatttcgagccatatgatttaggcagaattcggggctccattttatgatttttcccaggattatcccaattgcgtgttttctcaatacttatggtactaccatgatatatatcaatagagaaagttttagttgtcaatttaagtcgaaagtgttagggcaacacttattggtttttctggaaatgtgacttagggccttcgattaccagcaactatttccactaaggttgaccagtacacctgaaatcaaaattgagataatactagtataatacacatacatatgtacatgtttaattttatgtttgccagatgtatgacatattcgttagaatgatagttggtgtatatatgattgtatcttgatatcgtgaatgtatgtgtttggcaattccaaaacgtatgaaccaatgctaccaacactagtacaccagattactgagtgcatgtggtattatggttgattatacttttgaaagcatgaactagtgctaccaacaccagtataccggagtacttagtgcatgtggtattatggctaattgtacttatagtatggattgaattgatgctaccaacactagtacgactagagtact

SEQ ID NO: 215111 - DNA, 582 bp, Cannabis indica
agggatccaaattcaagtcccaggcgttctaggcatattcactacgagtaaatctatccttggcatccttcagaatcttcttcagggcctccacctctgcattcttcttggtgtactcccccatggcctaattttgtttggcgatccggagctgagtcctttcctcatcgacagggatgggggttaagacgataccaggaggcaaagtatactcgtccacttcggacggaatccctgagtcagaactgggagcaagagtatccacgcgtctcggttttttgacagtctctgtctccaccatcttgcctttaagttgcggtccacgggacaaaggatcttgccttcttctccttcttcttcctcgtcaattaagatgacttggtcctgggggatgccagtagaagatctcccgggagtccccatcgggtcgcgtaactgaggcaagccgggctcaagaatgtaagtttaggcgagaacatccaagaggtcatccattggcttcgttgcttaaagaaataaacaaataaagatgttagaacattattaaaaaatcatgcacgcaagagtaatgtaatgaaacta

SEQ ID NO: 215112 - DNA, 697 bp, Cannabis indica
cacaagagaatatgtctcttcatgatcaatacatggtctttgaggaaaatcttgtgctacaagtcttgctttgtatctcataactttatttttttcatttcttttacgtacaaatacccatttgtatctaacgggttttataccttcaggtgtttggactataggtccaaatactttacgtttagcaagtaaattcaattctgcttgaatttcttattttccatttggaccaatcttttctattttgacattctcagacagatttaggttcaagattctcattttcatttataatttctagtgctatattataagcaaaaatattgtcgataattacttcaagtaggtcccattcttttcatgtattgacataatttattgagatctcattatttctattatttttaggtacctaaatctcttcaagatatttgttcatgtcaacatcttccttgaaatttttagcctcttcactaggaccatagagattatttgctcctttcttttttcgaggtgttgtatctttggaaccaactggtctaccacgtttcaagcgtgctttagactcattttcaatttttccttctggaacttcaattcaagcatgaacatttttagctggaatatgtaattttgtaattttctttgggtcagtgaatccatctggtaaatgattgcaatattttacaaataaatt

SEQ ID NO: 215113 - DNA, 1297 bp, Cannabis indica
gcttcactcacatatccactggcaaggtgtattttatttgttcatacacaagttaaattaactttacccaaatttattaaaaaaaaaaaaaaactttaattgaaattatgttactttattacaaatatatatgttattttattagaatgtttacactagatatactaaaattttaatttatttatttttataagcatttttttattatatatattttatactgtgtactatattaaattttcacagttattttatatttattttttagttgtttcactatttttttaattattttgttttattatttacaattgttttatatttttataaaaaattctgtgtgacagtaaaattattaacatttgtttaaaattcaatatttttataaaaacccctattttatatatagttgtacgtagatcactttgtttttttttttgaaagatatatatatatatatattgcaaccacaaagaaagagatacaaataaaagtatcggttacaatataattagataatctctggaactttgccattccaaagaacctcccactcaagccttatagcagctttaaccagattgtgagacattacattatgatccctcggcacttgaataacggctacagaggaaaaaaaaaaagagagacacgatagtatttgttcaaccacatcagataaagctgacttatccttccaacgatgcttcactctatgcacaagaagctgacaatcacttgcaatgcaatccaaagggaaccttacgaccatgcaccgacgaagagcccaaagcaaaacttttgcttcagcaaataagggggatagaataccatcaaaaggagaggacatagaagccacaatatcacccttatggttagtaaatactgctccaattccaaccttatgcttgtgatcattcaaggcaacatctacatataatttaaaataacctggtttggggattactggtatagaattgtcagggctgcaacctaaaaacactttaggaagagggtgagcatgaaaatcctgggcatcatcaaaatcttgcagcagacctgaaatatgtaaatcagcagaggaaaaagaaatcttgcttttgttaaaccggctgatcgatattacgacggttccaaatttcccaaataattctgaggaagaatctgagatcattcttagataagtctcgaaaacctcttaaaagaaactcacaaatatcacaattcctattaagcaaatataaacctttaaatctagagtctttccactctcttgaagctctggaacactctaata

SEQ ID NO: 215114 - DNA, 844 bp, Cannabis indica
ctcacttttttttttgagaaatttacaaaaatactagaatttgggttaacttttacaaaaatactatcacacggaaattttttaaaaaatactgtgtttttataaaacaccagtaaaacacatagcagaacagctcaaaacaaaagtaaaacactaataaaacaccagtaaaaacttaacacagtatactgcagtatgaaacttataaaaaatacagtaaaaaagttaaaaataccgcctgacagtatttttgtaaaaaaatggcaaaagttagtataccatgtaaatttcttttttttttacttttcatttctatcatttttttttatctaaatatgaatatactcaaagggattagttataaattggatttatttatgagaatgttgacccaatcatcgaatgaaacgacatgtcgtataaatatatgtaatgtatgaaatctacataatagtatatgatatgtacacatttatatatgagtttaataagttacatgtctttttcaaactaagttagaagtgtaaaaatgaaaaaaaaactccttattttattagttagtctcttttatttttcaaaaattaactcaaatttaaatattatcacttatctcattttaaattaggggtgttcatgtgatctaatccgtactattttactcatagagattcactaagaggttgtaattaacactcctcgtatatataattatatatttaaaaaaaaaaggttagtaaaatttttaaaaacacaaaaaaatagtgtttttttatatgaatcattgtgtttcataagacgtttaatgtgccaaatttgtttacttgtatacatgtgtaatcacatg

SEQ ID NO: 215115 - DNA, 1029 bp, Cannabis indica
aaataaaactaaaacatataattcccaaacccacccacccaattttctttctctttcttcttcttcttcaaaccatagctttcttcttctgctacaatttttctttaacaagaaccacgtacatctatggtctgcattctaaccaccataaaattctcccaaccacaatgaaccttccaagctacatcaattttcctcgctcaaaatgactacgcatgcttcgctctcgatctccaaggccacagcagttccgacatttttatagccttcatctcctccttgatctagtcgtggaagattgccactaatttttcaatctcataaaagcatacacgtacaattttatatctattagaaaacatataaatatatattgattatgtataaagtatatgtacatgtatttataaatatatatatacttaaaatcgattgatgagatcactacagggagtgactttgtaacgatttaacttgagctctctcttcaggagtgcctgctttttcatcaaactcaaatctgtgccttcccaaaaactatttgtactatacaaataaggatcttcaacacctccacttctaaatttaattttccacattattattagaaaacatcaaaatcaaaaacctcaattttataaattagggtttcgaaaaatccctaatttttctgcagagaatccatgcgaggagtaatttgtctcttaatccacctccccaattcaaagggcttcgatggtgctgctttggtcgcacccatgtgtagaatttgcgagaaattgaaacctagatgaccgattcctcaaacattaactcactttgctaaaaaaaagtccaaccctaactgtagtaccgactgaggatcgatgcccaaatcagttaggattgaggagaagaaattactggttgatcaaaatcggatgaggtatagagaaaagcctaggcttgggactgtgtgtggagcttttgagagtgattgagtatttaagtgagaaattgaaggatgtgaaggtgctcggtggtagctac

SEQ ID NO: 215116 - DNA, 568 bp, Cannabis indica
atttattaaacaatctgctaacattgtagctcactttttagcgagatctacttattttattttcttatcctattatcgtattattctcgagcgagcgatactctcgtgcgggactatttgattgcttataaagtttacttgtttttcttaaaaaaataaaataaaataaatactaatgtttgttaaaaaataaaaaaaaaaaaagaaatattactctattcttcgagaaactgctagagcgtgtctactttataacataaaatatcgaattttcgatactacactgcaagattggatttcaaaatcaatgttttgtaatttcagatttgtaaaccctaaacctctaattttattcaaattcgaccatgtttggtgtggttttccccaatcgaagcttcccgatggacatctccgccttctcccaaatcgacactttccactggattctcgacatgaataccttcgtcggcgaggcctacgatcaggtccgcgagctctgcattttcctactcaatgacttcactctccctcccgacaaagctctcgctgtctacatccaatctccggg

SEQ ID NO: 215117 - DNA, 1218 bp, Cannabis indica
tttcagttgtttgaattgaattaggttaatggatgtgaaacaagggtttaataaggaagggaagacagttctgtatttggtttttgagtatatggacactgatctgaagaaattcattcgttcttttcgtcaaactacagacaaagtccctctcgatattgtcaaagtataatcattttcctatggtcttgatgtattttgtggtttcattcattattcagtagaaaaaaattgaaatgaacttgtcttttgcagactctgatgttccagctttgcaaaggtgtagccttttgccatggtcatgggatcttacacaggtcaaaatccatctctttcgttattctcttttcaaaacgtgagtgtactcacatttgcctttgcagggatcttaagcctcacaatctcctcatggatcggaagacaatgatgcttaaaattgcagatcttggattagctcgagccttcactgttccacttaagaagtatactcatgaggtatattacttactattaaacttcttattagacatttatatgtatgatatgaaatatatatgatcatgtataaaatatagaattaatcaaacatatatgcactatgaataaagaatcgaaatacgttaatcgggcttccaaggtctctctactctctttaaatggatttattgtgtttgaatattggtctcggaaatcaagaccttatatttattaagtgacaccttctaccaaaatctaatatccaattatttttatgcaaattcaatgaattacactcatttatcttaaattaatttcatatctattcttaaaatagaaattattgtaatactactcactagttctattcattagttatgttgttgataaaaaaagacttttgaattgttgctgcagatattgactctgtggtacagagctcctgaagtccttctgggggctactcattactcaactggagtagatatgtggtctgttggttgcatatttggttaggaatctaatctcttctgttcccttctctccacattttgtgtctttaaactcatctctcctttatgtacattgtagctgagctagtcaccacaaaagcactcttcccaggagattcagagcttcagcaactcctacacatattcaggttcgttgtattctctcttctctttgagtcttggcttttctttacacttgcttgtcttttgatttgatttttatacaggt

SEQ ID NO: 215118 - DNA, 641 bp, Cannabis indica
gctactctgtcattgaaaattactggtctcattgtagaccccatctgtaatatatgatcaaatgaattagaaaagttaattgaattaaagatgataatgatgatttgaaaggtgattatgtcactgacctgtgtgacaagagcatatagaggcaaagtcacataactgcatagaacttgtatgagaatcctagtaagaaagaaaaagagaagacaagttttgtgtattagtaattaattataaaactttgaacatgtatgatatgatgaattcatgtagtaataagcatatattataatttctcaatctcatacaactcaccccattgaaattcttatgatgatatcttcaattttttcgtggaagcaagtgttcaaggtaaattcatactgaaagaaagaaaagattaatcagcacatagaaattgactgaccatgtaataattttattgccttgaaaccaaaaatcaaggaaagtcaaatgaagaatcacttactgtactccatgcaaaaaaggcaagttgaaatgcattctgcaaatgaataagatgcaacagaaacagccagcattaattagtaccaagcagaaaagatatcattttgtttgttaacatatatatattagtgcaaatagttttaaga

SEQ ID NO: 215119 - DNA, 700 bp, Cannabis indica
gtgtttttcaacttgaacttaacaacagtgtaatcatctcaaaatttattgaaaattttggttgacaaagcatggaaccaacttttttttgaataaaacggtgatgacatgcacacatttgctaggttcacccaagacctcatgtctcgctttgcaccgttaatggtcttgtgcacattctattcgttgacctttttgagaaaatatactccctatttctcatttaggagaaatggctataacagagtttctgttattcgtattagcaactactctaggaggaagtttttatgcggtgctaacgatttaataactatatctgtagctccagaatgtgtcagtttatgctcctgcctattatctggatatactaagaaagatgtaggtctaatgaggctagacccttaggtcaatataggtagaattcttacagtatttgttataaaaatacttgtttttcaaaaactgaattctgttaaagacttttaagagtctaaccctcaaattagtactaacctatttgtccttttgcttaaaacctttagctactaacctagctttaaaggttcacatatcagtgtgatatttcttcctaaatatccacttacactcaattgttttgcatctttgtggaagatctacacagggccagtcttgagaatatatggtcctaagatgaattagattttggggccctcaa

SEQ ID NO: 215120 - DNA, 538 bp, Cannabis indica
agtgttgcataatacaaatcatggacacactcttaatccgatcttcaaactagtttgccaaagcagactacctagcaaccctcaatatgctccataactctcaaagaaaagagcatgaaaagtatagatgatcatgggattcaagatcccattcacacacaaggcagaagggagagtcaatcttgacttgttttgcaatcggggctgccctaaggaatttcggggccttgggcgaaaagttaaaattggacctttttataaaatcataattccaaactgagcaagaatttaaaaaacatgttgtttacaccaagaatagcctaatgatgtggacatcaatgtttgacacatggcaagaaagatgacatcttgaagttgagtagtcccgaattataacaagtcgacctgggaggggtccctaactctgcgcccaagttgacttcgggaactccaaaatggaagttcagacttcaataacttcaatcactactacaaaacaagtctttagagttatttttttttctagcataataataaa

SEQ ID NO: 215121 - DNA, 693 bp, Cannabis indica
aatgatgaattacagtccctttttatagtaacaatgaattacaaacaaggacagtaacaactaattagtcagcaactaactaacaaagactaaccaattagagcatgacacctaggctaactagctacctataataactaccatgacattagataggcaaaccagaaaatgacaattctccaccttgactactaatgtcgataaaagcaggtagtcattctaaaggtgagatagacagcatgttcaagcaatgcttgaacttatcacatggaagagctttagtaagcatgtctgctggattgtcagcagatggaactttgagaagcttcaccttcccttcattgatagtatctctaatgaaatgaagtctcacatcaatgtgctttgtcctctcatggaagacttgatttctgcttaggtgaagggcactttgactatcacagaatataggaattgatctttgatcactgccaagctccatagtgattccctttagccaaagagcctcctttactgcttcagtgcaagcaatatactcagcctctgttgttgacaatgcaacaacagattggagatttgccttccagcttatagtacagcctctcatttgaaaaatgtatccagtttgagatcttctcgaatcaatatctccagcatagtctgagtcgaaaaatcccattacatcagagttat

SEQ ID NO: 215122 - DNA, 506 bp, Cannabis indica
aaaataataacacaatattgttacatattagttacaagttattatgtaaaatggcattattttaataagttttgtaaaatgacctctttagaattcagataagagtatttgggtggccattttacaaataatatcaaaacaaaccaaattatttgagtcacaacaagtttttttttgtgactaaatgtgatttttaatcacaacaaacagttacctatgattaaaacataatgtttagttacttgttgtcactaatttaattttagtcacaacaagtattgttactaaaaacacatttagtcacaacataagaataatgatttataattagtcacgactttttcactttaagttataaattacgttgtaactaaaagtaaaaatctttgtagtgtaaatttatatatatttacctcggagaccatgtcattgaaaactcttcccattatttccatcttatgtttaggatcattactcataacacttcccatcatggttagtaccat

SEQ ID NO: 215123 - DNA, 555 bp, Cannabis indica
gctggggtcaattttcatgccttaggattgtcgttttctcctctagtttactttaatcttcgttaattttgatgacgaaaaaaattcatgatcacttttttaggaaactgattggagacaacctaggtttacaatatgtcaacctgggtgctgggcccagtgttagttgtcaacctgggcgctgggtctagttcttggcccttagacaattttgtttatttctcaaaaatagttcaatcttaatctttgatgaaaacagagaatagccctaaagactttttgaagaaactcctcgaaattagctcagttgaaaaatgtcaacctggggttgggctaattccaagtgtcaacttgggcgctggtcccttattttggtccctaagtttgtctgtttcttccatgaaagaacttgtttccccatttttgatgaagacaaagaagatgcatgagtcatatttctagtttgatgcttggaagtggcccaagttgacaaattgtcaacctgggtgctcggtgcccgagcatcgggtattccaagtgctcaaaaatgaaagt

SEQ ID NO: 215124 - DNA, 918 bp, Cannabis indica
tatttatttgacaaagaatatgggcctctacgtatttagtccaataacagataaatgtagtgaagcccatatctcaggcctcctaattttgggcttaaaacaaaaacaatattatctagggataattaagtaaagatttgtaaaaatttcacatgtcacatttttacggtggtgcagtataaaaaggacacaaaaataataaaaataatctcaaaacaacaaaaaaaaaaaaaaaaagaaattaactaaattacaacataaaaatatattcataaatatatataaaatttcgtataataatatttttttgtaattttttcagtttattttatagtatgtgtgaaataatccctattatattatctatatcaaacaaatatgtatacacaataaacagaagggaaattgatcattcactaatgtctttagaaattttaagcaaaactaaactatgcatgcattgtttcatatacatacattgacaatcaaaacatatacatatatatagttataaaaatgatgatgatgatcaaaactcagaggcagcaatgttgatagaagaaagagaaagaacataccttgttgtgtttgagttctttggattttgcatgaacaagttagttataggatcaaaactgataatagaaaaatgtgaagaaagagaagaagagaagaaacaacaagtttcatttgaagttgtgaaaatatcaaacaacaagaacaagaacaagaaacctttttctttttattacaacccaatcccatcttcacttctctcatcactcttttgctttggcaggcatgatattgattcctcttttatttttctagtactactacttcttcttcttcacacttaaaaagacagagagaaagattacaaattcaaagcccccaaaaacgtaaatcccattccac

SEQ ID NO: 215125 - DNA, 738 bp, Cannabis indica
tttttgaagcacttcaaactatgagtccagacaaaagtccaagaagtgttggcatgtctgccatgttttatcaaacttattggcacattgttggtccaacagtgacaaatgtggttcttagaattcttaatgatggtcatgatatgacattgctcaataagtcaattataatgctcatccctaaggtcaaaacaccaactggtatgggtgactatcgtccaatgtgtgcaacgtcatttacaaactcatattaaaagtggttgttctcaaattcaaagaagttctaacagtttaatttctctcaaatcatctcatcacagataacattctggtagcatttgagcttgtccaccatttaaggcacaaaacacagggtaagaatggttactcagatctcaaattagacatgagcaaggcttttgataaagttgaatggacatatcttgaagttgtgatgctaaagatggagtttgacagttgttgggtctctttgatcatgaaatgcttctcctctactagtttctcattctctctcaatgggaaagtgtaggtactgtacaacctcatagaggcttgcgccaaggttgaccgttatctccattattttttttttttatttttttgttgatttgctttgtaaggcctttctaagattgttacaatatgaagaagcggtctggtaaacttgaggtgctccgtctaacatgccactctcttcagtctcactacctctttttg

SEQ ID NO: 215126 - DNA, 875 bp, Cannabis indica
cgaccactcaaatgagccactgatgacacatactacattgcgattgtatatccttgaaaattaactttctgatcaatatcactctacaaccaattttaatacaaacattataatcttttatgtaacttataattaattgttacacatttataaattaattgaaaataatataaaacagtactcaagcgccaccaaaatttaatgcatgctgtttaataagtacatgcaaatgacaatataatttttcatttcctctttaatttatttaaggaataatttttcagaaattaattgatccacttgccttttatctgaacatcattcacaacttttctaaagattcctggaacaatatttgctagcctgactacttcattgataacctgtacaaatgaataacccataaatacccagaatcactggatgggtgtgctttaaataaattaaatattcataataaaaaaactaattaactcaccatatgtgtaaaagtcatcgctttgtattcttcccacgtgagctcagagttttcatgaaaatcagtactgccacgactttttattattgtctcgtactctttctgcaattttttttttaaatattatatatatgcatgttataatttactaacacacgtcactaactatatatatgacaaaaagctagaaagaaatagttctagtcctaggagctagggagagagctaaacaaaacgaataacaaccagtgtagtactaaaagttatgaataagaacatcacaaattacaacagttgtgaggagaaaagagacaaaatctttcatggtatagtcggaaagtgatcatattttcaaaactcgatcaataacttaactaccaaaaaaaagatcacacat

SEQ ID NO: 215127 - DNA, 645 bp, Cannabis indica
ctaagctggttgagaggtgtaccaatgaaagtgttgaagagagacctaacatggtggatgttgcaaaagatcatattttgatcaaaaccaacaacaccctttgatttgattaataccctaacaatattgttttccttgtttatgattgttatgttgagttttttatgagatgagattcaccagatattattccaacatgtaaacaatgtagttatccactctattcttattctgtcgtttccttatctagttgttcgttttttcttttctttttgacaaaaaattatttatctggttttttttcttctataaaaacattgtactgcatacaaattactatagactatggctctttgccaattaacttgttctatttctatatgtttttcatttgaaatacacttcaattatattttcaataatgatgatgtttgttctgggtaatttcttggaaggatcgtagaaacactttttattactttttttttctaattataaaaaaaatgtgtagtcatgtcaatatcatatatgactttgttgtgtgaaatgaaattgaaaatttttagcctttttcaatatctcactaaaaaaattatatctttttttcttccctgtttttggcaagagggaaaggggtagcaataa

SEQ ID NO: 215128 - DNA, 876 bp, Cannabis indica
taaaaatggcctgctgtttctacaacaaaaaatgttcaaaatcccaaaacttaaccaattgagcaccaaacttttccaaactttctagagtacctaattaagctatattaagcataaacaagctgaaaaatccaacaataagctactaaaaaaacaccattatagagcaaagtttgagcttaaaagctcaaactttgtctaggctcaataacaaacatctattccagcttaaaattactgaaacaatcataaaataacttcagaatcaaaccataaccacttgaagcttatacaaaaaccaatttctcaaaattgcatgaaaaacctaactttttctttcaaaaattcaaaggaaaggtacaagagagcttacctcatagctcacttgaattacaaccactaaattccttaggttttggtctgaattagaaagaaaatcccttggttttcttggttcttcttgggccaacaaaaagagcaagagggagagagagagacttaggtttctaagttaacaatttcttgactaaatgaataattaaataagtattcttatttttattcagcttaatatcgaaaagataagcttaggatttactaaaaaaatactatcttataaaagacaaacttaagtaaaattattaaccccttcatcatgaagtatcttaaagcttaggggtattttagtccaaactcataatcctggatactcctgacattccaaatatctatctataatgccccactaaaactaagatactatactatatctaaatgactctataggccagccgtcacattccactattatcggacataaaaatatgaaaaaacataaaaatttatatataaatataaattaacacacctagaatt

SEQ ID NO: 215129 - DNA, 711 bp, Cannabis indica
aggtaatatagtaatataggtatatatatacaagtaagtaatattatatattattaatattggggactagcttggagcaattaaatttggccatttaagtaagttaacaagtacacatttgattgttttttgaaaaaatatataaaaatgtttcatgtatatatattttgaaagggaatgtttcataaatttgatatatatatatatatatatttatatattttattatcctatactaactagacaatcatctctcctaatgacctaattgtgtggtatgtcaccgactttttttttttatccttaactatattaattaattataggtatatataactttaagtagagaggttttcttttcacttttttttttcttcttttctttcttatcaatacattttaatatattacattctttttaatcaaatgaacacttattggtcagaattctttctcctaagattgtgggagatcttattatagttgagctaatgtattagttaaagatttctaccatttaattccaactcattggcttataaatctttacataaatatagaggtgtacaacattatccatataaacaacaaaaggtaatataaagctatatatatgtgtgtaattgtctattgatgattattaatattattataattaagtaaattaaattttgagtttttgttaacaaagttcaaaaaaaaaagaaaaaa

SEQ ID NO: 215130 - DNA, 520 bp, Cannabis indica
aatattgtacaaattattttgaacttaggaaataataatttaaatattcatactacaaaaattcactataaaatatagtcataaataaatagtaaactaatttttaatttctaagtctaaaattaataattttctaagatttaatcttaatttgtgtaaaaaaataaatattttaactattaatttgaattgattttttaattaaataagtaattatactaaattaaagtctaaaattaataattttttaagatttaatctttgtgtaaaaaagtaaatattttaactattaatttgaattaattttttaattaaataattaaataagtaattatactaaattaatttaataataattaatacgtgatatataaatatattaatttaattagttatatataaaaaaaatgtttaaactaacttatttataaaataactcattttttttgttttgcatgttgtgagatatttttatttttgtcaattaaaaaaaataaagaagttagataaatacatttat

SEQ ID NO: 215131 - DNA, 666 bp, Cannabis indica
tcaatgatagtaatattactagtatttataaaatgttttttaatgacacataaaattaaaaggtatattaaattttgtttgagttaaaagtttaatttattttattataaaaaagaaactaaaaaattatatttactatttttttatagaaacctatctaaatggttcaataaattattaaaaaaaaaaactttttagtaactcttaggcatggcaaaaagatccattcattcggatcagatcagtgatccgatccgacggatgattactgatccgaaacattcggatagttattggatcttggatcagatccgacccgccccgcttaatttttttacggatcggatctgacccgatccgttttaaatatatattttaaattttttttttttttacttttttaattatatttttttaaggttgtaaggccagtggaataccaccattagacatatatgatctgcccatagaccacactatatattattattttaattaattactctctcatttaattcttatatatatacgtacatatatatatatatataaaaataaaaatatatatgcatacagaccactctatattttaattatttgattataataattattattatttccaaaattccctaccttcttcgaaaatcttaaatataaggttat

SEQ ID NO: 215132 - DNA, 527 bp, Cannabis indica
ccatggaagaaagaattttcgtgtgacatgtatgcactacaaaaaacagttacttttagtgataatcttttagtcacaacataaattacatgtaaaatagtgtcttatgtagttatccctaataaggataattacatgaaataccattttttgtaaaaaaaaaaaattatatttttatttttaaagatatttttttttatatttttttatagtttttttttatagaaacaacatgaaaacaacaagaaaatttcataaaaataacaggaaaataacattcaaacaacataaaaataattacaaaaaataacatacatataacaaaaaataaaaaataaattaacaagaatacaagaccgtattttctgtaaataaaatcataaaaattgtaaaaatatttaaaaattctgtacaactgtatttttgtattttctatatttttgcttaaagtataatatacatacacaatgtgcggttttttttttcttcttttttactttgtaataaggtatttatttcattttgat

SEQ ID NO: 215133 - DNA, 751 bp, Cannabis indica
attaattacctgaaattataacgtggtagtttagacatgttaggttagtttaccccattacattaaggaccaaaataagtagacttttgacttttgaggttaaaattacttatatgagtcaaggccggtcctgaaatttagtggactatagggaaaaaattatttttgggcccttatttagaaaaaaaatagtatttctcaaaatcagcaaaaaaaaattgtgtaattttaaaagaggaaaatttttttttgggtccctggacaaagtgggccctaggaggcacgggcctagcccgcctatgcccaggaccagccctgatatgagtaagtgtacacaacatatataccaaaccaatagaggcaaatacaattttccactctatattttgtaaaaattacctattgaactatatgttttgttaaatgataaattagaccatgtattttttaaaattaggtaattttcaaagttaataacataccaatctagaattgttatgataaaattgaatacattttctgcatatgttcgtgttagaagttgattatattacaaaaattattaaaaattgagttcagttactattttgtactattttagaaaatacagagttcaatttatcgttttacaaaatagaatctaatcgataacttttgcaaaacacaagtctaaaataatttaacccaataataaataataatatagcattttaaacttttaatacagatttagtatgaagttaatattttt

SEQ ID NO: 215134 - DNA, 633 bp, Cannabis indica
attactattactattatcattataaataaaatccaagtagtagtggcactgtggcatattgttctttattttcataaataattaaaatgaatcaaaaatatatacatatcttgttttgagtttttggattttttaaatagtttcatatagcttgtacatttataccggttttttttttttttttttgaaatactttataccggttattaatatactataatgtgatactattaagaacttgttatatctaaataaaattatatttatttatatgttagttaggacaattgactaaataaaaactaaattataattaatattagtagtacagtagttagcttaattataactatttgtttcccttcatttataactcttataatgaaattaatagtcttactttaatattgatctgtctttttggttttctaatttattattttcttcatgttgtatgagaacttcttttaaacctaaacttttatagtaatttaaaaaattagtcgtaaaactatgaaataatggagtagagaaacctaaaatgcttatatatataacattttcttctaaatattcttgacatatgaattttattatagcataatctattatcatttggttttagtttttcta

SEQ ID NO: 215135 - DNA, 536 bp, Cannabis indica
tttttttttaatgataagacaattacatttttggtccttataatttatttttattaataataaattaaaatttaagatttttcatggctgtctgaactgaacgatagtcttcgtagagaagactgagcaagtcttcgtcaatatttgtaattggtattagctgaaagtgatttaattaaaagatattttgtctttctgtacttctaaatctcagttaaaagttcatattgtttgatttttggcctgaaaaatgagttttattagttagttataaataaaaaaaaaataattaattatattgtatttttttaagaattaattcaagctatttaattaaattaatggccaattcattaaaactctatttaattaaattattttaaattttttaaaaactattaagatgcatcttcttttttcctcatattattgtttcctcatgataagaccaatttttcagtcctcataaatttttattattaataataaaataaaatataagacttttcaaagatgtgacatatacatatagtgat

SEQ ID NO: 215136 - DNA, 525 bp, Cannabis indica
ctaagtacctccccatagtatgtgagttgctgcagaagtttaagaaagtagttgtctcccgagtaccgcgtgctcaaaactcacacgcagacgctttggcccgcttggcctcaactagaaaagctgaactacgcgatgtgattcctgttgatgtgttgactcaccagacggtgagtcgagatgaagtgatggaaatagacattgccagagaagttacttggatgactccaatagtcacttacttggcaaaggatatcttgcccgatgataagacaaaagcgagaaaactgcgacatcgagctgcctgatatgtcatctatgatggaagattatattgcagaagcttcactcagtcgcttctcaaatgcattgacggggaagaatgcgagtatatacttcgcgaggtacatgggggtatctgcgggaatcatactggtggtaattcccttgccttaaaaatcatgcggcaagggtattactggcctacactgcagcaagacgctttcagcttcgcaaagaaatgcg

SEQ ID NO: 215137 - DNA, 781 bp, Cannabis indica
tagagcatacataaaaggaaatacgtacggatgtttataaaataaccaatttaatccgcacgatccaattgaatccaatccgcattatccaattcaattaaatctgcacgatctaatataattcaatcgcaaagtgcggatatctgcacttgtggggattggattggatgaaaaatctaaaatccgtacttgtgcggattgaatgctgattgacatgtaaaagtaactgacccaatctaattcacatatatatatattttaaaaagtatatatacatttaatattttaatgtaaacaatagtaatttaaaaatctaacagatataaatatatttcaaaacataaaagatcaaatatatatttcatccttatttataaaaagaaaatataaattaaaacaaaatcaaacatctttatacagataattttttttttcactttgaatttgtttttttttattttattttaatttgttgttcgagatatagaacaataataatttgttttactttgttgttagttacgccaatttttttttaacaattattaaataatttaatattaaaaagcaactaatccaaaataactgatccaatccgtacttttgcggattggatttgagttactatgctaattgaattgaatccaaaatacgaaatctacacttagtgcggatcaaatgcactatgactaaaatagtacgaattggatcaaatgaacacccttaatacgaaggctagatgggtcaccacataaagcatttataatcgagttgaatgtac

SEQ ID NO: 215138 - DNA, 696 bp, Cannabis indica
tttattgataattgaataatctgaaaatttatttaaatgcggtatgggaagaatggcaaatttatccttgaatgcatgcttatgtgatatgttggccataggggcattttagtcttttgaccatttgtttaattttcaataaagtggaattttggcaaaaagaaaaattcatttttctggttttattgtacacagctgacccccccccccccctctctctctctccatttatcatctcttcaactttttgatttttttgaaaaattaccttgactcaagcttggaatttggtggttttggtgcttaaatttgagaggagcttgaggtagtctttctaccactttaatcttgggtttttgttgctgaatttgaagttgaagaaacatgcttttatgtgctagtattcttgaaatgcatgtatgtgaattgaattgaatttgtgatgttctagctgaactttcttgctaattaggaaccctagttaatactatgattgttggaaagcttagattgagatttggatgtgtgaatttgagtttatgcttgatatttccttgctgaaaagttgtatgaaactttggaggtgatgcttaattatgtggagttgtattttggtgattttaagctctagacttttgatgttgttaactcttcttgagttgttgtgatattgcatacttgaatgttgtttaagct

SEQ ID NO: 215139 - DNA, 911 bp, Cannabis indica
ttcacgacaaatagcaaaggatctaaaaaaattacctaaaaccttgaaaataagtcacaatacaggtctaatacccctaaacaaaagaagaaaaattcatcactattcaaagaaacagacactggagaggtcctactccgtaagacaagcaatttttgggattcacaagatccatacatggaccaagaaatcaatgaggatccctatctctttcagtataatggattggaatggaagattatttattctgaatatgatgcgtgtccaccagctgagagtgttgaagatgatgaaccatcaagttggcactcacttcaggaggaccccaattatgactcatacaacgagccaattgtcgactgctaataagtagaacaaagagattgcatatctcttacctgtgtaagatagcaataaatagaaaaattcttgatattcatgatatttgtaggaattttttcttattgtttgtttgtcagtttgttgctttctatgtttatctgtttgtccatttattgtcaggttgtctttttctctgtttgtcattttgttagtttgtccatttattgtcagtttgtccttttgtatgtttgtttatttgtaggaaaatttttaggaagtttcctattttgtatcttaccccatgtaaatggctatttatagacccatccttttcattataagaagcatcaaaaaagcagtctactaaataaaatttctagtgttcttctctcaaaatatttttctaaaattttctttaagagatttctgaaatagtgatagtgtgcattatgggtcataccgaaagatattactattatgagttaggtatcactcaagtataaaggtaacgtaagtaatctatcattcataatcgtaagtctagcctacagagctgtaagtcgtataga

SEQ ID NO: 215140 - DNA, 693 bp, Cannabis indica
tccttattattagggatatttctaaatatagagtacaacttcagaatttatataataataattcactcttaaatttgccgtcccttttcccatagaatttgtccctatttataggagtataggttggcagttattcttattgtgattaatttaaatgtaactgttcatgaaacatggacaattcccacgtttcatttaaatcacatgtgaggtaatactaaataactacccaaccgttctttagttttatcctttagatggttattgctgacgtggaaggttacatcttctctgatttgagttatcgtccatgtccatcttgataagaaaatacgctaagtgttatgaatgtttctgtctcactatatttgtaatgtgaggtgatcttctcgctgtttaaaatgcgaggcatcttatgttgatacactcactttgctcagatggttgaatgttcctttttttgtcagtatatttcgaggcatgcatatgtctcgttaatctaagattaatagttatttattcttgtctcgctattgactataaagccaaatgagttttgaatattatctatttaacctttaattaataaacgagttatttaatatgcatttaacggtattgttatatcattcaaaattgtttcgtattccttctattggacacaggtcaacctctgaagtgtagctaaatttc

SEQ ID NO: 215141 - DNA, 1583 bp, Cannabis indica
tttctgtttcaactccttttctaattttgaatgtggattatgaagttgggatatctgaacagattggggattctgataacactaaaatcagaagtagtgctgctaggaaattagggaatgttagaattgatgatgatgatgatatagaagtagaggtatcatacttgaactctgctatggtcttttgtgtctttcgtttatgatttatttatacatgaatagttagttagatgttcaaaatagtacaaattaaatttattgtcctgtaatccaaatagtctttatatatatgtatatttctattgctaataagatgaaacttgtaactgtttatatagtattttcgtatactatgattactttattgataatttatgctgacttcttagctgaagatcacaatattataacaactctagctctgtagtttgtaaattatctctgaaaattgttatgtttacagtgcaagaaaattgtttgataaaatgtctaacagggatattcttttgaaaggtaatacaactagttcattttccctattgaatagtagctcatttctttcaatcattgaattaatattatactgcacacttagaacagttttattggtctttctatactctgttttagtgagtgctaactttgactagacacagtgacaataaaagttcaaaaggtcactgaattttgtatctaataggtatattatattagatgatgatgaagatgagcactacggatgacgatgatgaatctcagttgaattgcacttgtctgatgacgccaataaggcctccggccactactccgtctaacgtcatcatttcatctcctcaccaccacgctactatactactgtctctgctccatctgcccccctcaatcaaatccaaggtaaatgaaatataatgcactaaaatcttaattttgtttacatgtgcataaaataaaaatatagctaaattaattaattttatataaaaaatttaacacgggagaggtgcaaatttactgcagtaatcgaatttacaaatattgatttttgttaggtcgactgtttcatattgatctttgtattgggtacatatgtttagaataataaatatttagaatataatttatttatttatgagaacaggtattgtaggagaagatgaacagggagtggtggtggtgggtccagggtggaggtattgatatcatctaataacaggtatattactctgtttggcaatgtgcaatgtatttatatttacacacgctgatatggtaactacaatgctaattcattcctgctattggttagatgattggcctttgagaattggttatattgcttttctttttgcagcaatagagagttggttaagtggtgaaactatttattactcacattttgaaattttcttactaggcatcaattgtggagaggataatgaagaatttacggttcaaaatcactaagttgaggcaatctttggaagaatctaggtatatcctttctagaatgtgactgaaaagaaaaaactaagaacacttctatctgttcaaataattccctccttacaactagctgacagcag

SEQ ID NO: 215142 - DNA, 1119 bp, Cannabis indica
gttgtaggaagtttaatgcatgagatttttacgtagttggggcatgaatgagccttagtccacgagtcttttgtatttatgagagtatttattacagataatgttcttggtagtttttctctctttggtttttttgaaatccagaattctcgacccccgtcttaatgtgtttggggggtatttatagtgtttttctggggtgatccccagaaccgtacttctagactttatgtgtattttcagtaggggcacacattcctagcagatataaaatgggaaatacatggcctataccctaggtaccttaggggttaggtggatataatcatttatcccttcttgattgatgtgatccctcataaagtaaccgtcactagccttattaatcatagcgtaatagctgcagaagaggggttatgccatcagacttaatgcttatggcagtttcaatacgccttctgccatgcgacattaaatgcgagatgactgttcaaatggggtctggtacctcccggaggtgctttgctatagccctgtcttccgggagtacgtggacgcctcatagcttctccgggaggtatcttccggctaatactcttgatccacaaagacttagtcaaattatctcaaaaccatttttctcaagtcctcgtgtcacggtcgtattggtccacgtattttgtgcaaaattaagggaaacactcccatatactcgattactctattaaaataaattatatagcaaacataaatatataatcataattgtattcgcaatcatatgcatgaatatctctaataaaaaataattatataataaatataaaagactataaaatacctaacatacataaattggatgaaaaaaaaaacttacagttgagaattgagatagtgaattcaatcaaagcaagacttggttttaattaaatcatagatttcttcttctgaaaagtggaagtaattatcaatggtttcaaacttacaaaaaaaaaatagaattaggaaatatgagatatttaaaaaggtataagagaataggaaaaagtataattttagtaaataatctggttcaaatttaacatagtatattttaatatattttttttaaaatatgta

SEQ ID NO: 215143 - DNA, 848 bp, Cannabis indica
cagcttcgtctggactttgtttaggcttcaagaagtgagtaagttttcaatcttctcttcttttaactttgcatgtttaatttttgggtttccattgtagaaaatgcatttgttcctgacttgctttagaagattcatagaaaatctaggcttgaaactttgtaaattttccctgtaatagtccatatggcttcatagtttacgacatttgcctttaatctcacattgttcgtctttcaccttgctcattcgaagcctcgtgaaatttaacccataacccaaaaatttcaaacttctgggtttcgacttgatttttgtacattttttgtccttttaatctattgagcactcctggtcagcatatttgcctgtttattgttcgatatcccggccaaacactcatctcgtgtgttgtcttttttagatgaaccctggtgagttttggggaggcaaacaccgaattgaccaagacttgcttcaacttctgtacgaggatcaccctcatcttcgtgccagtccgtcatcttcgagtgatggacattctaactcgagctttgaagattgggaggtgagtagtgatcgttctcctactccagtacccgtagtgcaacaccattattaccccaagcaaatcccaggagagtggtacagccgcttcatttgggagtggaagaaaggttgggaggtcgttatccttcacaaccaacgggacatacttacgtttccggtcgtaggttgtttattccgtttaccccttccgttggttcgggtcccgtaccgtaacgggtttaccggggtttaacgtttcggactacctacccctaagttcgtcgttcggtccgtcgtcc

SEQ ID NO: 215144 - DNA, 1003 bp, Cannabis indica
ccaataatgtaacaatatgcatgtcaaattttaaaataacatttgcatgtgacacacatatagatgatgaaatagacactaattaaagcagtttaatatatagatacatataaataaatataattaatataacacagctcatgaacctattcataaagttagtagcgaattattcatacatacttaatatttatatttacatgtgtgttgaagaaagacgatgcagattatatattaggaaatatatatttttgaaaatatatatatatatatatttatatatatcttcttatctttactcattaaagcgaattaatcttattcactttacaccttacaaaaaaaaataataataataaataaaaataaaatcttattcactttacagagaatgcggtaggccgcaaattcattattttttatttttattttttttaaatatttttttttttatttcaatgtttgtttttttatcataaaatatatttttttatatataaatataattagtaatagaataccatcataaataaaaggaaatatttttttaggttttttttagagaggaaatattttatggtttgggttttaaaacaaactacttttaattagtttctttatcattattatacaagagaactggtgggaatgagactgaaatcaaacaaaagtgtgattcacgagcattattactgctatatttacaagtcaaatgaaataaattgtatttatgtttcttagtcttcacattaaatagaaaagatatatattatataatataataaatactgcacaactctagattatatcttagttttggtggacaaaaatgaagcccaaaattggagtactgtattctggtgctgtcttatcctacatagcgatatatcttggagcttatttcctttttttttttatcatttctgtcagaacgtctcaaaaattatagaaatatttaacttttttttttttttttttttttttttttttatttgaatagaac

SEQ ID NO: 215145 - DNA, 1063 bp, Cannabis indica
gggatgtactgatgcacccttgacttatttcagcatctggaagaagtttttttaatctaatgtttttcatattcatgtacgttatagctattaagataacctacaaaattttgagaaattcagaataatttacaatatagaaaataatgttcaaactgtctattttacacacgtataaaataaaatagtcacgcgtgcaacacactgtttgaacgtatttttcggcgtgttaaacttttccaaattttttaaaattttgcaggatgtcttaaataactataacgtacatgaccatgaaaaaaaatttgactaaaaaattattttgggtgctaaaagagataaaggtgtatcaatatatccattttaagaaggtgcattgtagaatttctctaaattttatatctcaaaacatcacttctctttctcttccatttcaagtagttttggggccatttttgataagcaatttagatggctaaccctattattgttgtccttgttgggttcttgttttacattgaagttcaagtacttcatccactacaaccacttttgataaatcaacctccttccctttccttgcttccataattttctttgtggacttgtagaataaaccataaagtgtcaactgggccagcccaagtattaagcccaacccacatgatatctgcagttccatgattcaatactatataagcaactgaaaaaaaaaattggtagtaattttttatttttttttaatttttttagtaaattttagcttttttcaaatatataatatatattatctaagaaaattaaaaaaatatatatataatgaaaaaaaaaaaagcttagggtaataactcgggtaaccagttacattatactttttttttttctatattttaattatttttcctgaaaattaattattcgaaacaaaaagctatatattttcacaaataatataaaaacccatcaaatgtgtaattttcacaaaaaaaaaaaatgatttttgatcttattttgaaaaatggagtaagttagaagttggttacaattattttgtctacaaaaa

SEQ ID NO: 215146 - DNA, 135 bp, Cannabis indica
tctttgtcctttagtggagttatattatgttttataatatgaagatatttattaaaataagttagataataccttagattaatacatttaaccaaaagtagaaaagttaaaattcaacgttatctctctctctct

SEQ ID NO: 215147 - DNA, 620 bp, Cannabis indica
tgagctaaatctttctccacattaaattacatttatagtggttctttaaaaaaaaatttaatattattttgacttttctaatcacatcatacacacattacccatatatataatattttattttcatatatataatattttattcataaatatattatttaaataaaatagagaagaaaaataaagaagttgttgtatgatgtaatagaaaaatttgaggtaaaataaaaaaagtaaagttttaatgatgtattttaaaggatagagtaaagatttggtgagttctctacttattatttatctcacttgttggtaacttggtagtgtaattttaccctattctttaaaatttaagctaggagttattttacctcttctattagtgctaaatcaagaatatatgtataatacctcactcttatattggagcatcacatcaatggagctaaatcaaggatatgtgtgtaatacctcacacttttagctaaaaatgtttaaaatacctcaaacttttacctcaccatatttcttagctaaatgcagctcaataaatagtgttgaactaaatttattttatacttattttatctctcttattcttttaattaaatttttattct

SEQ ID NO: 215148 - DNA, 690 bp, Cannabis indica
aaaaattataaataaaatctaattatatttttaaacaatgacaatttagttaaattttagcattctgattatatttattaattatataaataaaataaaataattctgtatgtttagcataataaaatattattttaattattttatattttaaactcatttattttttaattaattattcttattctaattacagtttaataattgaatatcgagtaattatttattacaccgataattatatctaggagtcattcccctcctatcatattaacactttggtcaccggaataataatagcaatagaatcaaattaaatttaaaatgcttacaaaaattaataaaaaattattaattattttttttttaaaataaaaattattttaccccttaaactgtcactagaaaaataatgccctttttacttatagggtgttaaatatactcattaaattttagataattataaacaattatagtattatattacattcggtcaattttcttaattatcttatcgatacagcataatattatataatattatctaatttagtttcttacctaagcaatctaaaaaaaaaaaattacaaattttattttgatttaatctttaatataatatatttgaacttttttactttggtaatcaaatttgtttccattttcaagtttttctagaaagtttag

SEQ ID NO: 215149 - DNA, 559 bp, Cannabis indica
agacttcgtcccccatatagatggtcttacatcgaacattttataccgtaaagatctagaaagataagtattttgtaagttttcgtctctattagactctcccatactttgactacctagagataaatttacaaagtatgaaataatagtggaagctcataagatagaatggccttgactctcgcctaaaccggacaacaattggatttttatcttgatcgaacaaaaggttgctagaatagtatccattttagatgatctgactactctattcaatgaatgatatctttgactctcgcctaaaatggacactatatcagtttgttagaaaccttagaaattatttaagatgtgtttgttttgtattttcacatgtctttattacgtgctaagtgtttaataatttctgaatgtgtatgaatttatactgaatcatgttgttttctgttattaattgttgtagtttaaattttgagtcttcattgttggtcaaacttaatttgttatttttaatgggacaaataccaaaagattgccatccactagacaaatataatag

SEQ ID NO: 215150 - DNA, 1544 bp, Cannabis indica
atttatttcttgtttaaaatcttctaaatgagttgccttcattctaactctctccctctcacctaatatattaacaataagcctaaatatagcaaatagaacttgacatatattcaaaagtgaccattactaccacttctactacctaacataagttaaatatattaaatgaaaccaaaccaaacaaaactcacatctctatttcgtttatgttgccttcactttatgaatctgaatttaatattatatctactctactaaagaccaattaatttagagaaattgttctgtgtaggcttatttaaatttgtggttttaaaaatgttagtatgaaatattagatatttaaggaattaagagaaaaaagttggctttcttcctcatgaatttcatatttatggtctatggtgtgaagagccaccttttggaaaagtgcgtttggatgatcttttttagcggacatggaacctgctgattatgaagaatgggaagtcgatgaagggttgtcggtggatttgaggagagtctgcttaattatgtggtcgcctatgttcgaatcgagatttcactcgaggttttctaaaaacggtgttaggtcaagtttggagattgagagtggttgaatgagaagctaagattacaaaaaagactctgatgaccctactcttgatttcactttcaagaatgaaattcaaatctctcatgttttggctaaaattccatgacatttgactaatgagttgctcatttttagcaaattgaagggtatcatgttagaaaaattaaatgacccaagatactaatttgtatataatttataacataataataataaataataattaagtatacataattgatcactgtatagcaattagcgcaatttgacagtgcaatactatcaattaagtcttcttccctagatctcaaaataagaagcagttttatttatctgattatacaaaatatataattgtaatgagacagtatgtatttatagagttagagagaaaacttagctacataactctagttggacttatatgctcatcaaaggtttcagttaactagaaaagcttatacttatgcttcaactaaactttacacacatgtagatgctaaatccattaactattgatcactaacaatatgatctaacacaacaaaaaactattcaatcaactcaagttttaataaaaccaataaaaattaatgtaagcccaaataaaaagtttaacattcttccacttgggctacattaattttaatacatatatattatatatcagaatagttttgtttgaaaacgactcatgtattgaacaacaaaaaaatatttgtggccactttaaaaataataattctttgatagcatctcaacgtatcggtttaatttaacttttgatattgaactatgacaatcatattgtttttaaatcaacaaaagacattcataatcacaaataccaaagtattaaatcgacatggtcaataagtctagtagtgtggtacgaaattatatttaacatgtgatcaatttaaaa

SEQ ID NO: 215151 - DNA, 1131 bp, Cannabis indica
aaactaccggagcaacccagaccgtaaaagtaaaaaaaagttaaaaaatagtatatggggtaatttttttaaaaatattaaataacttaataaaaatattaaactaattaaaaaaatattaagtttacttaaaaaaacctaaattattcctaaaaaaaagtattttcaaactttattttatttataaacacgtatcttaaaaaatcaaacaaaattattaaaaatccaataaataatttaaacaaactaagattttttttaaaaaaatcttagttatttatatttataaattcatatcttaaaagataaagaaaaataattaaaaattcaagaaaaatataaaattattttgaaaatagttagaaattaaacaaaaaaattaattatgtttgcttaaataaatttagatttttggagaaaaataaaatagaataaaatagactcaaacttttcccgtaaaatttagtttttacaaaaattaaatttttaatatattttttatatcaaaatgaaattttcttaaaaaaataattaattttttaaatttcttaattagtttaaattttttaattttcttaataattcaaaatagttttttctaagatctaaattaattttttaagatttattaaaaaaatattaactatttcgttttttttattttgagggggtacaatttgatagttgtcaaagtttagaggacaaaattgctaatttataaagacatgtcaacatttaaacgaaataatgagataggacctaacagaaggattaaatttctgcataatgtaaaagttcaggagcatatttaacaaaccgtttattttaaagggcataagtaaaattgtcgaaaattcaaagaacaaaattactaattattctttttgataagagagaagatgaaaaagctttttgaaaaagagaggtggagaaattgtaagaaaaaattatgaaattcaaattttaaacataaatgaaaaaactatgttaaaagtaaggatacaagctcaaaccaaaatcccctgttgctgctatttcttaaccagcaactttaaacgagcatgaacacgctgctcctgcctccattccatggtttccacctgttgcaggagcttttaagctcaatgttga

SEQ ID NO: 215152 - DNA, 889 bp, Cannabis indica
atttaaacgtttatatattacaaatttacctggactcgacctccaacacacacccacctatagccacttgagctagcctcaagtggtttgcgggacttacggtcaaggctcaatttcttcacaccagtttcgggccaacttcacccttattcaagctagatattacttcatcatgaggaaaccatgattttgtggcttccattttaatgtcgtgtttaagccagtggtttagtggagaaattgatagttgattagaactcatcgagatactgctgatacaaatacaattccaaaagagcatcagatttaggaactgtattcccgtatttaatggcgtttcgatgttccacacatgccaaaaaagaacaatgaataagtggaagtcctttgtcatattttcctctatcctggtctaaatatattgtcggattcattgatatcccttgtaagtttttacaattcatctggttttgcattttaataatagcactggggaagaagtgccataaagtggagaacattatccttagcacaagtattacatcgataacactcaaattattgtcattgcaaaactgagagttggtaacgttacataaaatcttttaattttttagggaactctggttttcacaaatgagagaagacgttttcatggcagcattgtacagggaatatgatcaaatcaacatatgctcctcatttaattacttcttgtttgtcaatatatctgtaaaaatagcatactacataattatataaaataattctatggtgaagttttggggatattcatctaataactttcttttaaaactttcatatcaaagaaaaaaaactttcttttaaaaccattgttgctaaataatttttttataaaattatttta

SEQ ID NO: 215153 - DNA, 1309 bp, Cannabis indica
tttttcactactttaagtacaatagttcaactttttcttttaaagaaaaaaatattaaaggtccaagctaaagacacaaattttgtttagattttttttcttctaaatttcacatggtaattttattgtaaataaaaagaatttttctctatcctaggttaataaaaaattgattaataagaaagtttagtataaaaatatctatatatgtgtaaatgtaatattaccaaccacccactaaataaaagcttgttaaagttatcataaccctatagcaaaagacaaaaagactccactaatgatagtgagggagtcacttagattccaataatcaaatccaaaaagataattaacataaaaccaataagatattatgagtgcaaatcatgtattaaaccatgtttattgaacatatccatttttaagtgcttttaaccaaaattccttcattgcacccattcttttttttttttggtctataacttatatatacttttgtttttttaagttaaattaaaacattctattctatttttgtaaagcaatataaatttttctttaaaattgtagtatgaattaattgaaagaattatattgttttatatttacaaatcaatacacaactatctttaaaccccaattttggtcaaaaataatttaaataaatataaggtatattatatagtttatttaaattgataaaatatgcaatttaagaaaaaatcaaagtcctaattatagttttatattgttttgtaaaatataaagagtatcttatctttattcattaaataaaaaagtataataaactagtttaaagtgtaatggaagcttgatttttagtttcatatatatatatatatggttaataccactttaaatcttgtgttttataaatgttactgattggaactctgttttgtaaaattataaaatagacactgtattttctaaaatagtacaaatacgaccctaagctcaattttcaacaacttttttttttaatataatcaacttgaagacaatttataacatgatcagatatagaaaatataacaaattttatcataacacatctatatcggtttataattaaattttatttacctaaaaaaaataaagagtactatttaatattattttagaaaatatatagttcaattattatttaataaaataaaaaatttaattgataatttttataaaatacaaaatctagaaatggtatttattttttaattaatagtacttatgtgtagttgtaatgaaagctagatgtcttaataatttttttttataaagtaatatg

SEQ ID NO: 215154 - DNA, 828 bp, Cannabis indica
ggttgagtaattaatgatgccattctttattggtgcaatattgtttctgtttctcatttagtcaacttgctaggtgataacaaagttctgctcagagcgtattgctaagtatgccttcgagtatgcctatctgaataacaggaaaactgtgacagctgtgcacaaagccaacattatgaaacttgcagatggtttatttttagaatcttgccgggaggttgccacaaaatatcccagcatcaagtacaacgagataatcgttgacaattgctgtatgcaacttgtttccaggcctgagcagttttgatgtcatgggatgtgaattttacaaaactatttttaattcaaatcttgcttcttgaagaagttttacgtgatcgtgatgaacttgactgttacttataggaagcctcaatgtagtaaaacagaattattattattgctgttgttgttatttgtataaaatgggagtttctgacagctctctctctcaaattgagatttggttattgcttccattttgttttctatcttcttgtgctcaattaatttaaattgactattttgtgttttgcaggtgactcctaacctttatggaaacctagtggctaatactgcagctggtatcgctggaggcactggtgtcatgccaggaggtacaaaccaagcatccaataagctcttaattctaatattatatgaaaagaaatgatatgttttccaaattatgtgtcatgcatttgaaaagttttagagctcaaaagcactaccataaaaactgcatatcacctaccatagcagccttttaattgatttgttttttttttt

SEQ ID NO: 215155 - DNA, 838 bp, Cannabis indica
cttacactgaggtatttattattgttattgttattaataataataataataatattggttaatacatgattttttattatacatatataatcagaataatattatatggttgttgttgcagtgtaaagtgaagccagagaggccactctacaatgggggtattcttaataaagagaagcctagggctgttggggaatatggaagtgatgatggtttctattcacctgcgttcatacttcgcaacctaactcaatccaccatttactgcttctccagttgagtcttccattccatctcttatttccacacatttctttcagttctcaaaaccctaaaataataataataaatcgtaaaaaaagaattccgttgccgggaacttgaacccgggtctctcgggtgagagccgagtatcctgaccaactagactacaacggattagtgatgtatgcttgttaaactaacattattctcaaacttttgtaattaattattttaaattttttacttattttattatgggctattaaattagagggattatttgttaattctatactaaaaattatacgaaactagaggaattatttgttaaattttctaaatatgggtatattagttgaaagttaaaaattaaaaatcaaaagggcaaatgttcttaagccaatagctcacttactttttttgtaaagaaaggggtagctgagctcacttagtgcacaatgcacaaggaagttatacataagaaaagactataacaatttttctcttgaactttgacatatatcaaaattatgtccccctgaacctttttcggccgttaaaaaattcccccatg

SEQ ID NO: 215156 - DNA, 564 bp, Cannabis indica
gctagtagaaccaaagtgaacaataacatgtgagagaaggggttgttattttagactttcaagctgccaaattgattgaagattatacagaagctgatgtcaagcatgctcttttctcaatcccagatgaaaaagctcctaaccctgatggttttcgtagtgccttctttaaagacacttgggatataatcgggaaggatgttttgaattcagttatctcttttctcaactctggtaagctgttgaaggaaattaacgctaccactattactcttgttcataagactgtgtgctttgagtcagttaatgattatagaccaattacttgatacaatatgatctataatgtggcgaaaaaaatgatttgcaacagattgagacaagtgctttatgagattatctctgaaaaccaaagtggatttatcaaaggaagacaaattgtgcacgacatcatggtgtgtcaagatatggtttgaggctatgagaggaaagcggctaaatctgcttgtcttttcaaaattgattggcagaaggcttatgataaaattgccaagatttgtgact

SEQ ID NO: 215157 - DNA, 989 bp, Cannabis indica
gtcgataaaaacatctacaattcgggtagcagtctctatcgacatatcgacacactatcgatatagactcgacaatgcacatcgcatgtcagacacgtgtacaattagacatttaatactaattaatttttcctgccttcgcaactatcgacttactatcaacatactatcgatatagactccacaatgcatattgcatgtcagacacgtgtataattagacatttaatggtaattaatctttcccgcctttccaactatcgacattgtatcgatattcaatcgacaaatacacattgcatgcgtttcacttgtacaattactcatttaatgttaattaatttttccaacattctgaacaagtattcccaacaagcaaattgcatgtcagacacgtgtacaattagacatttaatgctaattaatttttcccactttccaactaccactctatcgataagctatcgacataacatcgacatcatatcgataatttgtagactgattttcttttgttcaagttttatcgatattgtatcgatattctatcgataaatacacattgcatgtgttgcacttgtacaattacacatttaatattaattaatttttcctacattcccaataagtattctgctctataaaagcaaatccctttctaattcataagtgttcttatcttatacttttcttatacttcaaaattaaaggaaaatttctcttataattctcttaagttcaatatatctactagaaagaacaagggcaaatacccaattctaactcccgaagagatcaagaaggagcctggttgtggagaaattactcctcaaatgcaaaaagttctaaacgactataaacgttttgaaaaagaacgggtggcgaacgagtggaggtacctacaacttgaaaaagaatttcacaaaactgttgtatggctggctctagcaccagggttccccgaaggtttaatggtaaaccggtgaagcc

SEQ ID NO: 215158 - DNA, 931 bp, Cannabis indica
attttttaacgttttttttagatttacggtttgggttgctctggtagtttctatgtggttgctatacggattttagttgcgatttatggtgctctgttagttgttataggagtttttgtgtagaattttataaaaatacaacaaaaaaaaaaaaattttaaaaaatgtaaaaataaaaaaaaactccaataaaacattataagaagcaatcaaataaaataaattattatatatatttatagtaatgcatttcgtaccacactgaggaaccacttacaaagttaagagctgtaattaggagtgtgcataaatagatcaaatccaatgagaatcgaccaatccaataacaaccgaccgtcaaacattggatatccagttataatcagattgaattaaatgttatttttaaatatacaattggatcggatcacatggtagatgagtgtccaaaaaccaatacatctaacatccaatggaattaatagtattttcatttagtttgaatgagtaattagattttatactattatacgtaatatctatatgtatatatgaaaattagcattaaaattttactcatttttcttggattggatggatccagtccaatccaatacatattggacctaaaatattggatggattcgatccgatccaaaaaatactaagtcagaaatattaaataaaatcaaattaaactaataaatatatataaaatacatccactggatagaaccgattcaatccaacatccattaatccaacatccaatggatgttggattgattagatgactgaaattatttggattggattgaatggtaaaatctaacatctaatatataattggattggatcttaatagacctaaaaatattagatgtggtctaatgaacacccctaactttaatccactggatagaaccgattc

SEQ ID NO: 215159 - DNA, 598 bp, Cannabis indica
gtgtaatgagggcaatgccagcatcggataggcaatccgtacatcttccatcaacacgtagctttcaggttgaattctcttgttcttgcttcttctctggcacttgcttttctcctgaatcttaagagattttaggagatatgcctatacattcagtcacaaattcagcaagagccatgccttttattcccactcttcgttggtaggtgatttcatgttggccaagttctattgctgacttgagtagccagccagatgtttcagatttttgaagtacttgttgcaagggctggtcggtgtacactcttattaaaagagcttgtaagtaaggtcttaggtttctcgaagttaggagcaaatattacgcaacttttcaatgagtgggtattgactttcagcatcaatgtattttgctgacatagtatattgggtgttgaatgccattttcttctctaatgagaactgcacttacagcaaactctgtgactaacaggtatatgcccaattcttcattctctagaggctttgatcagataggaggttgagccagttgtttctttagctcttgaaaggcagattcacatgttgggttttatgc

SEQ ID NO: 215160 - DNA, 835 bp, Cannabis indica
gccacggtctcaatgatagaagggccttaaaactaagggttcgtttgatgacaattttttaattaattttctgtttttttaattagaaaagtaaaaatattttctaaaaacatattctataggactgttttcactttttaattttttaattgagaatcaaaatttaaaaaaatatatatttttgaaatttttttaaacaatttttattaattaatattttggacttcgattttaacctagaccttgggacctagattcgaaccactgctcttctgatcctagactcagacttgaatctaacttaaataaatttaaaaaataaaaattatagaatatatttttgttttctatttttaaaattaaaaaacaaaagtagttatagaaaatattttttttaaaaaaataaaattttaaaaacacaaattttacttttatgattaaaaaaaaaataaaaaatgttaaccaaacgctacttgagttaacacttgtaattttcgtttttttggtttgtctgtgttggtagaaatgactaatgagacttttgttaccgtttccttcattatgaaatggaaattgtttacagggaacaaaaatgacaaagtaaaaaaagaaaaaataactctctaaatgaaatgacaaaatgattgtttgaccttatcaaatgtttctcctagatgatgttactttttttttaagacctctataccattaattatgtttaagttaatgaacctcataataatgctaagtaggaaacacctaagagggttacgttattagttaatagtgtaattaagtatcgaatgacacacatttgaatttaataaataatata

SEQ ID NO: 215161 - DNA, 501 bp, Cannabis indica
tctatagcacccaaagggcttgggacggcctgattatgttttatcgtttgctatatttggtataactcttacatgaggcaaatttgacaaaaatttggacacattattagagcaaagatgtatcactaatttagcacaccattgaatatgctctaaaatttcaaaaatataattgatcactgttatttagatatttaataaactttagtttttaactataattttttttccaatttcaaaaaaaaaaaaaaaatctataattttttttacctaatgaaagagttttgattattggataaatgttatgtattttttttttttttaaaaaaaaaaaaaacttgtgttgtgggtatcaattattgctcgtgcatgagtgatttgtgacatttatattatactcatagctaataattaatcctacctttataataaaaaatttagaaattttagtaattgtatatatattatgtgcctgattgaaatatataaaaaaaaattgtc

SEQ ID NO: 215162 - DNA, 598 bp, Cannabis indica
tgagccattattttcagtcttattcctgtaaacccattttttcttgagagctttcttccctttaagcaacttcaccaagtcatatgtgtgattctcatgcagggatcccatctcttcttgcatggctccatcccactcattcttgtgatgtagaatagcttcttggtaagtttctggctctccttcatcaatgagcattacatactcatgaggattgtatcttgaagttggtttacgctctcttatggatctccttactggagtctcaactggaggtggtggaggtgcttcttgatcctgtttaattggctcaccatcatcatcaattgtggaacatcataatcaatattctcaccacgatcttcctgttcatctgcttcttcattgacatgttcttcatggttttcctgttcatctcccccatcatcaccatgcactataggtgaaggaactgagctagtactcacaggaacattaacatgagacttttgcttctgaactttatcattatcttcaaacatttgatctttaagaaacaccacatcccagcttccaataatcttcttgttcaccgtatcccataatctgtacccaaact

SEQ ID NO: 215163 - DNA, 534 bp, Cannabis indica
aaatcttttcccaaactgttattagtcacattattcatttccaagtcatgcatggtctattgttgagggaagttcaacaacctaatgagagagaattctgggtatctcttgctgggaagattcttaaatttagtgtagaggaatttgtcttagtgacaggtctagattgccacattgaatctaatatttttcagttcaaacacaataaaattatgctagttgaacattgttttaagggtaataaaaaaacttaccaagatttcaattcaagttgcctttactgctaacaaccttaaggataatgatgatcttgcagtcaagttcgctgttttatattttgttcagtgttacttgctcggaggtcctcctggaaagattgtctctattcaaaaacttgatactgtggatggtagccgttataatgagtatggctgggggaaggagtgttttgagatgactattgaatctcttaagggtaagatttgatgtcgttattaggactcttaggaagaaagataaggatggtgggttttt

SEQ ID NO: 215164 - DNA, 503 bp, Cannabis indica
tttagttttttacgtatttttcttcttaagttaatattaaaattcaggtgtgtaattagatatccaattaaaaattcgatctaatccaattagtaatttgatttgattggatataaaatttaattagattgaatcggatcatgattttccgaattcaattacttgaattggatgagggaaaaaaaattaaattggataggatgcacaatcataatgtattgtttataattcaacttcatttttaaaaatagtttttcatattttagaaaatacatgtagatggaatatatgttaattctttacaaaatatatacataatacttgtagaaaaacaaattataaaaatttagaaaaaatttacaatttacctttttaaatctacttttatttattttgacatttaaaagaattttttaaaaaaaaaaaaattaatttctttaaaaaaggactgaaatttttttctttgaaagagataagagttgtatttttttttttttttttgg

SEQ ID NO: 215165 - DNA, 565 bp, Cannabis indica
aattacaataatttctttaaataataatttcttttataaaactatcaaaatatagcattacttattacaccattaaaagatgctctcaataccatacaattgattatgatttcccttaaattaacatgcacattccattggcaggagaagctattaataaataaacaatttttacatattttgcattactgagctccttttctacacgcaagggactaaattaagttgtcattttggctacaaattaaagctacagcaaatcaatattatttttacatacgttacattcattttataatcgaaaatacaaaaatgtctaaagaaaagaaaaggaaattagaaaaatacaaataagcatcgatcttattacatagtcttagtactgttatatatacaaatgctatattagggagtttttatcctatctagtcgatataaaacctgaaaaataaaacacataaagatatattattatacgattatatatgtgtaagttatatgaaagtaaaaaagatatttatttggtttggaaattaattattgtggtcataccagaacagagtgg

SEQ ID NO: 215166 - DNA, 656 bp, Cannabis indica
agataatgttaatataatatttcaaatcaaaaggataaagttatattttaatttaaaatatggctgatattaaaatatccgatcttataattaaataatatataaatattaaagaaattaataaatttttaaaatctgaccataattaaaaaaaatagaataattattttttaaatttaaacaaaattcgcattaggggtgtggctgccagcaaggttgcacgtgcaaccgtatcctcatgcggacaggggctgcagcagggccccttgtgcgggttacgtaggtggatgcaatgtcctcttggcgtgaatgcaaccttattgcctcagattttttccaaaatacgtggcaacggctaagagcgacacgtggacctaaaagagcatccactcacaaaaatcaattaagtcttgaacaggaaagtgcatctcatggagtgagcctcccggaagagagcataagacacacctttactcttcgggaggctggaactgtaacaaggcatctccgggaagggaagagactgttgaacagtcacttcctatttttacggtgattacgcaataattgacgagtctagtgatgcctacattatgaggaatgacatcaatcaagggaggataaaagattatatcccctaacccctaagataccta

SEQ ID NO: 215167 - DNA, 415 bp, Cannabis indica
agtatttttgtggggtgatcccctgctcgtggattggagatttgttttttattgtattttttagtttggtttttattttttgtaatctttatatttagtttttttttctttcaatttgggattgtcttagattgtatatctctataatattaatctttattcttattatttcttttcataattagaattattttacttctattattattgtttggtattttgaatttaatagtggactaaaaaagaaaatttgtaaaaaaagttaatttattcttagaattttcgtttataaaaacaatttctattttaaatttaaaaaattattattatattaattaaaatataaaaaaatattaattaattttgtatattgatatttaatacataattagttagaaaaacaaaccattaatac

SEQ ID NO: 215168 - DNA, 641 bp, Cannabis indica
aaaatttaagcttagaaaattaagtgtaagtaaagtgatagttgagagagtttagccgtaaataattttttaatctaattataactaactattcaacattaaatatatttaattgtgattagtttagattgatttatattaggttaatttttttatttaaatatataattatttattaagggccctaaactcttaggctctcatttcttcagggtcggcttgcatccaacggtttgagtccccatgacttgatgtgcattcaaataaaaatcccatttcaaaacttaagatatatttcaataataataataataataattagagaaatacatatctcactagataacaattatgagaaaatatatataaatatactttgagtttttgatcatatagagttgataaaatatgtatatatatatatttaatctgagttatatataatggtgtgcaaaaaattatagaattcaattacaacttactcatctaataatcttgtgtgtttggtgcgcaggtgtcactgttggtgcacatgacatccaccaagtgaacaagtaataaactcgtaatttataaagctatatatgatttatttggatgaaaattaaaagtgaaatttaagaaaaaaaaaaaaaacaaac

SEQ ID NO: 215169 - DNA, 503 bp, Cannabis indica
gataccgcagttgtacaccacacaattaagaagttccctagccaccaacgatgtgatcgccaagttgtaatcactagctaaagaaacgcgttgagtacaaaaccctaggttggtgaagggtataccctcacccatgcatgtgatggaagttgttttaccagaatctagatttactaacatgtatatttgattatattctataatctaacattcttaacataaatttcttgagacaatgaattaaacacatataaatttctagaaaactttacattggtggtagcagaatattatggttccttccgttcagatctctaactcttattcctttctgtcgcagagtattggcaaaatctaaacttggatattcttaggtgatggaattcttcataatcttttgaactatgattgagtattgacttgaattgtgtgggcaaggtactcttcactgtagggcacttcaaattatgaagagacaagagagagagaattcaaaatcaata

SEQ ID NO: 215170 - DNA, 682 bp, Cannabis indica
cttttattatatatatatatatatatatatatatatatatttctttcattcaagtttttttattggctaatggagtttatagtgtcgtgaaatcaaataaaaagaaaacgaaaaaggcaagataagagagatacggtctaattcagtctgttgttccaaagagaaaaatcaaatgaggctctttccttaagcttttcatgctctcttcttttttggggggaagagaagaagcaaaggctgactatgaagtgggtttcaaataagggttaattactaaaaaggaaaagaagaaagaaacaacttggagaaatataaaaaattgttacttttgcagttccccatgtgatgagacattaattaccacaataaccaccaatctttattctatttcttgcacaaatccttagttggctgtgtttgagcccaataagatgatgcagaaatatttcaagcccaagcaacatctactagtagtagaaattacatgaaactattggaattttcgaagtgtgtacaaatttatgacatatgtatatatattttttttaatttaatttgggctgtcaacttaaaaatatatatatgtatatatatatatatatatatattgtgtggtttttattcctgccataattttgtaatatatttttgtattttcatattgaggacgtactttgaaccc

SEQ ID NO: 215171 - DNA, 684 bp, Cannabis indica
gacttcaaggttaatctttcttgttgcaacaagctgtgtctgtaagctgacttgtagtttgttccagcagtctactgattcgggttccaacttcttgaaccattcttcagtgaaaccgcttagtgttagtggaaagcatagacactttgcatcattgctaaccctcacgacagtcataactcggttgaaacggggcaaatggtcactggggtccgaatctctggtgtatgctgccatctcgggcatcttaaagttcttggagagctttgtatccagtatgtgttgggcgcatggttcccgatcctcgcaattagaatccgagtcgtcccttttttgtctccgggcgaccctagcaatgtctgtgcgtagtattgctaactcagccatgaatccttcaattagcgtgctcgtggaagccagcagcgcgtgtttctttttgtctacatggtctcgtaagtcaccatgcttttcgttgattttttgtctcaggttagctggagggtacctccagtttttcattcctctctccctgggttcttagtgcacggatacgctcttttggtcctcctggtcctgagggccaagactcgcttgagggagcttgcccctctacggacctttccctttcgggaaatttgagcggacttttcacggatcttacacctttttctttttcccagggac

SEQ ID NO: 215172 - DNA, 504 bp, Cannabis indica
tttatattcttctaaaaatatacaaataaaaagaaaaagtaaaagagaaaaaaaaaagaaaaagaaaaagaataaatctattcatttatatataagtacttttactttatctttatcatatgataatgatagaaggctacttaaagtaattagctaggtgtaaaataacacatgagaaagaactaataatgaaaaataattatatttgaagaaacaaattactttagagagttgagtttttatgaaagatttttgtagttaataaaataaataacgaaataaaaaaaaaaaaaacgttaaacaaattggctggagatagtagaatgatatctttaaaagtacgaatgtatgaactgtaattttaaataatattacatattttatttttggagacaggaaaaggaaaagtgacagaacaaagggaatatatatagttaagagtgaaagtttcttaattatagtctgatagattaatgtaatttaatggatctcctctaatttttg

SEQ ID NO: 215173 - DNA, 701 bp, Cannabis indica
ctcttccctcacaattatttatgacccatcattctttctctttaaaaaataaaatagaaaatttgtcaataaataaataaaattaaataaacataaggtaccattaggtttcttatttttatttttattttaaaataatttacggtataaatatctaaattaactctcagttataaataaatattcatatttaattttttttgtagaaattacaccctatacttttttttgttaacccatttcattttttcctttcttttctatatatttaatttataccctcttttatttgttatatcccgattatacccttatgtaatgaaaaaaaatcttcctcacctctttgaacagtacccttatgtgagggtgtaatcggtaatagacttataaaagggatacatttcaattgaatttaaaataaggctatttttggttaactgctgaaaaaaaataggtatatttcaacttatcctttaatttttagtagtaataatacctgagttataattctagaactatgtatgtatcttatcgttaaatttcaagtcattatacatatgtcattttcttcttagtatatttaaattaattttaaaaaaaaaaataataaaaatttaataatttgaaccaattaagaattgcaaggttatttacttaacacttaagaaccaggtactaacagaagttcaagaattataact

SEQ ID NO: 215174 - DNA, 449 bp, Cannabis indica
tttttagagcaatttgcggcgaaacccccttatgtttttgatttttatacacttaacccccttatctttatttttggtggcaaaacccccttatgttttaatttttatacacttaacccccttatctttttttttgtggcaaaacccccttatgttttaatttttatacacttaacccccttatcttttttttggtggcaaaacccccttatgtttatttttctttgcaaatttgacacgccagttaaatattaccgttaaatatcaactggatgaccactgtatacacctttgtatatgtaacggtaaaacctcgaagtcgatacagtagtaatccagttagtatttaacggtaatatttaactaaaactttaaatttgcaaagaaaagtaaactgaagggttttgccaccaaaacaaaagatagaggggttaagtgtaaaaaaatta

SEQ ID NO: 215175 - DNA, 569 bp, Cannabis indica
tatagggacacagtagtcataccagtagacgtttttctcattagaaatttgttgcagttccatctggtttgagttttcaaaccaaaatattaacgtgtttttgcctctacgctgtgatgttgagagattctccttgaataaaagccttggttgcaattgagatcttccattgagtaatgatattgccaaagtgagagatgttcttgccaaacgagtgagtaggggctaagcacttccttttgcaaaatcagttctatatcgatcatagttagaggttggaagtgttgaacctttagttgtaggcctatattcaagtccgggttcctctccatttcaagtttttcaagaaaaattatacacttattgaaaggatcatgacctaatctcccaaactccatgaaatattcaggaagtctctcatatctgaattcgacccaaaaattatctcagacttgagacaatgtgatcattctacctcgcactaaaggtttggtgacatctattttcacttgaatacgcaagaatggaccacaaccttcaaaaagcgagtcttcaaaaacttcaatgaa

SEQ ID NO: 215176 - DNA, 525 bp, Cannabis indica
tagtttatcgattgttaacattggcattacttttacctgttgctactgctactgtcgagagagcgttttctgcaatgaaaattgtgaaaacccgtttacgcaataagataggagatcaatggatgaatgattgtttagttgtttttattgaaaaatcaatttttgatggcattgacgatgagactattatgcaacgatttcaaacaatgaaaactcgtcgtatgcatttgtaattgtaagatatttttaatggataatgtatttgatttatatgcaataacttatttatattatagtttaatatataatttaaatgtatatcgcccttcctgaattttttttttctagcttcgccactgcatgtaaggccttctcttttgtattacctcgtgcacatttgctttccttagagccactaaccatccaaaaacttttacttttaccggagcgctacatttccatagggttttggtccattcgaagtccgttgatccgtgacttaaggtgaaccaaagaaaggcagat

SEQ ID NO: 215177 - DNA, 706 bp, Cannabis indica
taaactaaagaaagccataatacaagaactaggattatctttgatcagagctctaattatggcacgagtgtacgtagcattggaagttgagggaaagcgacacgcagaggaggtatcaagagaaacgtttgccctggaagattcctttcttttcgagacaaaggagagaacatcaacagcactccctcaacgaagaaatgaaacacgtcaatttggagatagaggaataagagtggcagctacggctaacatggcgcaagtcaggcaaacagggagtcgacgaaataaggaggaactcccacgaatgaccatacactaactgaattaatgcggtgtctaaggggaataaaagaaacaaggtggccaccaaaaatgtctacgacccaaagaagaaggataagggtcggtattatgcttttcacagagaacacaggcatgcaacctgtgagtgcaggcaaatgaagctcgaagtaaacaggttggtgaatggatgttttttctgagatggcttggcagcaaattcggcattgcatgcccaacaaaggcatgaaaagattcaaaactagtctcccctatataaaaaagactatgaacgtgatttctagcggatcagacttaaatggatttttagtccaagctttagcgactcacaatcaccgaattcactctaaaatcaatgataataatagacaatgaggggccagtt

SEQ ID NO: 215178 - DNA, 831 bp, Cannabis indica
aagcataataagacattaatagttaaatcttttttagagaagaataataaaaaatatttgtataacgttacataataaatatgaaaaataaatgaaaatcttggagaatcaaaaaaagaaaaaaggagaaaaaaagagtcaaatatataataaaaaaaacaataaatttaaagtgtagaatagaatttatccacaaacagaagaaaatccaaacctgtatctaataggattatgaaatcatctttttggcctttttattacattatattatcagttacaagactataaaaggaataaatggatatttttattaatacttttttatataagatttattaattatgatatatgaccatatttgactaagacagctggtgcttactatattatcatgattaccatgagtgtaatagttgtgtttgagttataattactaatattatttattgttacttacaaaaataatatatatatataaaaatatttaaatattttcgatatcagcaaataataatttgaaaaaatatcatatatattgagtaaaagaaaaaaattctaagaagttcaaaactattttaaaatataaggacaacatgtgaatactaaacatcttatgtagaatttttatgagaaatgtattttttaaaatgtataagatgtccatactcaaatcaattaaaattttggctattaagtcattttttcattgaaatatctaattattaatatttcttgaaaaaataatttgcgacattacgccataaaaagattaaaaataaagatctcaaaatatattagaacctcttaaattttttatacttttactgaatc

SEQ ID NO: 215179 - DNA, 729 bp, Cannabis indica
ttgtagtagtttttacactcttaatattagtaataatagtagatgttactcgtagtaacaagtaactcttccaaatgtgttacaaaataatgacaactaatatgtattatcatatgttatatattaatttgttgcacatatttagtctatatattatggggtgcactcttaatgggtattacccatgaataggtaaaattagaaaattttgagtttttatactaaatttttctatctaattaaaaaaatctctcattttatatcatatgggctgagattgttccattcggtaaaaaaaaaattttaaaaaaaaacttaaaaaaaaaacgttttttaagcaaaaaaaaataagaaaagaaaaaattagagtttgagttaaatatttttgtatgaacatatttttgatatagtgtaaaaagacatatttttttatattttttaattaagtagttaaattaagcatagaaatttaaatttgtgatttaattattcgttattagattaaaattcgatggtttgatatttttaaaattaatatttatagttaaatttttttaatacccattcaatagtaatacccattaagaagtgttccatatgtaaataatataagttacagttatttaggataatttatcaaattttgataaatttaaaatattttataatataaaagtaatatttagacattctattttacacccaactaaactttttttttaaaaaaaa

SEQ ID NO: 215180 - DNA, 563 bp, Cannabis indica
aaaaattattaagacggcatccaggtccttaggttagacaaatttccttttaaaattatatatttttttactaattttaaaaatattacattttactcggcttaattaaaatattttatttcgtatgacccactaaatttcagttgaagtcttacaaaatttcggcctgttacgtcgagaattccagctgctgctgaagcgtagttgactccatgaagtgcttgatctccattagtagaagagaaaggaggaatcagaggaagtcctagcatttccgctgcattataaattattattaatatctatttcattagtaccatttacttaatatataatctcatttactgaaatcattatctactcaatctaatatagatcttttgctagattttaagagttaccctttaagaagattttagtagtacactatagttttttttgaaggaaagtagtacactatgttaaagtaaaggcaatattataattcagagagaagaagaaaaaaaaaaataatattttatatatatatatatatatatatatatatatgtatataatgtacc

SEQ ID NO: 215181 - DNA, 617 bp, Cannabis indica
tactctccaccatctgatcgaagcatttttaatgatttatctaattgttttttagccatggctttgaagtttttgaactttctaaaagttttaggcttcttggataataggtaagtatgatcgtatctagaataatcgtcaataaaagtgacaaagtattcataaccacctcgagcttaaatattaataggtccacacacattagtgtgaataagttcaacttgttctttggctctattgccttttgtagaaaaatgtcttttagcgatcttgccatctagacaagattcacataccgaaagagtttcaattttaagttctttttaaggaccattctttgttagctggtttattctgtcttgggcaatatggcctaaacgtagatgccatggatacgtttcatcatcatttgaaacattttgcctctttttggagtgagacaaaactactctaaacaatttattattttaaattaattgttcactaggctcgagcacataaattctgtttctttgttttacacaataaaaaggcataccaaatttagaaataataatctcattattaataaaactaatgttaaataattattcgtgcaaaagagataaagaaataat

SEQ ID NO: 215182 - DNA, 767 bp, Cannabis indica
atcacagtgtctcatgacataagaatatattgtgatacataaacataatcatcttatagaatctaatagctcactcttgagtgttgaggctgacttgaaaaattgtggtgtgaactctttagtgaagttcttggactagatattcgtaataatattaatagatagcaagaatctcctaataggatacaaaatgtattatctctctattcattagtctatatttaatttatagacattatgttgagatccttgggcgtatggtttatattaaataattttttttataaaatctgcttctcctttctaactctgatatgaaccattaaatctaacaattggtatcaagagctatcttaataattatatagacttactacaaaatagttttctctaacgtttttaaatagtcgtttaaagaattcgcgtcaggatgtgcgtgtaatatggatatgatatgtattaaggcttattatatgtatatttaataaaaaataatgggtatacccgacggtcggctatattatacccgacgattttaaaccgtcgagtatatgggttaatttttttaataatttttcatgtgtttttaataataactgtcacctactgttttagctactgttcaaaactagcgggaatactcatttttcctaacggttttaaacagttacttaattttttagtcgacggtcccgaaaaaaacttattttcaagaccgtcgcgaattacaatatttgtagtagtgattaaatactgtgttgggtatt

SEQ ID NO: 215183 - DNA, 837 bp, Cannabis indica
acacaaaaattactaatttattgtgactaaatgtattttagtcacatacttgttgtgactaaaactaaattagtgacaatttgtaactaaatactatgtttagttacaagtaacattttgttgtgactaaaagtcacatgtagttacaaaaaattatgttatgactaacactaaagtaggagtttttttgcagtgttaattactaaaaaatagtatttagatataagttatcattaatttagttttaatcacaacaagtgttgtgaagactagaaacatatttagtgataacaaattataatttttgtaaccaatacttttaacaataaattttatataattagtgataacatataactaataatttatgtttagtcatatatttttttaacttttagttacaaattgtgatagtactttgtggtggtaataaccatgactaatagtagtttatgatcatattaataatattccaaataatctaatgttattattaggtaagtgggtacctaatccaattgaataataataaatattatctcatttaaaataaaaagttaccacctacacagaaaaaaaaaaatatatatatatgatatattaagtaatttattgttattattagtaatttaatacgtaggtatgtgtctcgatccatcactaattaattaacatttttatatatgaattattatacagtgagataattgatgagcatctaataatattttttatagctagctagctactatatagcttcatttctcatataaatatattactatctatacacttgccaatataggtatatatatcatcccaaaaaaacataaatat

SEQ ID NO: 215184 - DNA, 588 bp, Cannabis indica
tattattacttctacactattgagagattggactggcaaaaaaagattatgtgttagaagcttagactgtatagtgctacgacacctataaatgtattaaaaaattttgagataattatatggtattatttttttgtaaaaagaatatatctttacgtttgaagaatttatttttatatttatacagttttttataaaaacaacgaaaataacaaaaaaattatataaaaataatatgaaaataatatttaaataatattaaaacaacaataaaaaataacatacaaataataaaaaaatcaacaataaagtaataaaagtataccataaaaagaccgtattttctgtaaataaaattaaaaaaatcgtaaaaatatttaaaatttcatgaaatcttatttttataaattttttgttgtttttatgtatatgtgaaataatctctaaaagattttatttgtttctaagtgaaattaaatttgaaaaagagaggagagagggacggagatactttaatgtgtgtgtgggtgtgttttcttttttttttttttacttgtaattaaattttaatggaatttcgatagcggt

SEQ ID NO: 215185 - DNA, 592 bp, Cannabis indica
ggaattctttacaaacaactatggattaaataaaatattatttatatatacgatatatttatataggattaagtccaaagcacatgtaatatatatatataaaaaataatgtataaatactagaagttaaaatgtatgttcttgctgacttagtgtttgatcttatatttcaataatttaatgagaaataaataggccaaatacaagtcttttatgtatattcatattagggaatagttgaaagtaattttgtaattattaagtagtgtaattactagagtggtaattacaataattacattatattttaaaataaatatgtctttggataagtagattgtaattaatataaatacttaatatcttatttgataaaacaattagtaattaaataaaaaaataatatttttttagtaattaatatttaaaattaaaattttttaataattacattcaatttttataggggtcatgagaattatatagtataattaaaactccttaaattaccctttaattactacaattatagtataattatataaatcagacaaacatattaaattgtgtcaattacacacaaatttaatta

SEQ ID NO: 215186 - DNA, 568 bp, Cannabis indica
tcatatctcaatcggtcggtcgaaatgactcttctatctcagttggtcgaatggatgaatcatatcccaatcggttggttggatgactcgtatctcagtcagtcgattaggacgattcatatctctatcgatcggtcgggataactctcgtatctcattcagtcgatcagatgactcatatctcagttggtcgacgggggtgactctcatatctcatgcaatcagtcggttgggatgaatcttgtatctcagtcagatggctcatatctcagtcggtgggtcggggtgactcgtatctaagtcggtcggtcagatgaatcatatattagtcagtcagtcggaatgactcgtatcttagtcgtttgattgggatgactcgtatcttttttagacggtcggtaagatgaatcatatattagtcagtcagtcaaaatgactcgtatcttagtcgtttgattgtgatgactcgtatcttttttagacgaccggtcagatgactcatatcttattcagtccgttgagatgactcatatctcagtcggtcagtcgggatgactctcgtatctca

SEQ ID NO: 215187 - DNA, 612 bp, Cannabis indica
gtgcttatatatatatggactcaatggtattacctatttgtagttattaaataagtttaattataaatattaattttaaaaatattaaattattaaattttgattaatcaatgataaataattaaagaaaaatttaaatttttattcttattttagttatccaactaaaaaaaatataaaaaaaatacatctttacaatatattaaaaatatgttcagatacaaaatatttaagtcaaactcaactttttttaaaagattttttgccaatttttttttaatatggaataattaaccttatcttatataatataaaaataaaaaatttctaaattagataaaaaaaaaattagaattttcttaatattatttatatatatataggtaatacccataaaaaagtatatccatataaatatttatgtaagtttaattttgtttaatattctattgaaaatcgcaaataaaatgtaagtgagctatattggctttctaaaaatgataatcgcaataaatcaaaactagctagggcaatcatttaatttttcaaaaaatatatgaagtacaaaaaactatatgactaacgttttttaatgtgaaaaaacatcgtttt

SEQ ID NO: 215188 - DNA, 999 bp, Cannabis indica
atatataggtgcactcttaatggtaatacccattaataagtatttcatattccatatatatatatagattctctcaattttaatattttttttaattattttaatatacaaattgatattttactattattttaataattttttatataaaaaaaaaagcataaatctacaaattaattctaaaatcacttcaaaattattttttcttttctctccttaattctcttaattttaatattttttaattatttcaatctacaaattgatattttactattattttaacaatttttctataaaaaaaaaagcataaatctacaaattaattctaaatcacttcaaaattatttttcttttctctctttaattctctcaattttaatattttttaattattttaatctacaaattgatattttactattattttaataatttttctataaaaaaaagcataaatctacaaattaatattttactattatttaataatttttctataaaaatataaaatattttaaaaatagaaaataaaaaataaatttcaaaaaatattaaaacttaaatcaaacataattaatcgtaaacttcatttatatacatacataaaatttcaatcaatacatataaatttatatctatctatgtatatataaagtagagacataaaacgatgacatagtactcaaaaatttctttaaagctatttttcttttgtctatttaatttttttattattttaatttttaattcatgtaaaattactttaaaactatttttctcttttctctttatatttttctgttttctataaaaaaatacaaaaataattctataaaaactcaaattatagtaataataatacaatatatacaaccttaacgttttttgcttttatttttttaaaaaaaatattataatattaatataaaataataactctaatacgtacgttttttattttttataaaaaccaataagatataataataaaaaaaa

SEQ ID NO: 215189 - DNA, 807 bp, Cannabis indica
gaacccagaccccgactcgagacctgagacccaaacttgaactagacccaaacttgggacccggacacgaaccttgaccaagacccgaacctagacccaaactcgggacccaagacccagacctggtcttggacccaaacctatacccagacccgggacccaaactcagacctgaaccctggacccaaacctgaaattgaacctaaaattgaacccgaacctgtagttggtgttggggacccaaacccgacctgcagttggtgttagggactcgaaccagacctgaaacccgagactcagacccaaaccctaactcggacctagacccagacccggacctagacctggatccaaaccagacacggatctggaccggacctagatccggacccgacccgacctgtagttggtgttggggacccagacctaacccgtagttggcgttggggattcgaacttgacctgtagttggtgtaggggacccaaaccggacccagacccaggacccggacttagacctagacctggaccctacccgtagttgggttggggtcgagtttattgaaaaatatattataacttttacactaaatctattaatacaactcaataccaaacataatattgtattaaataatactaatacaaaattaaaatggatataaaattaaaattctaaaaaaaatgggtcggattagatccgaattaagtcaggtcggatctgatccgatccgagtatctaatctagcggggtgggacagatcattacatgatctaaatcatgtcggatcatagctgaatcagatc

SEQ ID NO: 215190 - DNA, 1156 bp, Cannabis indica
tcttaacttcctcttcccttttttctctgaagtttttagaaatcctcatccattctccacccagatttacttttctttccgtctctctaagacttcagaagagaccgaaaccaattacagggagcaatcagaaaagctaaaggtcagtttctaatccacttgtgtacttggttttttgaaaagatgaaaattatttttctgggttttttttgacattttgagaggttcgaacatgtgtgttcgtagggaatatatatagggctgtatttttctgtgtagaactggataatcttagaaaaatagacctgaaatttgtataacagtgaactttaggaagaaaagtttgaatagtcgcacctttcttatttgtttatttcttgaatacacgcgggtattcggatgaacacttcgaatacttgcatacctgcttcagagactttatcattcctagtcgttgttttagaacatagggttttatattctctgtatattttgttatgggaacattggttaagtctttcaaatggtgggcgtgtcaccgtattccaatgctcatacgtgcgatcgtatgttccttgaggtattgcgatacgcccagccatttgcgacatacgccagtgtttcctgttccaatataagcgtattcttcgactagtagatttgcttgaaacagtgggtgtttcccagtaactttaggatcatgttccaaaacgcatgcccctcgggtcactgggaaacgcccagccgtttttttaggtttatcgctagtcggatgcgtgtgacgttctcgcaggttatgattggttaggtttctcgaaacggtgggtgtttcccagtaacttcagggtcatgctcgaaaacacatgccccttgggtcactaggatacatccagccgttttttgagatattcttctattcgcacacctgcgattttgcgccttggtgggctgattggcttttcgcgagaatccaaatcagtcttctaaggagattttgaattttgtatgcgggtgaggtcacttatattatttttgcacattcaccacgctgaaaagttcttctatctttcagatcagcgatatgtcggacagccaaatgcttggctctggaggcgacacattcgatggcgactaggaccatcaggaggatagcttc

SEQ ID NO: 215191 - DNA, 483 bp, Cannabis indica
tccacattactaagataatcagagtgattactcaccatcatttcagcaaatggtggaccatttgccttaacatccctcatgtaatctctttctgattcatttcttcgtttattagaaatgtaaatatgagacataataacatagaaaaaaaaaaactcatataattacaaattcaagatgatcatataacagttaattttctacctccacttattatctttaatcaatataccaaaacactcctgaaagaaaatatatccctgagaaaaattatccctcaaaagagaccaattagtatttaccttgtgatcagggaaatcctttacgttgaggagctccatgccaaaggccaaaattaaaaaaataaataaataaaagtcaaaaaaattacacatttatttcaaaattaagaagaaaataccaggcataccttcttataaagtttatagcacgatcttatagaagttcatagcacggacaatg

SEQ ID NO: 215192 - DNA, 562 bp, Cannabis indica
ataagggaaaatgggtagacaagccacctcaagtactctgggcttattagataacagaaaaaacagcaacgagacatactattttttcactagcattcagcttggaagccattgtttctagtagaagttaacattactacacataagctagaattctacgaccaagaataaaaccaagaactactcaaggtatctttagatttgctcgacgaaaaattcactgattcaaaaattataaatgcttcataccaacatcgaatcacaagacacttcaacaaaagagttcgaaaaagactttttaaagtggagatttagtgttatgatgcatgtttgctaaaacacgagaccctgcagtaggagtatttaacccaaattgggaaggtccttatgttattgaagttgttataagaacgagagtttataaattggcatggtttaacgactcgctgataaaaaatacctggaatattgagcacttaagatcctattaccagtagctgattctgttgtatttcatttaccattccatgtaaaaatataatttcattttaatgtaaagtat

SEQ ID NO: 215193 - DNA, 1218 bp, Cannabis indica
agagatccaagcttagatcttgtgattactccgcgataaaaaggaacaagtgttagagatctacgtggaatgagccatattattccgctgccaccagtgtaagattttctataactttatatgtatttaatttattattttagcaaatttatatttagggtgttagattatagaatataatcaacatacatattagttatttaagatatcctataaaattttaagaaatttggactaatttataatatagaaagcaatattcaaacagtatatttcacacacgtataaaataaaatagtcacgcgtgcagcacactctttgaaccctattttcgctgcgttaatttttttaaaatttttcaaaattttcaagatgttttaaataactataacatacatgaccatgagagaaaaattgattaaaaaattatttcaaataccaaaatagattaaaatgtatcgttgtatcctttttaagaggatgcattgtagaatttctaaaaaaaaaaatatactttcaaaataaaaataaaaataaaagaacagttaaaaacctcacgtgcgttgcacgtgtcttacagagatccagttaaaacccttctccattttcttcagtctctccctgcatttcgctcagctcactgaaaccctaagacgccgagaattgaatcgcaggtaatttgcgtcaatggcatctggcttatagattattatggttcagttttgtacttttgatttaaacaactgcttttcattgaatcatttatctcgtgcataactgaaactagaaaaattagagttggaatttaagtttggtttggttattgatttgttttcttaatttgaaagcagttgcaaaaaggaaaaggggaagatgcctttgtatgactgtatgcttttgttgaaaccccatgtgaagaaggaggctctcatggagttggtttctagggtaggaaaacatgtttacagaaaaaatggggtcctcactgaggttaaatcatttggaactgttcagttgggttatggtattaagaagcttgatggaaggtactaccaggtaggttttctactaaatcattattatgatttctttcctttctttctgaaattgttctcttttaagaatttagctgtgatgcttttgtggtttcatgatcatctaaggacacatttagaacttcatctttgccgtacctttttttcttgggcatgatttatg

SEQ ID NO: 215194 - DNA, 801 bp, Cannabis indica
cccttttggtgaactcgataatgacgggtgactgtgccatgggctgcctcggcttcaatcgtcttcccatcagggcacacctggattgcaatccaacttctcaatataaagtgaaaaaagcagcttagatacagaagtggtgattaaatgtaccagcactgatgtcatcagccccaaagacccaaaacctgtagaaaggtgaaaaaactatttatgatgaaaacaaaaatacaccttagtaaacactctccagagtacacttaggtggcctttggttggaggtatgaaatggaatagaaaggaaaggaaacaatcttcattccattcctttgtttagttacatattaaagtgttggaatgtcattgcaatggaatggtctttccaccattttggtggaatgacaattccattttgaaattgagggaaagaccattccaatgcatgatgagaaaaaaattaataatttttttataaattttttgtataaattttattcattccatttctattaccattttcattcccatttccattcttatatttattcctcccaaccaaacgccaccttagctcaatacaattccaaaagaatcagaagtaaactatgaaagataattgtaagccagagaactaccacaataaatacagaccttgagctaagaaatcactctgtacatcaccatcataatttttgcatgcccaaacatagccaccatcacttttaagagcataagcaaccatatcatcaatgagacggtgttcgtaccgtacactgtccaatcatattatcagtgaaatta

SEQ ID NO: 215195 - DNA, 597 bp, Cannabis indica
aataaattcatctattgaaatataattcttacattaaaaaataaatagacaaacataactttatgaatttcaagtattatttaattagaaacataactttatgaacataaacaaacatactttatgaacttcaagtattatttaaaacaaaaaaataaataaacaaacataattttatgaacttcaagtattatttaattagaaaaaataaaatataaattgtagataagtatatagttacctaatgaacacaaaattatttatgaaaaaaataaaaattatttataactctgtacatagaaaatcaaaagaatcatatattataatattttctaattatagaataaaataaagaattgattttgagataaataaacttttcatattcattgaatttaaacaaaataaattaagttatattatataaatggctagatttcgatattcattacctgatttaattttccaactaattgtcaaaatattctgacaattaacgtggcgcacataatgatggagtatcccacctataaatatagggtctcagtccccaagcgcttcacgcattttgttgaaaacaacaaaattctatctaaa

SEQ ID NO: 215196 - DNA, 789 bp, Cannabis indica
aaattcactccaaaaaatcctcctggttgttcttgcaaggctcaaaagaggagagagagagagagttaagaaaatttgggttttttcttccttttctttataattaattgatttttcttttaatttcctacaacaacaaaatgctatacttagctgaattattaaaaatggtcagctgccatgctaagaagaagtcatgtaatccccttaataaaatgaccaaaatgcccttgttctttaaacttaagcaatttttaaacctaggggtaaaaatgggtcaaaaaccataaaccctgcacaaactcggtattctattcatctcaaatatttatcccactaagaaaaagattctagacttacccatgtgactctaacgagcatccatcgcattttccgtcatccccgagcaaaaaccataaaatttacataattcatatataacacaaataatacttctagagtttaataaaatttctgaaattgagaaattataactctaatgcccatttctaataatgggatccacaacataataaatatatgcataattctaaaaatatcaataatcaaggacaattgtctcatgacgaaaaaatgcaactcattttagtaccacgatactagaatggagagcatttaaggaaatactaccaatgagtactcaagtcgggtagaccacttcaaagtactcaggtcaaatagaccatttcaaagtactcaggtcgggtagaccacattaaagtactattgaacattcgctataagtgaatggcctcttgggcggactcc

SEQ ID NO: 215197 - DNA, 1029 bp, Cannabis indica
aaataattaaaaaataagtaatttttttgtttagaatttagaatcttttagacctatatcatatagtaaagctaatattatgttatattatgacttttaattacaaatattagtactaaattaatacattaatatttttttcttaattttttttaaagggactaacagtcctctctcctctacgtgagtcccccccgataattttcttaagaatataacatatgaaaatcggacaaaaagaaatacacttttatatttttacaatataagagaatggttattacctatttttctttacccgtagtaaaagttaaaaaaaatatataaatatacagttaaatctctatttaaaaatacacttagtacgaagtaaattatattctaattgagagattataactaaatagaattatactaggaaaaaaaaatcaaaaacacaaaaaaaaaaaatatcaatataacaacaataacaataaacaatttttaatactacattataataaaattatttctgaataaatataatatttatacatgtattacaatttagaataaaattattaaatctacataaataaataatttataaaatttatatatatttttaagagatataattatttttatataaaagtatattttgttaataagagacctaaaaaattcataactaattacaatttagagattattcttattatctaaaaaaaaaaaggattattcttatttataacttaattttttataataaattaaaggttattcttaaatacaatattcttaaataaaagttttttatacttcttaattattccaatgggtctaaaaaaagtctaaccaccaagatcaagattaagtgggactatgaatctaatctaacagcccaccaacattttgactgggaaactgaagctaccacagctacgtaggactagtgtgttgttctcatgtgaaggtaagctatattattacatatgaaaacgcgtttgcttatgcactaaaccagaaagaaagattaaactatagtag

SEQ ID NO: 215198 - DNA, 627 bp, Cannabis indica
ttgtaagtgttgtatttttcatagataaataaatagcccttggtaatctatgttaataataattattaacattttattttactcttttttaataaagtgttatttactctagtcaatgcaaaaaaaaaaaaattatttttactctagggacatacatgcgtttattgacttatttactataatataatggaaaatcaaacaaataaaaaaaaggaaaatccattttcttttaattttcctcaagtaataattgataatttatttatttcaatatatatgattaactaggtgtaaagagaaatgttttaaaaatatgggacaaaatcctttgtttttgaagtaaataaaattcattttcctctttttcttcttttcgttttttttttttttttttgtaatctcatattttgaatttatataataaatatgagattaagaattttacccttaaactttgtcaataaaaaatcatgttccttgtatttacacccatacatagggatgcacaaaagacgagatattagaggtgagtgctcccctaccctcatccccatcctcattaaggattttaattctcatccccgagaatatgcaagaatggggcattatatctcctaacataaaaaa

SEQ ID NO: 215199 - DNA, 507 bp, Cannabis indica
aaatgttgcaacttctcaaaccagactctgggagcttactttagtccatataaagccttgtgaagcttgcatacaaggtgtggagttgttttgtcttcaaatccacactactacaaaaaaagtcttttaattgcttcaatttttaagtgacatataaagaatttgcgacagttggtgtacctagagtaaacatcaacagaactaatatagtacctatatccattaaaaaattttactgggtagcaccccatagatcagtatgcaacaattgtaaatgagcagtataaacaatgtcagaatttggaaatgaaattttttgatgtttgcctagacaacaatttgtaaaaagataaaaaaaaatattattattattagaaatattacaattgttcattacaaatatgactgtaattttagttggatgacctaatatattatgccacaaagagaattgagacataggtacattagaacagacatgaaaacaatgaatgttagagttatagg

SEQ ID NO: 215200 - DNA, 819 bp, Cannabis indica
ctcttttcttctctaaactttcgaaattcccttgagtgatagagtagtgcccacacacatcaagtggtacctcaatcatagtatgtaagactgtggaaaatcaaccaacaagaaggagaatcagcatcaaagaaggagagaaagagatccagattcagatcttgataatgctctgctacagaaaggaatcaagggctagagatctgaatggaaggagtcattatattccgctgcacccaatgtaaggttttcttaaactcttatgtgtttatttcattgttttagaattcatattaggatgttaataaaacatacttggtagtaaatctagatcctggtaaaatatttccaacacatgagatggaccccaaatatcaatgtggacaagttcaagaggttgagatgctcttttgtggacaggggaaaggaagcctatgactttcctaattggcaagcattgcaaaacttaagatttttgagtgagtgaggaatattagcatgacttaggatagtctttaagatggctggtgtaggatgtcctaactttagatgccatgtatttatatcaggctgtgttgtaattgaataggcacatggagaagagatatcagtgtaaggaaaagtgttactgttattgattgaaatttgattacaagatttttctgcaatagtagatatacaatctgaagtactagaaaaatcagtacaagatgaaactggaatagtaacaagattacactgtaaactatgtttggacaaatttgagtcatcgtctcctagaaggtataagccatctttaagcttccctttgagtagaac

SEQ ID NO: 215201 - DNA, 1141 bp, Cannabis indica
aaatgttgtaattgtgccatttacatggagatttcatccaccaaccccttcaaccactccatctttttatactatcatggcctttcaaaatatggggaatggacgtcattggtccttttacgccaccttcttctaaagcccaaaaatatattttggctactacaaattacttctccaaatagatcgaggtcgtaccactaaaattaaaagatttcacatgattctcttttgcagcgtgctctttttttattagcattttaattcactaaacatatctatttttgttgatgttgattttatgaaaaaaaaaaaaaaaaaaaaaaaaaattaaggcaaatgtaaattatcttttcctgcacaaattcttattttttctaaaaaaaaaaaccagcataaacacaaaattttgtagtggtttatcataattgtactttaaaatttgttgacatgtctatttaagtaaataaagttagccaaaataaaaactttaaaaatataaattgagtcaagagtatgcaatttatatttttgatggattcaattttgtcaagaggacttggacattagtgtcgagaataggtattcgttgttgttgaggatttgatttgtctataatgcctccagctgcaatagtcatggctatagagtctcaagtccaactactagatgccactgatcagcttcctcgacccattgcaactctctagggggagcctgttattctagatgtcaaggattcctcggtgcatgttcaagaggagccatcttaattttccatcaactgatcctaccctgcattatgttcaatgaaggggctgggagagtacttatgttttattttgaattttttcaatattgttttagttgtttaagactatttttctatttgttcagactttggtatcttttgttggctgtgtgttaaatattttgaattatcttattattattgtcattgatcataatttgtcaaatggtgattgtaagcaccactattttgaatttgaaaaattagatcttattttattagaaatttgtggagttaccacgggagtttactatttttatttatccatgtcaccatatttttgtggtgtctttttatcgttaaccgttgttattttttttggttttacctaag

SEQ ID NO: 215202 - DNA, 672 bp, Cannabis indica
cgtttagattgtgaattgggacgacttcaggagccgattcgctcttttccaggacagtgggtggtttcttcatgaggagtgtcaatgttttctccgttgtcaaccatggagaaagtttttttttataccaggagggtttttttctgagcttttttcacgaaggctctcaatgaaagcatcaaattgttaactcaaatttttgttaactatatttaagcctaaatcgtgatggatttgcacagaaaataaaagtagtaaagaaaaataagaacacaagggttttttaagtggttttgcagttctagggctctctctctcatgaatttttttgtcccttttttagtataacatgctctatttgtaattacataggagggcagttaattacaaatttgactaatattttacaaccatcctcccctgaaattgtgggatttgattatatcccacgtaaaataaatgcggttaatatttgaaaatcacacatctgtgattggtcaacttttaccaggtcaatgtaaatgtgtgttaaatatgttataaagcgtatcgttctgtctcgctgggaacatagcaacaataaacctggttgcgagctatagcttttcccatgtctttctgagattgataatgtaaaccttgtcatttctgcgcttaaagacataacactcc

SEQ ID NO: 215203 - DNA, 571 bp, Cannabis indica
tgagaactcaaatcactcagcgtcagaagccccatcagacgcatttgagacatctggaatctctccaaaaatatccagagatgcagaagtgacaagtggtaccccgaccagtttgtctcattcgaggctgtacaaaaagggacctccatcttggataaaaaaggcacatcctcccactatagtcattggtgatcctaatgctactatggttactaggaggaaaatcctaaatgctattgcttttgcttgttatgtgtccatagtggaacccaaaaatgtgactgaggcttttctcgatgagttctggaataatgcaatgcaagatgaaatgggacagttcaagagaaacagagtttggatcatggttgccagacaagatggtgtcaatgtcattgctactaaatggctgttcaagaacaagactgatgagtttggtactgtcgttcgcaacaaggcccgactggttgctcagggctacactcaggttgaaggagttgattttgaagaaacgtttgcaccagtggccagattggaatctatccgcattctgctcacagtggcgtgtttctta

SEQ ID NO: 215204 - DNA, 563 bp, Cannabis indica
ttagcgccaaaatataaatatataacactaagttacaaatctaaaaagaacaaatgaagataaacattaactaaaataataatttaataatcaaattgatcacttgaggatcttagccttgaagaatatcaataagtattttgagaatcttgatatattcttgagatgtttgatattgttggtgagctatttttacataatccttgtttgctcattttgaaaataattgcgtatattaggatcaactataggagtaaatcattcaataagttttttttaatgtgtattatttaattgatttaataaatattttattttacaattattttaaaattataaatttttactagtagtcatggtataaccatatgataaattagttattttggattattaatataaatagtataaaatgtgagattttttaagttaaatatattaatttagtggaatatatattgggtgtaatatttagtatgaactattggaattgttgtacaaaatgcaaaatattctacaccaaattggtgtaaccattcaagatggtcttagaacatctctaa

SEQ ID NO: 215205 - DNA, 939 bp, Cannabis indica
ggaggacatggtgtaaagagggagattagccacgatcgagttaagaaagtggtacgaccaacctgagacgggacacgcccccacaagaccgcactctaacttttaataattcattttatacatattttcatttttattttgccatcacactgtttttatttttcataatttatattttatttttatttttacatagtttttttttcataaaatctttatttttatttttattctcatatatttatttttgtccctataaaattgtatattttttctccaataaaaattatattttctgcctatttttatccaaaaaaaataaaataaaataaaaaaaattatcctccctctttaacatttgtggctagctacgccactaattatatatgctcaaatgcgaaaatacaactcacactacaaaatactagaagtctgtgtaaatttcgtttacctagcgtatttttctttttctttttttaaaaaaatattttttgtatgtaattaccaaaagtatcttaattaactaatttaaccgaaaatagtggttataggcatagtctagtggttccacacttctcctcacaaagagaaagtcccaaattgaaacccccctccctcaatgtcaaaaactttaaatcgagagtactaatcaagggcagaggtattgcttgggttggggtcgctatggccccctctcaatctcaacaaatatttagttactttagtgatatcattaatctattgaaaaaaaaaaacctttaaagatattgttattttgaattttttttttggaagacatattattaaaatttgcaatttattaaataaaaaatgtgtcacttaaattacatatagttttatatttcaaatccaatagcattttttcttttatggaaatattattttgtaatttttacaagggataattacataagacac

SEQ ID NO: 215206 - DNA, 535 bp, Cannabis indica
gatatttctgatacaatactaggactttttctcttgaggaattttttgtccctttttcagtgtatcatgcccctatttatagttacataggagggcagttaattaaaaatcagactgatatcctacaacaataatcccatgaaattgtaggatttgattaggtcccacgtaaaataaatgtgattattatttgaaaatcacacagctttgattggtccgcttttaccaagtcaatgcatacgaggattaaatacgctgaaagcgtatcacgctgggagatctccctgtgaacatagcaacaataaccatggtagcgagctagagcttttgccatgtctttttaaggttgaaaatgtaaatctcgtcatttttatgattgaagacataacgctccatctgacaatcacagttctcggtgacaagatgaacttcaacagtcaacatcatttgaatgtcagcttctatctgagagagctaactcgacagagcagtgaatctcattgaaagttgtgtgaagctaactagtgaaagtacc

SEQ ID NO: 215207 - DNA, 502 bp, Cannabis indica
gaaaaaaacacaaagaaaaacattgagaggaatgtcttaattgacaatgaagcttttgactaccaatgaacatctagaatattaaattcaatcaagctactaattaagagagtaagtatgtttgttcaagttctaaataaagtttagaacttgccaatggataaataaataaagggtggccctatatggcaaagggtaaatcaagcaaagcggatatcatatcatatttagataaacgactggagaacttcgcaacttatttcacagtataaatgataccataatgtaatactaagatagtgagcaagcatagagaaagaaagagactttttttgttctgctgtgtacatttaaaatccatgaagcatgcttcatgtaaggaaagaaaaagtgctcgaagaacagaggatggcgaaagcaaaataagttcttgaatgattaaaattttgatactgcaaaccctattatctaaaagttagaggatattgaggccggattacac

SEQ ID NO: 215208 - DNA, 689 bp, Cannabis indica
ttcttccaattagagttcattatagttgtgatgactaaaattttgctttgaagacaaataaataagtgaataaattaatttattgcttttatttctattttatactattactttgtagttttaatagggtttcggggtggctctatttttggtcaaactgatactataaacagtggaacacaccataaattttaaccaagttattgagaattgtaaaggaatgttaaaatgagtgtagtgtttgagaactaagatgataccaaatgcattgatttaggttgtatgcatatttgagaagttatatatgcgtatatatatacatatacaagtatgcttacatcatatgttgatatcaatgtctacaattggaacccaaaattatgtccttcaatcctgccatgttggattgttcaaaatctttaacccaaaaaaaaaacaggcatatgtatgtgttttattaattttctcttaggctcatattagtatagatatttatatgtacataaagcagagtgacggtcaaattttggctctcagtttttcttgatcatgcaatgtctgatgtagctatactttttcattttacttggtgattgtgattttatagtttgcttaagttggtgtttgcgtgtaaggggcttttacgtgtaaaaagaaaaaagctccaaatttttacactggactactgt

SEQ ID NO: 215209 - DNA, 639 bp, Cannabis indica
cacaaaccctctcttcttagcaacaaacccaagccatacatgtgtattgaaatttggagttagaagtttgtgtttgtacatttatattgttgttggaatttaattagtttcaagtttattattttgatttaggtgtgttgttgaaactttaaaaagattattaacttattgttgttgttataacttttattagtctcaagtttgttgtattttcttaagtgttttggaataattatattaatgatagtttaattattttgtgatgacttcaaaaaaaaaatgtgatagttcaaaccgcataaaccgcagaaaccgcaccgcaccgcatcattttttgcggtgcggtttttgcggttttttagtatcgcggtgcgggtgcggtttggaaaattggaaaaaccgcatgtgcgggttggtttgaaaaaatggttaaaaaccgcaccacccgcaccgcgaacacccacccttatcaatgatcatgtaatatcatgttgtcgttttcttttttctttttttctttttttgatttaacgtcgttttcttttatagttgtacgttaatacatagttgaaaaaaattattaactctctctttctctctcttttctccaaccactcagtttctttctctctctctctc

SEQ ID NO: 215210 - DNA, 709 bp, Cannabis indica
ttcatttgttatgtaaatcatctattttcagatattttctataaacattttcatttcataagagaagttgtaagattttaagaacatgtatcatgaccaaaccctaggctatgacacaattgtaatatctataatttgagtggtcaaatgcaacactttgattcttgttggaaaataatacttacaaataatcctttaatttacattacaaaattatagaaaaaacatatttaaaattatgaaataattgctataataaataaaaaatagtagtaataaataggaccactcattaatatatataaaacaataatatctctacaattatgtagttaccaaatgattatatttaataattagtaaaatacaaaaaaaaaaataaccaagcatccattacattcttcatccctaattgttcaaagctatttaaatgatccagagaattcattaataattagagacataaccactctttaaaggaatagttaatttataataaagatagaactaaattaatcacataattttccatcagtgatcctctctcattcacatgtaccaaactgagttcttggaaggaaaaatatagggagtgaacttgtgaagcccatatagaaaaacaactaatatcaaaagaccagtagtttcataaacccatgcatggttaataccttaaaaacaaaacatttcatcatcatcaagtataaac

SEQ ID NO: 215211 - DNA, 512 bp, Cannabis indica
ttatagctctttctcgtaggtttaaattttgactctcttctctaaaaaaataagttaattaagatttttgtctcttaaatttagatatatattaaattatgtttcttgaattttttttggccattaaaaattctctttcaattatttttgttaaatttaataatttttgtctaattgcattcaattttactaatttggtaattgtttatgtactaaatcatgctccttagacattaatatctactaaattatgtctctcgaattttgacatgtaccgatttctatagtttaagggagatgtttaacgatcttaaaaatttcaaaaatataatttggtgcatattaaaatttgggggtaaaaattttatttagccaaaataatgttagacatatgaggtgatgatttaagagttctttgtttttttattttaaatttacatagattattacgataagagagagagagtctcaatattttcacaaaatataataagagaaagagaatcatggca

SEQ ID NO: 215212 - DNA, 546 bp, Cannabis indica
ctaattgagcttgatctaactctgccttagatacagtaaccatttctcctttctcccccaatcctttatcaaactcatctgaactatttcttggtttggtgatgcagattgtgtcaactccagctacgtactctgaacaaaattcaacaacctcttctgatatataacactcaaccatactagcttccggtcgatgatggttacgcacatagcttttgagcactttcatattcctttcaaatggatacatccatcttgcccaaactggcccacacaatttcgcttctctcactaaatgaaccataaaaggtaccatgatgtcaaagaatgatggtggaaaatacctttcaaggctccataaagtcttgactatatcctcatgtaatgcatccaacttgctcatatctaattccttcccgcatagttgattgaagaaaatacaaacatgagtcaaacactctcgaacctttttgggtaagactgatctgatggcgattggaagaaaatgttgccttaatgcattacaatcgtgtgatttcataccca

SEQ ID NO: 215213 - DNA, 533 bp, Cannabis indica
caagattcaaacagttttatttggcttaccatagaagtgatataaaggattttcttattcaggcattgcaaaacatttctaaacaggatttcccaattttcattgcatttgtttggtagatttggaattctagaaacttaattctctttaacaaatctggtgctcctaacaatgtggaagagtttgttgttaattatttacaagattatagtgctgctcagtgtaactaccaaggtgataatctggattcagaggctgcacacatccctcgtgcttctcagcatcaacaccctcttcccctgtcaccggaaactccttctctttttgttgatgcagcccttgaccaaaagaatggtataactggaactggtttcatcttcaagcttggcttccaggctgtgttagcttctcactaccatcagttgcctggcgctgtgtctcccatttttgctgaaggccaagcgcttttgcagagtctcaagtggtgcatcgactcacaatttttcccacagatagtcttctcggattgtctg

SEQ ID NO: 215214 - DNA, 881 bp, Cannabis indica
tttaatataaagttatttgtttagtggaaattcatctctaaatgaattgtctatgtttttattccgagatgctccactactaaaaaaataaagttaaattgtaacataacataaaatcataagataggaatagaaatataatctttgaacattaaagtggattattattctattaacaaaaaatggtaatatatatatagaatacatagaagtaatatatatgctcataagcttaatcaagtgataatggtcttccataattgagacatgacccgagtccctcacacaaagtcattatataaaaatgatattataaagagtaatttgtggtatgaatatttaaatctaatttcaattacaattacagatatatatttaagttttattttgaaaagtaataatatttaaataatatttttttagaacttttgtaggtatttggctattatgagtcaagttaatagctatatagtccctgatttttttttagatcatttaatttttatttttatctaaaaattaatttaaatatactaataaaaaatgacacgtagataataacttcacaatgatgagaagttctaaaaatataacttttaagtattattaccgtaaaaatttaagaatttatttaaaaaaaaattaaatttaaatatttacgtcacaaattatacatatacttttttctgtaagtttatttatagtctataaaaatgtagtgaaaattacatctagtattattatttttttacaaaaaagttatacacttttttatttttgatagatgtatggtagatacttagggtatatgtaaaatcttatacaaaattttaaataaaattctgaataaatgtgatttttttccttcaaccatagcctat

SEQ ID NO: 215215 - DNA, 1313 bp, Cannabis indica
ataatcatctttattcatagatatataatattgctgaaaattgatattatgtcattaaattaaatatgtgtagtgtaaaattgagtttattgatctaattgattattgcactccagtatacaaagttaaccaagcttattaatataatcaaatgaaattaagaaacaaagaattattactatggcaatctttgtaactttttggtcctcatattcctcttctcttgtggaatggaattgcctatgggatttgttcctgaatgtacttcatgcaatctttttctgctcggtactatttcaccttcatcctgcaaagaacatcatcaaagataaacaaaaaattagttcatttagatatatatatcatgtatggatgaatatattagtgtaaatatataggatataaataaatgagatacttaccatgactttgagctgaccctttacaaattcaggtctagttttgtgaattttctcaacattccctaagaatatgcatatgaactttcattagccttgaaatttcaaatagagacagagatagagagaattaaagtacctatacctttgtgttgtagagcagtagccatactggagtggggaaatagaagtgagagtagaaagaatgagaggagaatattgagtaaagttacaagttcatagtgtctcattagtgagggaagaagattgaggattaagttttggtcaaagatataagtgttgatgggaattttaaaagagaggaaatggtaacgtggaaaggcaaattaaaaatgaaattcaatagtaatgactttgctagtgggagaaaagaaaaaactttggcataagagcccttgacaagacataaaatggggaagactagcgtattaattgttaccatatattaaaatagtctctcctagtacacaagtttatttgtattaaataaataaagttatatatcttattggctattttaatggatgaagtcatctgcaacgattttggaagttggcgtagaagcatgcatgcttcttcattcaacacaagccaagtcttttttcttgcttcgtattgtgctttgtttatgaagtaacaacaagtaaccttttatataatttaggcaagttactcttaaatataatacttaatgaattgcataccagtaatacagaaaagctggcaaatgtagaatagtatgatccaaatattattacaaatttggaaagaaataaatcattcttgagttaaggtcgttttattaagttgaattccattgtctctttacaagcttaacattatagtttacttattggtcacgtcataataaaa

SEQ ID NO: 215216 - DNA, 1083 bp, Cannabis indica
atgtggtgtaattatcccttattacaaaaataaagttgtttgtactgaatttaaaatatttttacgggttttaaaattttatttttataaaatacaatactttaatgtattttttatattgtactcttattattttgctgtctaattttttgttatttgtatattattttcgattattgtgatgtattttatattaccttcgtatgattttttgttatttattgtatttttataaaatacggtaaaaatataaaagaaaactttgaatgtaagtgtaattttttttaccaaaaataataatttatgtaatttttttagaatttttcctaaaaaaattacacatcattatttttggcaaaattataatattttttacacattttaaaataagttcaaaagattaatagtccataaataaaaataatatttaaaattttgtaaaaaaatgtattttttcactttttaaaggtatttatgaaaatatccagataagtaaaaatggcctatgcaggtttcgaacctgcgaccttcgcgttattagcacgacgctctaaccaactgagctaataggccatttgattatcgactgctcatattttgttaaaacaaattgtttcatttaaatttttctattttctgctttcaaaaaaaacaattctgtttccaattttgaaaaattgaatcgaaaatttatagaccgtaaaaaatatttgaaattataaaaactgaatttttgcaattttttttgaccttttagggtatttatgaaaacatgaacaaaaaaaaaaaaaaaaaagaataataaatggcccatgcaggtctcgaacctgcgaccttcgcgttattagcacgacgctctaaccagctgagctaataggccgaatgtttaataggtactcaaatatagtaaatataggtttgtactttataaatattatttacgaaataagtaacaaaaatgggaaatttgaactcacttgtacaaactacaaaacatttgacattttcataaacgaattttattttatttatttttagatttttagttagccctcaaaaatataaacccctagtatcaattgc

SEQ ID NO: 215217 - DNA, 751 bp, Cannabis indica
tcttaatgcgtctaaaaatgaaatttaaataagtctaaataattggaggaaatggctgattgaatttgaaacataatggtgttgtattctatacagagcaggtttgattgagcaatggaattactcatgatgttcattctgatatcttttatggtaatgtaatgtaactcatgtgttctgttttacttcctttttgatttctgctttggccctagatgttagaagttgcagatgtatgaatgaatgcctataggagtttgcagatttgctatatgtcattgattgtggtctattttagtttgtttctgtatttgtactggtgtaggcagtaagaacttgaaagaagatgttgttagtgggtctaatgatgctttagttggtgaaagttttggagaatagtagagttgatttagaatctaaaccgttactttcagtggaaacttcaaattttctgagttttggattaagagctcaacttgaaccatttaggatgataatggatgaaatgtccacatggtaggagaaatgtgcagctgttaggttgtctagtaaaatgtggaagttgaacaaataagctttcgttccttccaagttttgacttcttcttttgagaatagatatccctttgttgcttatttttcttgcacattcattcattctctttgtgatgatcttaggtgcatgagtggtttgaccagatgatcaagaagctgatgagtggagagctaggaaaaatggccaaggatttttc

SEQ ID NO: 215218 - DNA, 571 bp, Cannabis indica
gtttgagccgagcggaggagactctgatggtgttcggtataagaactgatttcccaatggcggaccagactgttgttgctgctgaggaaaagattggggttgctgctgcaaaaaattttcaaattgctgctgtgacaaactttggaattgttgttgcgaagacggctgttgtggttgaggaggttgttgttgctgttccggaggagcggcataactctgagaagacgaaccaccaggcgactgcgactgactatacgtttgaataaaattctcaaagcgtgggttaaatatatgagcacgttgttcaggcgtcaaattaccccccaagtaggcgacgcatagctgagaatatatctgccacagtgctcatcatttctagagttggttggggagggcaccgtcgattgtagtttgtagggagttggttttcgttttcctttgtcccttcgtagccttttaccctaccgcctctttgtatagtcagatctttgggccgtagaaatgtttcctaaaacgtaaaactagataaccagtatcagattcagattcagtaccacgtatcgctctggga

SEQ ID NO: 215219 - DNA, 508 bp, Cannabis indica
atatatgagtttattggggaaaaacctagaggaaatcaagtcaacctctccatcaactctccttctctctctcgaattctctagaggaccaactagggttcaattcttcaacttctttgtgatattccagtaggttttgaacactacaattcaaggtaattttctttggctttatcctttatgacttttccaagcttaagttaggtttaatggtaaattttaattctaagctgttgtgttgtaaattaaagtttaatttggtgttctggagtgtatttgagatgatttgtgttagtttttgttggtttatttggatgtaagaatgttttgacaaggtttgagttgaggaactcaaaccttgacgtctaatggtgtctttggattttgagtaaattgttgagttcttttggttggtttgggtctatttgagtgtttgcaggtatcctggaagttttttagaaagtttggggttgaattgatttaaagggatcgatttttgggttcccag

SEQ ID NO: 215220 - DNA, 589 bp, Cannabis indica
cacatctaacaagtgatttgtgtgaaactctcattgttgatattctaatagtctttaaattcgctcctacaaggctaaaaattatccttattatgaaatctatatttgtgtttatgaatgacagttaggtagatgatttatttgattaagaaaataatattttttaattaaataattaaatattactatagttattaaaaattaattattaaaacaaaaataaaaaatttaattaaacattcaaatttgttatattattacatattaagattaattaatttatgcatgttcacactacaataatataataacaaatgaattaaaacagcacattatttttgtattttaagttaatccaaaacatagactaaagaatggccttaagtaggggagtgtacaaagaagagatgatagggaaagaaatacatcaaaagcttaggtcatttcttgtaccaaatgtagtttagcactttattatcatttttttttttatttttttaatagatataagactaattaggatttttgttcccttaattttgacacgccaaatcatattcctgaacttttttactgttaattttttttt

SEQ ID NO: 215221 - DNA, 800 bp, Cannabis indica
ttgtggtttcttagcaaaaaaaatgttaaagtggaaaaaataatttgttaaagaaacttttagtcactaggttaatgttacatgcattatgtgcatacttagttatattcttagtttttattttggctatgtgtatttttagttgtataattaattgtatattatttattgtttctcttgattcaatcactatttctatataatgttatacattatttattatattatatataaatattctttggtagttaatgatattttgtgtctcctacgttaattgagtatattttttgcttcctaaccttttttttctttttcttttggtagttgagtgcattttgtgcctcttaaattcttgatatagttgagtgtatttttgcctcctattacatatcttctctagtaatggcggcataagtaccctaaattttatgtttgtaagcgacataaaccctatatttattattattattattattattattattattattagttgatagcattttctgcctcctaactttgataattatctactattgttattgtcatttttttaattattgtatttagttagttataattttatttacttttctcaagaaaatacttgaaaaaaaattaaaaaaacaaaacttattctttcaacataagcaatttttgcttaaaggaaatttggtaaagttctcatctacacttaatagttaatcccaaagagttgttattaagttgtgagtaagtggaatcaaataggcctgggaacaagttaaacaaaaaaaattaattttttttaaaaaaaa

SEQ ID NO: 215222 - DNA, 1399 bp, Cannabis indica
attccaataatgtcagcagtgttttgacaggcatataagacaagagttaccatgcatttgagtcagagtcaactggagcccgtcttctagtttcgaggaaacagcctcaattgatcccgtcttctagtttcgaggaaacagcctcaattgatattattttttttaagattattgttatgggaaagtaatatgataatatgatttgtttttataactatatagttgttttttcgttgttggtttttatattactgtcacgtgagagaaatatttttttgttaaaaaaacatatgaaaattagtaaaaaaaaatcgtaaaaatatatataaaaaaaataaaaaatctgtaaaaaaactaagaaaaaaaaatctgtaaaattatatacataaaaaaatttatttattttaaagtgtgttgtgtaaatgtactttcttaatattgatatgacaaagtagaaaaatgtacatattgttggaatttaattggttagaaagaaaattttactaataggtagtaatacatcagattatttggcagttggcatcttgtgaaagtgatctaaatgagatttgctagagcttaactatcgaccaccatttgcgttaattttggttagatactttatttggttaagtgtttgtctataaagttatttaaaagctttattttctagcttttcattggtgatttctttctcatagtaatcggagtttatggattactctaatcaaatttgtggcctcttaatgttgatgtatgccatgcaaactacaaagctctcaaatcgtatggtttccaagattgatggcatggtccgcgatttcttgtgggactttgaaaaaggtaattgcagagttcatctgaaagcttgggataagctttgcttgcccaaatcccgtggtgggctagggttccggaaaactagaaagatgaatcaggcttttttggccaaatggggttgaaacttattgacaggaaaccagtcgctttgctgccgcatcttggaagctaagtacttaaaaggcaaagaatccctcaactgtgactataagagttcagactcttggttttggaagaatgtgatcaaagctaagaccattttaagaaaagttgcttgcaaactagtcgttgatggtaaagacacgaacatctggaaggatccttgggtctgtcatggcaaaactttcatcccatcccccacttaataccaatgctccccatgttcttaaggggtggctgaacttttgactgtaagtggggaatgggatatccagaagatttcgttccttttcgtacaaagatacggttaatgcaatcttaaaaggtagggcgaccttccggtcagggccatgataagtggatctggtacgactagagaagcacgggaggtttacttgtc

SEQ ID NO: 215223 - DNA, 627 bp, Cannabis indica
tttacaaaaataaaataaaatatacatattaataaaaatattatctagatcaattaaaaaaaaatacatatagatactactaaaaaaatacatatttggttgatgttctttcatactttcatgaatgttcttcaaatttttttttttaacaaaaaggataaaatttttagtaaaagcaattataaagtaagaatggttatcacatatatattgacagattttttaaagggcttttttcataaatatacaacaaaaacaatataattataaaaaatgtgcaaaaaaaattattttaaaaacttatatattttgaaaacttattacataaaaccatacattttaatcattaaataataaactatgtttattaaaactcaaaataaacaatctcataaaattaattaaacagttttataaaataaacaagttaaattttttttatttaaaagataagtttattatctattttagtatgaattattataatttaataagatttttttaataaaatacaatatcaaaattataaacattaatgtatataattagaaatcaatacttaaaattaataaaataaacatgacacatagagtaatataataaacatatctgaatattattattttg

SEQ ID NO: 215224 - DNA, 537 bp, Cannabis indica
cctttttctttttaactattttcgcagcttcaaaaggcttcttgctattattccacttcttcttgttcttgggattggaagtagaggcaaagtttgcctcagccttagccaccacattaccattcccaaaattatgagctttagatcctcctttcactggtcctccaatcaaattttcaaatggctaaagatcgtttaccaactcgtgaaagtctggttccttcttgttcatgacataatttgaagtataaggtagaaaggctggagtcaaactgttcaagatcagactcacttgagttgtctgatccataatagctccatgattctgagcttcctggaagtaactcgccatttggagaaggtgatcacgcacgttctgatgaggtttcatccgtctattgatgaaattccttatcgcttcaaagcgagattaaattgatgccatcccgaatagttcagttaactagttcatgatttctgtagctgtgtcagtgttagcgaaccttgttttaaagttgtcaaccatgctagaaagca

SEQ ID NO: 215225 - DNA, 691 bp, Cannabis indica
aaataaaaaagataaagtaatttagagattttaataagtatttcttatatatatatatatatataaattatttatatttttgatcgttatgaacatgatgatttataataaaacaacaatcaattatttcttggaaaatttatttgcacccataagtacacactaatataattaaaaaaaaacaaataactaaattacattgtcaattataattacaaataataataaaattacataatagaacaacctatgaaaattcaatacatatacactcaaggtaaagacataaaaggataaaaaaatcattaataaatactcaaattacacatttagattgtcaaatacccaaaccatgaagatgattcttttttttttcaaaaaatctcatagtctaaccaccatctctcagagccattgtcgaaaaaaggattgttgcaatccatcctcttcttgaccaatttatcttcatcgttgtttgtcgctgcatctctttgaccgtcatcactaaatcataaattttgagaaagaaaaaatatattgagtatggagaagaaaaataatatgtattgatagaatatttaaaattaataataaaaaaaagtatattgaatatacatcacattaggattactcttatatatatatagatttaggtttaataaaaatattatagggtagttctacaatggac

SEQ ID NO: 215226 - DNA, 655 bp, Cannabis indica
catgtactactagtgggaaatgacaatttttatttgatttcttattcttttgtgttgttttgaaagtgaattaattactaattagtacaatatatcaagttattatagtatttagtcaaggcatgtagactattttctatgttgttctcttattatttagtgtttaaattatggcttttctttgttttttttattaaatgggaattgggaatacttaattcccaggtcttgcctaaaagctttttcactaaattagtttacaatttggagctaaagtaaaagcctcttggaaagtgtatgtatgtagctacacttctgtacacagtccatatgttttttgggattgagacttgagaaaggctgatgatcctaatgcataataatgcagtggggtttttggaggcagcagctattttttaagctgacccgtttgtgcaaaaaaagtctggtttaaagtgaaaaataagaagaaaaaagaaaaaagtagataattattgatgtcatggtccatttagtcgtcgtatgtttagtcaacagcagcagtgcttatctgaagacctttacaatattaactaagtaattagctttaacaataatcaaggctgaaaaaacaagaccattatcaggtttttctacttgacaaagcagtgcgttt

SEQ ID NO: 215227 - DNA, 701 bp, Cannabis indica
atcatcgtcgatgactgggcattactagccttattaacaactgatttatgatccatttttgaagttttttttggcgatgaagatggagaagcagaagatggtatattagaaaaaactgatataggagacagttggaagaagaagatggcaaaggttatggctgggaggtagttttgtgagttttgaacgtggatttcaaaagggtattggctggaagatggtatgtgtaagtgatattttggtaaataaaagttcattaaagataaaattatttctcaccccttatagatgtatttttgtaaataaagtgtcaatttgtatttttcatgtaataattccataattaaacatattattttatttgcattaaatatttaatatgtttattgctcatgttagatgatggataaatatattaatatatccaacaaatttgttttaaaaaatatagttagttaaaaaatgtgtaagcatgtatattttatctgaaaggaaaagataatacagacaaatttttaaattaaatagaaaaatatattatttcaatacaaaataaggaatgtacataattaacttactataaatatagactccaacaataaaaataaaaaaataattaaaatttgtacataaaataaaatattaatatgtagtattattatagtaatattaaatattattgtaatagaaaatataattat

SEQ ID NO: 215228 - DNA, 733 bp, Cannabis indica
cttgttctttttttggagaccaagaaattagattactctcaagagagataacatagccaccagtcagtagagctagcccaacattttagtgggggcaaaaaaaaattttgaagcattaatgaaaaaataatttttaataaaaaaaatacaaattctatgagaataaaataaatatatgtaaaaataaaagtgaaaaatataaatattatgagaataaatataaaaatatttaaggacaaagatgaaaaaaatatattttttagggtcaaaatataaaatacctaaaaaattatatacaaaatttatatgaataaaaaattgaggaggggcaaatgaccccacatgccccccttctctctgcctctgccaccagtcgactttctattatcaacacaaaatgcccagttagcaacaaagtacccattccgaaaggtagatattacatgagagaaatagagaccattagttcctttgagatatctcaataaccgtttacatttcccaataaattaaggtaggagcatgaataaactagttcaacttgtttataataaaagtcacatcaagcctggtgagagtaagatattgtaatgctcccatggtacttctatgaagagtcttatcttcaaatggttctctttcatgtaaagacaattttgttgctaagctagttggatttgggaaattcttagccccttccatgttcaattttacaagaagatttgtaacgtac

SEQ ID NO: 215229 - DNA, 730 bp, Cannabis indica
aaagaaaaaaaaaaaaaaaaggggccagggttggcggcgatgagagtggcagagacgagattactctgctaatggtttttttattttttttttaatttttttctaagaatgagaaatggtgaaactgaaacctaggttttattattgggcctgtattgggcttcttttttttttttaaggattaattcagaaagggaaatttacaaaaatactgtaatttgggttatttttttacaaaaatactgtcacacggaaattttttcaaaaatattgtgtttttataaaacaccagtaaaacacaaagcagaacaactcaaaacaacagtagaacaactacaaaacaccagtgaaaacttaacacagtatctgcagtatgaaacttataaaaaaacacagtaaaaaagtaaaaaataccgtctgacagtatttttgtaaaaaattagcaaaagttagaataccatgtaaattttacattcagaaatatacaaaaacaacccaaaaaaaattacaaaaatacagctgtacgaaattttaggagttgattagtttgtgattcaaaaattgtattttttaaaaatgtatttttggaaacaaaaatttaaattttataagtgaaaaattatttctaaataggtgattggttgtagtgtgatttaatatttttgagttttaaaaaattaaaaatgtagttggttgagaatctcaaaataaaaagtaagaaaataattgg

SEQ ID NO: 215230 - DNA, 742 bp, Cannabis indica
aagttcccaccttttggcggttggattgccaacatttgccggcaaatttaaggtactttgccagcacaagttactattaccgacaagaaatggcgccgacaaaagagagaactggattaattttggtgactcctattgctggcgcatttgttgacttgcgtcggtaattgtatactttattatgccagtaaaagtgtacattcttgtagtgacattaacatagtactcttagaaattaaaaaatatatataaaaaaaacttatagaaagccacctatagaattttatgtgttttttttatattaatatatagatatagatataactttgtggcatatatttatttatatatatatattaaaaaaaaataatatatgtacatagtttatatgtaaaatatatttggtctttacatcttttattatttaataatacacttatatgcattaaataaaagaaaattataatttattggagaaaattcagattaaagaaacaccaaattgatttgtttggtgttacaacacaccttgttatttttcaataactttatttgttttggtgagtattttagacatgttgtgtaggcttgttagcttttttggttaaggaaattttttttcttaacaaaaaataaatatttattcaaattgagcattaacaataattaaaactaataactaattcttttacctcaaaaaaaaaaaaattaataactaatttttttaaactatatatagtat

SEQ ID NO: 215231 - DNA, 801 bp, Cannabis indica
gaacactaatgtattgcatctggtattttttttattgttaaaattataaattatattatttagatatacataataataatctcacataataactaataatattttttctttaatttttaattgtataatttttaaataaagtaaataatacttagcataaattttagtatacgtgcctcgcacgtaactttttgctagtacattgtatatgtacatatgtatttatatatattatatacttagggtcggtcaccatggccaccatcgggccagggattctagggacccaccacgaccacggtggtcatggaaggccactaataaagtagtcgaaagcgggtcatgcaagtcaagacctgtttgagtcttcttctcacgcaaaataggtcaaagactctagacccgatcgggtccaatacgtgtgcacaaccagggcatcaatcaaatggacgtctaacgtccttagcatgctttgcatgcaatgtgaggaacgaacatccaacgtcctaacatcgatggtggttggaccatgaacggtccttgtgaatggagaacgaaatgggattgtgatttccatggtttatcgtctccatggtccttttcatctcatgcttacgtctattgtatagtgaaaccagttggacccaaagagtccaggtttcatttgattgttcacgacgacaatggagatgacaggtaatgaatttgaattccgagactgacccgtcaatttccgtatgcgatcaagatcattggagagggcacgaaacccaaggtagtggctggttgacttcgtgcatg

SEQ ID NO: 215232 - DNA, 646 bp, Cannabis indica
ggccaaacattagattatgttggaatttatctaccagaacctgtattttcacatggacaactatatgttgctttatcaagagcaaagtcatctaatcttgtaaaaattcttatccgacctgacttagcaaatccaagcgattataggcatactcaaaatattgtatatcatgaaatactatctttaattttataagttgcatatctatctctcaataatttcttcagttatggtatcttctattttctttttactttagttcatttatttgttatttcatagttttatttagtctttcattctaattttcttttcttctcattgtagatatgattgtaagtgactaactcaagacttcaatgacaaatatcaagaaaatatcaaacatttaggtatcaattacatctgtatatacaaaagtctataaacaaatactgtattttttcggcctttttttggctttttatttctatctaacattttgacagttattatttttattccatcaccttagatcataatttacttttcttaagtgaggacaatattccaagttgggaatcctcctctcctaatgtctcaagttattcttctgcctccattcataatatgttgttgaatctattttaataatcttgttatattc

SEQ ID NO: 215233 - DNA, 524 bp, Cannabis indica
ggatagttgtaatatcctgaaaagtataataatacttaattgcacaaatttgattaaatattgataaactgattttggagtgagattataatcttacttgagctaaatgtgtaataattagtgtgaattgaataaatgattagataaaacgtaatttattaattacagaaagtttatcaaattgcgtgggtatattagataccatttgtgaaataaaatattttcaggtttgtcggctttggagactcaacagagtggtcggaaatgtcactgcaattaagttgtgttgtattggaattatatcggactaggttaaatgttgagtaggttgaaccagaaaagttaggaaatgactgaaatacccctaggttatattatagtttaagttttaagggaggggtagaatagtcattttataagattgaactttttatcttctagtgttttatttaggttgagattttagaatatattaagtgtatatatgatgagtataatatgaggagataaagattgataattca

SEQ ID NO: 215234 - DNA, 695 bp, Cannabis indica
cacggggcgactcaacccaaacactatatttataaaaaataccaccaataacatttttcttttttacgatgagtagcactttgatgaaagaaagctgagtttttgtcacacaatttcaaccaagagttcttagcacgagagaaccaatacttctcatctttataaagcaggacatcaagctcattttccattttcttataagacaaccaattgctatcatttaagttagagtccatcacctctagctccttcttcttcttgcgaataccctcatgtgtcctcttaaaaaaccataccattccaatcattaagagtccccgaaacgcacttaatcttctattgcacaccaccaatattagtcaactcagatggcccccaatgtttagcaataatttcccagcaaccagaatcatttgcccaagccatttcaaagtgaaaccggcatttttgcttagggcgtttcctagattcacaagcacggaggatgcgagtcaagaggggcctatgatccaacccccaaagcttcaggtgcgagacataggaattcggaaacaatgagtgccagccactagaacaaaccatgcgatctagacgttcttacaaaaatgagccactcgtatgcttattacaccacgtgaaatgagctccttcataacccatgtcaacaagaccgcattttgccaatgcattacgaa

SEQ ID NO: 215235 - DNA, 743 bp, Cannabis indica
ttagatgttaaattcatagacctttcaagtgtaagtagaaaagaaaaaaaaaacccaatctttgatgaattgaaaggatcaagtttttgagaaattttgactcttgcaggttcattatcttagtgggccaatcagaatagtggacaaagatgggataccggccaagccaggggatcttctagtggttgaaatatgcaacttgggtccactcccaggagatgaatgggggttcacagctacctttgatagagaaaatggaggtggttttcttactgatcattttcctgctgcaaccaaagctatttggtattttgaaggaatttatgcttactctcctcacataccaggtgacattctcaacatgtttcatcttctcttttttgactcttaattaatgaatttgactcagaacacaaccatttattataatggtgtcattgataggagtaagatttccgggtttgactcacccgggaatagttggaacagctccatcaatggaacttcttaatatttggaatgaaagggaaagacagcttgttgagaatggagttgagtctttgaaactttgtgaagttgtgcatcaacggccaatggctagcttaccaacaccaaaaggttgtgttctaggaaaggtatgaccttgtgaagctactatttctatcatactctcaattttaacaccaagtagcaactatgtagcttctacaatctaaaaaatctaacacagctttcttgcatat

SEQ ID NO: 215236 - DNA, 777 bp, Cannabis indica
ttgcgagggaatgcacttcatcagcaaagaaaagactaacaacaaagcatagctaatgtgaatgtcgaaagaataaataaagactatcaagatttaactctttcttaattttgactatttacttatttatcgagaataattgtatttgagtatgttatgttttaatgtttagagttattctttcacatcaaaacacgtatttttcttcaaaaataaaaatagaaattactttaaggagttttttgttattgagaattcaaaggagttgttctcatgtaattacaatgttttaaattattattttaattgtatgaataatttttttgtattatattttaagaacattttaaagaataaccgagcgaagagcgggtatgttacctagtctatatctatatctatatatatatataattttgttgttatgcatgatgatgtggccatctctataagctttgtttcactttttctattttcttaatttttcttattatttttaatttttcataatgacaatagaaggtgaaaagacactaaaaatttctagcatctattcaaaaaattattaataataggtaacatataaaataaattacaattacaattacaattcaagtatataataaatgataattataaatcatatattatatatgaatgttcatgagaactttgatattccaccttagctatttaaaagtcatttatactaatttaagccattgaagaggtgccattattcaaaaggttccgattgaatccgtctttaaatttttt

SEQ ID NO: 215237 - DNA, 583 bp, Cannabis indica
gtctcatggctaagttctggtggcaaacggactccgttcgtagaacgggtgttagttggatgagttgggattgattgagtcgtcaaaaacatgtttgaggtttgggtttttgaagtctgcgggactttaatatggccctggggaaacaatgctggaggttgttggttaatgatacgtccttggtgagtaaagttttaaagctaaatactatgctaacgaaactcttctttcagctgaattaggggatggttcgagtttcgtatggtgaagtatttttaaagcaaaaggactgatacaggttggggtagttcgtacgataggcacgggtgaacatacttcaattttatgtgactcttggcttccacacaacacgaatagctaagttattttttcacatcctgcacttgttaatcagactgtaagcagccttttcaaaatgaattctcgagagtgagatgaagaggtaattaaggatctttttgatgatagagatcaagagctgattttttctatacaattgagttctactgtaatatccgactattggagctagcagtttgaacgattgggccactactcggtt

SEQ ID NO: 215238 - DNA, 696 bp, Cannabis indica
aaatggttgtgattaatttggaaattaaataaaataaaaaaaaatgacctgtaacctgatattaacctgttaatttatttccttttaaaactttaattaaaattaattatattttaaaattaaattaagtataattattaattaatttgttgcaatttattattaaataaggatcttttagcaatttatttttttacacttaaattattttaatttttacaacaaaactcttaataatttaaaattatacacatataacttcataattaaaattttattatacttataatattttaatttaaaatgattacattttttttttttgtaaaacataaaatgattacagtttattgtatagagatgtcaacattgtacatcatcaatattgtacttcttttcacattatgttcaacgttccttactctttcattccctaaatattgctctcgaacccgtcaaacccctgcgcctccatcttctccgatctcactccctctacctctctctctctctgccattttggctttcttctgtttattgtataaatagaagtgattaattttcaatttcaaaaggtgatgtattgaacttgtgttctttacaaaaaaaaaaaaggtgatgcattgcttaggagactcatcaccatatcttaccatacactcctcatattctcctttctccaccacactttcacat

SEQ ID NO: 215239 - DNA, 327 bp, Cannabis indica
aactaatttattaaacatattttgtatttgtaaaacatttgaaacatatatgcatgtgtatgcagtgtcttttaatattttaaaatgtaaaaagtgatgtggaaagaattgaacccataatctcaccatcaatagaatgtatttatgctataagattttgatgcaattaattgaattaaatatttatatattataagtttccatatatatatatattaattttaatttttttaaagccttaaaaattatggggctgagacctacacggctgtcggctgcccactcttttggccggccctcgtaagattatatattagaagaaataca

SEQ ID NO: 215240 - DNA, 527 bp, Cannabis indica
ccgtttgaggcagagcttgcggcgatacacttgggctgctacagaattcttggccgagggtgaccattttgtttgactgcaaggcggcggtgcaggggctttcttctggccagtcgccgaagtggagggctagaaggcttttcgatgacacctatctccttcttagccagctggcgagccaccgtctgtgctggatttcccggagttggaactcgagtgctcaccacttagcagcctgggctgcctctgcctgttgttttaggcagttttcttcaaggtaagtggcaccctttgttgccactatgaactttggcctttaggcctttttggttttaaataaagtttctgttatcaaaaaaaaaaaaagatgaatagacactcaaaataaaaatatagataaaaatagataaattttagaaaaaccataaaatagaaaaatgacaatactaaaatgatagaatgccatgtcacataccccaacaacacaattatatagatatatagatagatagatagattacagttaa

SEQ ID NO: 215241 - DNA, 879 bp, Cannabis indica
tttttttttctttcttttgttagtccatcctttgttacagctgctgctactttttcatgcattgatgtttcaccacttatgagacattagttaaaccaatcttcctatcttgccacaaatattctaatttgacagactataataaaaactcatttttattgtgttgagtttttggtagttgctagttggtatgtttgtattagtgggattaatagggtgaaacaaattcaatcgacttgtttgatactacttagatttgtggtgtagcctgtaaaatttcatctttgaatttaaagctaaatctttgtgatttctgtttgtgtaacgtggtcaaatatttacgagtaacgtcctcttctgcccatgtttgctcactggttgtcttttacaacaatattaatttcttggaaaattgccactagtagagtttcattgcttaatggtccccttcatcacactacacaaaatattcaaatttagattatgacatttcaaaattggtaattttctgatgcctttgattcgcttagtcattttgactaattcataaagagtagtggacgactttggttcgtttagtcatgcaagtacaatagtcaagtggtagtattgggaaaaaaacagtacaaaaaaaaaaaaaaaaattactaaaatactttgggttggccatttaaataattatacagctcttaaaaaatatttacaaaaataccatctcctttaaaccttcagccgcacgcaacaaaaatatctacaactgaaattacgcactgattttcgattttattcgatcaaaacaactcttcctaatatcaaaattcaaattcatataatgtaccaatccaaaatcaggtataatgtgaaaaatttaaaaaaaaa

SEQ ID NO: 215242 - DNA, 556 bp, Cannabis indica
caagtctatcatcaatatacgtttcaattcctccgtctttgagtcctttatatagatgacttacaaaatttgcgcgagtgtcttctcctctaaaactgatgaaaacgtcgtatttattctgcgaacatgcgacgggggcacatggcttatcatgatcatcaacatccatactctatcttctatgaaatattgtaatgaatatactcagctttgaagaaagatcaagatttatatatatatatatatatatatatatattcatatatcttgatatattcctgttttcgtttgagacatgttctttgtgagaaactagacataatatataataaaaataatataatatattttttttatggctaaaaattaatatttagacagctcaaaagaaaattaacattttgttttaatagaaagaaagaataataatacaagtatttattattattataaaattataattttgtgattaatatatgttgtaactattttttgttagtaaagaaaaaaccaattgataatatttatataaatgacaataattgatgagtccatt

SEQ ID NO: 215243 - DNA, 608 bp, Cannabis indica
atgtgtggttagttgagtagtaataaaagccaatgcatatgagttggatgtgttccccctcttcttcttgtttggtacttataataatttctatacaaatatatgcatttctcaatttaatttccaactattgttaataaaattagtgttcttaaatgacatcttaatgacactcacataataatacaacatattaatattaaattctatcaataattattgtttgaatctaatgttgaatcgaagagaactaatcaaaagaattaaaataccaagtgatagaaattaataaatatgatttttactattcgaattatattaccactactatatcatgttcttcaaatatttcattttgttaaatattctccataaattatttttattattgaattttggtacttctgttacttttgtccaaggctgacgttgtatttattgtgtaaatgtggctaggatcagctcaagggtagggcaataggggcccacgcccaaggtcccacccaagcttaaaaaatacttaatttatttttaaaaatacattattaaaaataaattacattcaatattttattaagatgcaagatttaattatatttttaaaatac

SEQ ID NO: 215244 - DNA, 920 bp, Cannabis indica
tgaaaatatatatatattgtatataaagttacataacattttttttttacaaactacaaaatctcagggcagccatgaaacacagttcaaaaaaagttgaaagattagaaccctccaggttgcactgccgcgatatgtacaatccttgccaagctcatctcactgctcctccatcttagctttgcccttacctacacaaggtagtaaactgatgagtcgacagacctagtaagatcgatatgcataaattaacagtcttaccaaatgcttaagaatgttctcaacgaaagtacgaccactgtaccatatgcactagagtaccaacttcgtactggtgttgcattggtagggccattattgtacttccaagagttactaagtgttgtaccacatgcacgacgtactctctggtactcgtgttggtaacagtgtaactatcctaaaaccctacactgtactaacacccttaaactacattttcattagtgttagtagtgtaaacaattaatatcatgcatacattcacatatatatactttatgctatcttacctcgtttccgtgtttaggtgtgtcgttcagtctgagtggaactacagctcgacgctttacagggctctaaaccacaatatttgaaatttcgatgagagacacactaaaatatacctatcggggacttaaaatcaaaattaagagcatccttatcgatggataacatggtaataacctaaacatcacaaaaacaggaaaacctagggttccaaaaattgttccaaccggcagactggtttccaactagaagtccggttccctggggaccaactggtcgatcggttgttataggtccccctgaaccggtcgaccggttcagtgttaggaaactctaacttcttaatattctccagaatacctgcatacact

SEQ ID NO: 215245 - DNA, 674 bp, Cannabis indica
tacatagggaagaaggagcccttatcatctttaattacagtaggagtcttaaagcagaatttcatttcatgggataaggcaccacacttaaaacacattttaggcagtctctcatattggtattgtatccataaatccttaattccctttctctcaagtaaaatccggaaaacaggggtttatcaatgtcgaccgtagctctgaatctcacagtgcccatgccaaaagatcctctttcaaaattcttttcaatgtgccttggtagttcatagacagccgaagctttacctgctagttcttgtaggtttgtttgttccagtaaaatgggggtatgctttttagacgaacccagagaggcgtttgatcgaagacaacctccgccggggttagccacgagggccagggcatcagaaccagtaagtgcccacaaaccagccatggccgccgaagtagcacattatcagcatcaaaacttgtttgaaaagtgaactgcaatagtccgtcttctctttccttccaactccacccctccagcgagctccaggcattattcaaagatccctggattgctttccgtcccagtctggaaacacagtacaattttccgagcaagactctgtttggggtctcactatgatcaacttcccccggatgaagatcacacgtaatttcat

SEQ ID NO: 215246 - DNA, 528 bp, Cannabis indica
acatacatgtctatctcaaaacatactatgtctgtctatctccttacctaatatctattttcctcacaccattttaatgtgtgtatgtctacctcctctcatttttttaaatgtctatctccctacaccatatatatatgtctaccgccctacaatatatatgcatatacatatctatcttcctataccatatatctatgtctatctccctacactatatatatgtctatctccttacaccatatatattttatctccgtacaacatatgtatatatatttatttctttacacaacaaaatgtcttatttcttattacttatatatatgtacgcctatctacttctctcatctcgtatttcgagaaagacaaccaaatatttttatttggcctaacatatggcttttataagcaatttatatccagcgtctgtctaactaattagaccaaaaagatgacttactctagttaagagtccctttgaagaactaattgatcacacaaacattactcaactaaggtagccac

SEQ ID NO: 215247 - DNA, 562 bp, Cannabis indica
aaaaagttacttgtaactaaaagttagtatttaaagataagttgtcactaatttagtttagtcacaacaagtattgtgacaatagatttagtcacaataaattgtaatttttatgactaatacatttaactacagactttttagtcacaatataagaatgataatttataatttatcacgacttttttacttttaatcacatgttttattgtggctaaaaataaatttttttatatgaaataaaataatacaaatttagcacagttctttaaatttttcaaaacttctccgtcttaaaaaaagagtaatttgcggcataaatacataagtttaacacttaattgtaaataaatatttaagtttaatttttggcagtaataatacttatattatatttttagaattctataggtacttacttatgttgtattaattttttaaaaataaataaaaattttatgactttcaccaattaaaattatcatgtaacaatttacataataagaattataacttaagtagttatttgcaactgaaaattgttaagtatttatgccaaaag

SEQ ID NO: 215248 - DNA, 640 bp, Cannabis indica
tatatattgggacacgattttgtacgacagccgttacatagagaattatttgaactaagggttgggttaatttatgggtaattagagttaaaaaacaataacgtactttgaaactcatttaatgtactacataatacattccgtaaaaatacgttacagtacaaaattgtgtccctatatcttaagattttatagaagtatacacctagtgtagtggctgtagggacccattgccaaatttcttcctaggtatgatgggcaaatcatgtgcgcgtttatctaattgttggacttttctgcaccattgattcaactttgcaatttctagggtgtacaaaaaacacaaaacatttaccaataaaaaagctttttttttttttttattttatatgtattactaaagtaaaggtaacgatatagctgaatgaataaagttctctcctgcgatatagatatacacactatatatatagccgtaccttcttttcttattatttcttttattcgtttttttggacttacaaactatactcccgtctttatatattctctgcttacgacaatacagttacttactattttcatgtcacttacttcctttttatatatatatatatatactacacactactatttatgt

SEQ ID NO: 215249 - DNA, 1688 bp, Cannabis indica
atataattccgcaaacctacttttatttaagagtgaggacttataattgccaaaaaactaaaagttcaaggagcaatttattaaaaaataaaatttgggggtcaactcgccaagacttatttattgaaaaactaatatgccaaaaatataatttagggatcaacttgtcaaaatctatataattcaaagttctgcataataaataaatcatcttaaataactacaatatacaccatgatatacaaaaataaaaattatatctatttaaatattaaaaatatgaagtgggtacattggtgcatgatagggtgctctatcatcatttattaagtaataaatatgattgaaaaattctacaatgcacccctttaaaatgagtgtatcaatgcactcttatttattttggtatataaaaaaaatacttagtgtaatttttttttatggtcgtatatattatagttatttaagacatcagataaaattttaagaaatttggaaaaatttaacacgtcgaaaacagtgttcaaagagtctgttgcacgcgtgatttttttttattttaaatgcatatgaaatagacagtttaaatattgatttctatattgtaaattattttgaattttttaaaattttgcaagatttcttaaataactataacgtacaagactatgaaaaaatttagactaaaaacttcttatagataccgaaacaggttaggggttgtatcaatacacttattttaatgggatgtattgtagaagcacccaaaagaattccccctccctaaaattatgatacgtgtatggttttgatcactgattttttatttatttatttatttttttgttttgttgtgaaaattccttttgaattgtacaaatcgttaaaaatattcccctctagttatatttttttttttactttttttaaaataatttatttatgtgactataagttacaagtataattatagtacaaagcttatttaataactttaaggtaaataccattttggaccttgtgttttgtaaaagttactaattggaccatatgttttgttaaatgacaaaatagcccctgtattttttaaaattctataaataggaccctgaactgattttttgtcaaaataaaacttaataataatctgatctagaaatgttatgacaaaactcattatattttttttttatatctgttcgtgttagaaattgttttaaaaaataaaattgttaaaaattgagcttagggttctatttttatcattttgaaaagtatatggtctattttgtcatttaacaaaataaaaggtccaattaataacttttataaaacacagggtccaaaataatatttaccctaactttaaactactccaaaaccaacattaaatatataaatattttttgaatggaaaatataaatattagttttaaagttttatataaatattctcataatttataaataaatttttatttacgtatttattttttaattttttaaccgaactacattaacctcatgtctagtcatcaaaaaattatttaataaaacataaaaaaaaaagaatataatagtgccgtttggtagcatttttgttttctaattttttaattcacaaaatgaaagtaaaatttttgtttttaaaaaatttttgtttttgtaaaaataaaaatagcgttctg

SEQ ID NO: 215250 - DNA, 1369 bp, Cannabis indica
  modified_base (1318)..(1318): a, c, t, g, unknown or other
aaagttataaattaaattaaaaaatgctatgtttacttaaataaatttacatttttgataaaaataaaatatactcaagtttgttctcgtaaaatttagtttttataaaaactaaattattaatatattttatattaatatctaaatgaattttctaataaaaaataaataattttttatatcacttaattaggtttaaaattttaatttattttttaattttcttaattattcaaaatattttttttcttaagatttaaattactttttttaagatttactaaaaaaaaatgttgaatctttctcatttttattttgaggggtacaatttgatagttatcaaaatttaggaacaaagttgctaattgataaagacacgtcatcatttaaacgaaataatgggacaaaacttaacagaagaactaaatttctataaatgtaattaaaaattcaaggagaattcttaacaagtcttatattttaggagctaaaatcagtattattgaaagttcaggggcaaaattgctaattattaaaaaaaataaaataaaataattagcagtatattttaaaggatgttatccaaaagtgtgttgctagtttttgtaatttgccttccttaaaattcaagcaaagctaatcttctagttgtaccaacccatctgtcccaaccccatcaggaccgtcatttctcctccctaaagcaacacaaagttgtagaatctgacggctctaattgtattatccatcgatcaaacggttcccgagcgtacagttgtttagaagagtaacatagtatactacacaagtctctactgatggtcttagtaaaaccgagtagacccacatagggagaccgaaccttcttcacatcgatttgttaattcgtgaaaaacccagttggtttcgagaaatacccatctaattgcgacctcaggaaagttcttcttggaatcagatcaatctgggtgtctttccgaaatggagaaagaacagaagggtccaaatgatcaagaaagagtagaagatgaggacacggaagctttggagcttgttctctatcaagtctcggagtgttatgtctatatggtaagatttattggattttcctcaatgggtttttcgagattcgacccaaatgttaatttgataatttgatgaggtttcctcatgattgaacagctataattgcatgcattcgtttagagatcaagattcaagctttttgttgattgtggtactttagtaacaagatgtttttggagattggatcatagggtttcttatgtacttgttgataactgaaatgtgggcaacntttatttgctttgaactactgatatgatatgtcattataaattactataaa

SEQ ID NO: 215251 - DNA, 996 bp, Cannabis indica
tatacagcttatatcccacctgacaaatatacataaataatatgttagatatttttttatgaattatgtaatactaaaatgtattaataattttcaacacttgatcaaaatgtgtcatattatattagagtactcacattagatcctttataataattctctaaaaaaaattaaagaattaaaataaaaacatgtaacattagaagctctaaacttcctctcttttaaaattcactatttatgctatagctctacattaatagaatagtattcattaaaacatatttttatattaggatatgtgtaaatattaatattttatatttaaaatgaataaaatatattaaaaattgaaaagaaaaaaaaaatatagagttttgatgatgtattttaaagaagctaatctatagcgtaatataaaagcttgaggtaaaatagaaaaaataagagttggtgatatattttgaagaatagagtagagaagctcgtgagagtgctcttagtggtggatccaaacttttgatcaccgaagataaatacaaacaaaaaattagaatgagcaaaaattaatttgaaaattaatttacatgaaaaatactaaattgtaacatgtgaaaaggtataattgtcaaaatatatacataaaggactaaattgacaaacacatactacttaaaaaaaaaaaacttgatttgaggtgtgcaatttaagggtgttcattagaccacaccaaatattcttaagtttaatcaaattagatccaattaattttagtcatccgagctggctggatgttagattggaacgtttctatctattagctgtatttcatgtaaatttacgcttctctattagatgtatttcatgtaaatttattagattagtttggatttatctaatgtttagactcagtagatccatctaataattcagatctagctatttattagattggattggatctatctaatccctgaaaaaattaataattaatat

SEQ ID NO: 215252 - DNA, 656 bp, Cannabis indica
accggagaaccggccggtgggaatcccatatttggtgagtttgtttccatggaaaatcaacaaacatgtatatatatataaaaatataatatataattatattatatttactaacttcatttttcttcttctttactttttggaatacttagggattgtgggaagcaagtatatttaggtacgtaatttggctaattattagtttctttttaattataatgtaactaatttcatggcaagaggattttgttgatttgtttgttttttttttttgtttatttcattttatttatttatttattttaggtggattcgacacagctcatgctgctgccaggtatgcttaattatttacttttttgtctttttttttttttttctgataaaaaataaacatttgtgtaaaatatacatatatatttgtgtgtatataatgttagctaaattgggttattgatcatcattattttttctaacttcagagcttacgatcgagctgcaatcaagtttcgtggagttgatgctgatatcaatttcagtgtaaccgattacgatgaagatatgatgcaggtgccatatataaataaatatgtttagtatatgatttatatttgtttatagttatagttttgtttaacaatttctctaattttgaa

SEQ ID NO: 215253 - DNA, 592 bp, Cannabis indica
cctattgtctgcaacaaaagctagcacaagtttgattgatgggagttagatttgtgttttaatctcttgatgtcttatttaagtgttacattctttaattaaaaatgcttttaataatcaaaagggtttaaattggaaaatttatgagattctttctttgtcggattaatggctcaacaaataacattttcttgaaattctcatcaagcaagattttcacattcagctaataatgccaatgtctctaacagaatctgaatgactatatatgattattcatgttgtattataacatttatatatatatataatgtatccaaaatacaaaaactataaattataacattttatggatctattacacagaaattatctgcataataattctagtccttttttatagtttatagatgttatggcttaacatattgaacataaagaacaaaaactatatatactattttcggagggattgtgagaacccaggttagagaacatgaatattattaattataataataaatattaaaagaaccccttatgatataaagtagactaattaatgaattttgaaagcatttgccataattaa

SEQ ID NO: 215254 - DNA, 928 bp, Cannabis indica
aaatgtccccaacgacatcccccaatgttgttgggcgatgtcgttggggacatttttggggggaaatttgctacccaaatcaacggctccttttcaaaagccacacacacattcccaatgataatgtcgttattgaaaaaaaaatatcgttatttttttaaaaaaaaaaactaaatagctttcccaacgacaggcaaatatccttattgatgccctcatttttaatgaggacttttaggcgttggtaatattggcgttggtattaaccataattcttgtagtgattaaatgggctccctttatgcatctaggcacaaagcaaatgtataggcacatgtgcgcactgatttgggtagatcctatcatgttactagatttatacaaagatgaaagaagattacaaaatttacctgttactaattatttatttgacctattgacaattggactatagttaaaataggatcattggatttgtcaacaagttaatcatagcaatttagatcaaacaacaacatgttttacaaaataagtttttatataaacaacaactaaaaaacacatgcaacaacattggatagtcggttataggatttatttaatttcaaaattcttaaataattaaatatttaattttcaaaaataaataaattaaattaaataattaattttaaaaaatcaaacctataaatttaaaaattaggtttataacaaacctaaatatctttaaaaaaaattatcaactaactttttaaaatttttgttattttaaaaaatgaaataaaattatatatctaataaaataaaatgataaacaaatatcatttatctaattttataatttaatttaaataaaataacaaatttttgaaagttgacaaaatatctagtagtttttcaaaattatctagactattttattaaaaaa

SEQ ID NO: 215255 - DNA, 881 bp, Cannabis indica
aaattctaggtccgtcactgattgtaatggtattcaatatctccattactttaaatgctttttttttaaaaaaaaaaaaatgtaatccattacattgtatattgtaatcctcattacaatgaaaaaccattgtaatggtcattacaattacaatccattacaaaattaatataattttataataaaaaaaaattcaaaagtctattttaccttttatttaaatattttataattataaaaataaaaataataggaatattttggtcaatatacattttattccattacattctcacaccaaatcaaacacaataattttaattacaatactcattccaaccacaaaccaaacattgtaattaattacaattacgattcctattccattacattactattaccattaccattacatttctattacaccaaatcaaacatcacctaatgttgtatatttttcagttttatttttgttaacaggttgttttttaccggttcaaacagagtgtgtggctcttatgatggattcagatcaaattctttcattgatctttcgatgatcttagattattattatatgatttgataagtttgtatgttatctaaattttgtgttaaaatttcggataaggtgaatgacgttttattttaaaatcaattaccaagggaagaagtagctcattcctcttatatattttattaggaaaatttacacccattactgcctttttcatattttttttcatttgtactgtcgcacggagattttaacttttatactgttttttattgttaattatttttggcagtatactggctttggtaagttttatttatattggttttatggctttacaggtgtcatgctggggttgtgccac

SEQ ID NO: 215256 - DNA, 541 bp, Cannabis indica
gtggctttccaaacgtacccttaattttcagtttgggttgtttaagtgctctctttatgtaggttagtatgtgaattttggttacaatttagattactctttagttgctattgaagcttctatgtcgaatttgtaaaaaaaactattttgaaatataaaaataaaaaaatataaaaaattaaagtagattaattaatttattatttaattattttaaaaaaaatcaatttgtattccataaaataataagtacatcctaatatataaaaaaattaagttcaaaataatttttaaaaatcattattaatttttatttttaatttttttccctataatattttatgttaattttaatatttttttaaattttacttttatatttttaaaataatgtatagtttttttaaaataaaatttcacatactttttattttaattttttaaattatgatatttgaaatatgatttatttttgtttggatagatatattttttaagaaatatgaatcaaaataaaaaaaactaataaaaataaatataa

SEQ ID NO: 215257 - DNA, 134 bp, Cannabis indica
tatatgtaaattaatttttttaaaaaaataaaaattttaataacttggactaatcaagaattgtcacgtgacaatttatttaacacttaacaattaagtactacaaaagattataacttaagtattattatcgc

SEQ ID NO: 215258 - DNA, 1021 bp, Cannabis indica
agtctgtgtgaggtaatatggatttatcagctcttgattgaattcgagtttaagacttctattctagcaaaattgtagtgtgataatcaagttactcttcatattatctcaaaacccgtgttccaccagcgaactaatcacattgagattgattgtgttcgtgagaaaattcaacaaggtctgatctccacaggatatgtgaagatcggagaacaattagaagatgtttttacaacggctgtgaatgggtagtgggttgattatctttttaacaagttacgcatgattaacatttatgttctaacttgaggggaagtgtcataatattagctgtatattagttattaaattatatttagtagttttctatatgtatttagtagtttcctgtttagtgttctagttttattataaatgtatactattttatgaaatacattatacaatccaatcatcatattttacacagagatgaacttttttgttctgtctccacccccatgaatacatagtgaaactgtcctggtagggaaaattcacatgatttcttgtctatgaattgatattatttatttcaaatattttttagagtaatttgtggcataaatatttaagtttaattttcagttacaggtaaatacttaagtttaattttttacagcaacaatacttaagttacaattttagaatatttgtaagtatttgactgttaagtgtcaaataaattaccacatgacaatcgttgattgattcaggttattttatttttcatttaaaaattgatttaaatatactaattaaaaaataacattaatgacttgacacttaattgcgagatacatatgaaagttctaaaaatataatttaggtattatcattgtaaaatgttaaatttagtatttatttgcaatcaaaagttaaacttaagtatttaagcaattattttatttttcatgcctcggatatgactcttgtacttatgggactttgatggcctcatgtcgacatagctgaatcgtgt

SEQ ID NO: 215259 - DNA, 848 bp, Cannabis indica
ttttaaatatatattatttattgtgtaataaagtatgactatgtaacgaaatttttggtttaactgtaattttttagttttttacattaaatttaaatgaaaataaaaaaaaattatgtaaatattttatataaaaattttaaatttaaaatattataaatatttactatatttttaattttattattatttattttatattttaaattaaaatggttgcaataagaaattgattactttctgttttagttatggtaaaccgatttacacactatatttttcgtaaaatttgtgaaaaaaaaaactatttatgaacgtagtcaaatttggttatgtgagttttggttaacaatatagtaaattataatatatgcattattagatactttatttaattaaaaaaaaattacaaatttaaaaaatacgtatatatataaccgcattcaaataacacagcaatatagcaataactaaaaaaaattttaaaaaatcaaaaatctcaaactctatttcaaatttttttttaaaaaaagtacattacttaatgaaaaaaagttaaacatacatgtattgcacttaacattacttaattgaacctaaaaaaaaaaattaaattataggtgtattacacataacattaacctagtataagtaaatatgatatgatatcgacatcttgaaaaaagtaactattattttaaaactgttagtaagaaaataatataaaaagtaacagtagctaatttttatttttgctttttactgaaaaaaaaaaaaaaaacgaataaatgtgaatatatagaattatagatgatgatattatatatgagactagggtactaagccgc

SEQ ID NO: 215260 - DNA, 735 bp, Cannabis indica
tctcatggaaatcaaaaaaacaacaagtggtctcccgctcctccgctgaagccgaatacagagctatggcaaatgccaccttcgagcttacttggatcaattcgctcctaaaagattttggtgtcactccaatcaccccagcacgaatgtactgtgataataccgctgccattcacatcagtgagaaccccgtctatcacgagtgcaccaaacatgtggagatcgattgccatttcattcgggagaagatacaacaaggcctacttcaactaacacatgtttcatcacaacagaatctcgctgacatttttacaaaagctctacttcccactcacttcaatcaaattgtatctaagttgggtgttctaaacatatacactccaccttgaggggggctattagatgtttagctttgtcttaattctgttgtaaagttagttatacattatgttaacattctgttagttgttaggtctgttatcctcaccgactttacttgttttgggtatatatacccttagctcttgtaaaaaggattcattcagggaataaagaaataataagactctgtctttttctttccaagactctgtttctcatattaagtacaagtcaaataagaatttcgaaagtttagtcgccaaaaactctttttttttaaatgtcaaattttgtccaattaagtttccttaccatatttatgtaaaatagtttttattttatataagagttttt

SEQ ID NO: 215261 - DNA, 836 bp, Cannabis indica
gctaaccctgaatggttggttgcctttactgctgcagaagtttgcttccaattcgaggggatctttgatcactctcctgctgtagtcacggtacgggaggccattttaggggggaaaaaccatttcgttattttaaaatgtggtctaatcatccattgtatgtgaatatggttgctgaaagttggaaacaagtggtatatggttcgaaaatattccagactgttgctaaactgaagactttgaaagatttttttttcgacaactagatgtcacacactttgtcgatttgcctgcagctgcgaatcgtgcaaaatcccagctgcaagagtgtcaaaatgctttgcaacagaacccttttgatgagaatttgcaagagcaagaggttgaggcgagggaactttttgcaacaacacaggcagcctatttgtcttttctacagcaaaaagcaaaattatcttggctcaaagaatattataatatttaaaaaatttaaaatgtactcttttaaaaggaatgtaccaatgtattcttatctgtttatgcatttgagagactttttagtcctaatttttttttttatggtcgtgtacattctaactatttatgacattctgtaaaattttaataaatttaaaaaaattaaacatgccaaaaacataattcaagctgtatgttacacccgtgacttttttattatatatacgtgtaaaataaattgtttgaatattattttttatattgttaattattttaaatttattaaaattttacaaaatatcttaaataagaaaattaaactattttttttttttgaatgtaaacaaaatatgcgtaat

SEQ ID NO: 215262 - DNA, 654 bp, Cannabis indica
actagaaaattggattttagtgaggaactctaaaagtgtatagtgacacttcaacgcgcgtcactaatgagagtgactggaaagacaatttttattgacacttcacacgtgtcactgaaaccttttgcattcattttctgagtgtcactataggcgtataacgttttgtttgactaaaaaagtaacagccacacacataaagtatcactatatcttttttttcttttcttttttattaatacttttagagatatagtgacacaaaaagagccaccatattaaataatttttaaaaaatatattatttcatttgttttaattcaaattttatatattataaataataatttatattaattatatataaatacaattaagtataataataataattttaattaactaaatgtaaaatttataaattacataaacaaaattgtattttattaaataaaaacctaaatgataatttacaagttaatcacatgtaatgttcaaatgattctacaaacacaattaaaaaattaataaactaaaaaattgaaatatattacacatgtaatattcaaaaaaaattagaacacataaaaaatgtatacaaaacccaaaataaataaaacacattttgaaccaaaaaatctactccttgcaacc

SEQ ID NO: 215263 - DNA, 720 bp, Cannabis indica
tttgaaaagcaaaatactagatttgatattcaacattaaattacacatcaattaatatcaccccttaatataaattggaaacatatgttgtcactattaacaactaattacatggttctttttttcttaatttagaaaagctttgtcgatcattaaaaacttcaattacaatagtagcaatacaatcaagatatccaagatacataccaaatcttatgaacacatttgtcatcaaagttaacttagctatggaattgagcaatgccattaatagatgccagcaaaagtaattaaaaacaaaatatcattacaaattaaataatatctctaacaataataaataaagatgatttatcctagtgctcgcgcaccaattaatatattctaaaataaaaagaaactcatgagccattcttaaaattttcaaaataatttatttttttcattttattttatataaaaaaaaagcaaaaaaaatcaatcaaaaaaatgtaaatttttttattagtcagtacgacattggagcactcccttcccatcagagtatgtaaaataactctaatgggacgtttagtatgaaatttagacttgattgagaatgtaaaatttaaataaattctgaatgacaagagtttatgtttccaagtaagtctgtaataatgttaatcatctcaaacaaatagatttcatatttcctaaaagtctattctaaatttttac

SEQ ID NO: 215264 - DNA, 516 bp, Cannabis indica
tcatttcaaatttcaataataaaataagtaatatgtaatcttataattaaaataaataaaacaaacaaaaataatcaaaaatttcaaaattagccataaggctagtttgtgcaaaaattaattttttaaattttaaaggctactaatatctaaaactaattttaattaattaaaaaaataataaatattaattttattcaaataattagatttttatttgaaaatttagattctacacaaaattctaccaaaatttgaatttgtttcactaaaaaataatttttgaaagtcaaaatatcacaaaacaaattttgggcacaggggtatgcattgcatacctctacgcgcgcgtaagaggggaaacaagcgagggagaaggctgcatgtagcctctatttgcagagggatctcggcgtgaaaaggccttcagacaaggccttgtctgagtaacctcggtcaggcacttgtctgaagacgcgtgcttgccgagctgtccgcgcgcgcacgtgatatttt

SEQ ID NO: 215265 - DNA, 839 bp, Cannabis indica
ctcaacagttgttgttcttgatgtgaagaatggtgtggtagtagttgttgtggtgttgttgtgtgtgttgacgcataatgggtatgtggtaaaatttgtttctttgatctttagctgcaagtaaaagaatagactgatatcattcaattttttaattggtagtattctatctttggcttagtactgtatttgtaggattgttgttgtgggttcgcatcccaacaataccagtagcatttacaccaattgttcatacttacaatctgtgggtatgaattctccattcgcttcataatcaacataactcttttcttcttcctagtctcgttgctctttatgagaactggtatagatttcatgccctataacaatttcttaatacagtaacaattcaatgacacaattcaaacaaaaacaataatagaactactacaaaaacaatcatatatagtgttattttttttaaaaaatcacccccatgtttactctagaatgcctcattgtcattgtcgttatgtgtttatcgtgaaaaatctgtttattaaccccgtaacaacactgaacaacgttgatcttaagaaattttaatagaagaattataatagctacaatttgtgcatgattttagtaaaaccccaattttaaaattataattgatatattaatatattcatattttcaatatatcatattatcatatgttcataattttagtaagaattatatatcatattttcattgatttcactttgttttttagaatttgatttcatatatcaaattggatatcatgtcttaatcgttcattcattttagatgaattttttgtgtgttttcag

SEQ ID NO: 215266 - DNA, 505 bp, Cannabis indica
taaggtcatgtcagggcggtcttaaattttagtgggacataggccaaaaaaattgggctctcttattttaaaaaaatatgtcatttttaaaattagtaaaaataatatgtatatttttcaaaagagatttttttttggggaccttagacttggtggaccccaagcacaggtcttcctttaacatagctctaattatgccggtcctgagggtgtttggatcctagaaaaataaaaatattattgatcctttattctaaagatacgtggtatttttaaaaattattaaaaaattacttgtttctaaaaaagaatttttttgtttttcgaaattatagtctcgtacttaaatttatatatctttttttgttcgtgcggtaccaattcgcaatattttttttgttatagcataatgctctttgttaagactgttaagacagttaaaagttagttagtttgtttgtacagctgtcagcagttagtttctttctgttgtaaagttgttagc

SEQ ID NO: 215267 - DNA, 572 bp, Cannabis indica
ttaacatgcatagttgattgcccttctcttgtcatttttgttcgcacttgatgagcgagacacgtgttttgccttcgagtatgctattcaataccttttgcatatcggtcaccgtggtctccaacctctggttcttcaaacagaggttgtttatctcctcctcataggggtgggtttgaaaactttgactcgctaagtgtatttgtgcaaaggtacttggaaagactaaaattatgtgattagcctctaaatatcattgtcaaggcatgacctcttagtctttgactaccctgctcgttataacttggagattatactttgtaaaatcttagggttaacaactaccacaaagagacacaagtaattcaaatttatttgattttttctatttaaaaatttaaatgcaataaaataaactaagtgaagataggttatatattaggtcaaaccattataaatttttaattcattaatttatgcatttattatttctattttgttgtcaactattttattattttctatgtatgtaatattatttgactaaatactgtaatcaacagtcgttatta

SEQ ID NO: 215268 - DNA, 1025 bp, Cannabis indica
cgactataatcatcaactattgatagaaagtattgtttatcgaaatgagtaggaaccttgtatggtcccaaagatcagcgtgcacatattcaagtatctttttagttatgtgccttgctggagtgaactttagcttatgttatttccataaaacacaagctttagaaaatggtaaagcacacaaatttaaatttttaattatacattgtctgtgcagttctttgaggccttgttcactgatatgcccaagtctgtgatgccacaacttcatatctgattctagtcctttcaccatctagcttcaccagttgagacagtttctccttggaaaacctataaaccattgatcgtttcacctttcatcactacaaaagaacctttggtgatcctcaagctttcgtgcatggacttgtatctgtatccttcgtcctcaagcgcacctagggatatgaggtttcgtctaagattagggatgtgccttacgttcgtcagcaccttgattcagccatcatactatttgatggccaccttcccgattccaataaccctgcataaatgatcattacccattaaaactttacctccatcaactgacttgtaataaaaaaaatgactctcgatttggacacatgtgataagtacatccagaatcgagaacccacaccatgttcattaaagactctgagatagagaacaactctccattcgtggagaattcgtcaatattttctgtgattgcagcagaatccttcccgtggtgttggtgctggaagtccttcctatctccattatgagatttgttgaagccttgtgctccttgtacttcttgcatgatctttgcaagtgtccagaccttccacaaaagtggcacttccttatttccttctctctggactttgatcttgattgagagtgatggtatttattctccaaactcattttcttgggtgatcttcctcttgccaaatacacttcttctttcttggattccttctccagctataattcgaaatctttcgacttaa

SEQ ID NO: 215269 - DNA, 920 bp, Cannabis indica
tacataataaaatcctatgaaatataacttaatctttcattttaggaccaaagcaaagaactatttccttcaattttctatttactctctcactctttcatgactctagctctcaagtcaccaagattaccatcaacaccttatttttgttaagaatgtctatcgctcgctattatttaagtgagtctaaatttgaagttctcactcaacaaaccattcccttttagagttcttggaggaaaaacttcatggataagtagttaaggtgtttattgattattgtaataggtattatattttgaacttatctaagtcacatttgtttgttttgatgtttttacttttctttttcatttattcggatttgagatattctcagtcttttttcttttcttcaaaatttttttgttcacttgatgaaactgaccacaccttaataaacctctcgatacacctcaccagcctagatgaactttttcttttttttttttgcatacacacacttcgataggtctcaacatgcattggtagacctcgatggtgatttgaaggttttgaattctttactggaaattttacattctaagatgtttatttaaaaaaattataacattaacttttatttaaatatttacaaaaatattgtatatgaaagctttttttttttaaaggttactttatgaaagcttccttttgcaagagctccaagtctcactttcagaaccttccattatttgggttgacaaccaaagtgcagctgccttggctgccaatcccgtgttccatgctcgctcaaatcatattgagatcgattaacactttgtccgtgatcaaatcattgcaaacaaactctctgttcgatatgtccctgctggatcaaattgtcgatgctctttccaaggctctttccactgatcgat

SEQ ID NO: 215270 - DNA, 837 bp, Cannabis indica
aagattcttggaattggaacacaaagaagatgagtatgattttcttccttactttgaagaggaagacgtagcggagcaaccaaggatggaagaagaacttcaagagcctactactccaccaatctcgccaactcgaaatatataagaagattcaagtgagagctcaaatgaaaagatgccatgctttagaagcttgcaagaactaggtaactgagaatcaaaatgatatttctcttatgtgtctatttggtgattgtgaacctctaagctaccaagaagcagtaagaaacaagaaatggagagatgcgatggatgaagaaatcaattcaattataaaaaatgacacatgggagctagctactcttcaacaaggatacaagccaattgcattaaagtgggtgtacaaggaaaataagaatgctaaaggcgaggtggagagatataaagcaagattggtggtaaaaggttatattcaaagggaaggcatcgatatgatgaggtatttgctcaattaaaaactgacgggaaattatgtgctttttgtagtattgctacatcgagcaaccattgggctacgaagtaaaagggcatgaagaaaaagttttgaagttgaaaaaggctttatatgacctaaatcaagcgccaagagcttcgaatactcgaattgacaagcactttcaagacaagaatttcaccacgtgtccatatgagcatgcagtctatatcaaaaattaagattgaaagatatcttgattgtatgctgcttgtatgtggatgacttgatgttcactggaagaaactcaagtatgtttgtggagttaaagaaagatatggaaa

SEQ ID NO: 215271 - DNA, 596 bp, Cannabis indica
taatacaactataaataaattaaaaaataattttttatttgactgaaaagatagttttataaataaaaaattcaaagagtaaaaataaaaaatttctgtgttaatgtattttggaatttttaaaaaaaaattcataaatatatatgtatactgtatttgtgatataatataatgatatttgaagcgaaatctgtttaatatttgtaattgttacatatatgatcctatttaaaaaagtgatagtaaagtacattattttataattttgttgcaatcgtattatattttagttattaggtaccaattaaactctttaagtgtgagcttaaaatcatgtagcgacatatttttttagtttattcaatacataattcaataatatgtcgttatgtgtttttgaattgacatttaatagctagaaaaaaatacgattataataaaattataagataaaatatttttattgttatttttttttatcaaaattatatgtgtaatataattataaatgttaaaagaattttattttaagtatgtgtatatatatgtatatgtacatttttatacaagttagtttgtaggtgccgacaaattat

SEQ ID NO: 215272 - DNA, 656 bp, Cannabis indica
catataaccatctttaccaacctgtttccttttatagtgcaaaatctcaaaagaaaccattatattatctgtaataagcctccccggaaagaacgcacattggttatttgaaataacctctgaaagaagacccttcatcctatttgctaggactttggtgataattttggcgacaacattacacaaagaaatgggtcgtaacttgctcatctgatcaggtttctttttcttaggaatcaacactatattagtattttgcatcccttctggcatctcttctatttgaaagaaatccttaacagatcttatcacatcgtttccaacaatactctaatatgttttagttgatttgattttatacattatgtataatttttccactatcatcctgagaacaaaggagtttatactttaattgacttaatgtgaatcattacttaaatttgaattagcatgaccccttataggggcaaagttccggaaatttttaaagtttatatgtataatatatttttagtaaattgtatttaacataggacattttcataaggagtaattctaggtattaacatatattgatcaatattatattcatatctatgtatatatatattaaaagtaattttataaattaaaataaaatatgaaatatacac

SEQ ID NO: 215273 - DNA, 1276 bp, Cannabis indica
atgccatccgggccaggactcttgtccggatgcatttgaaaaacagcacatttaacctcttcttcagtcacgggatgtcgaagactacaattcacttcttccgttatggtacgaggaacacaatcaacaatctcttggaattcactcccagtatccgaaaaaagagattcaaaataattaaccaccaagtccggtaaacccgagtcccgattatttttattaatattatgtgaagttttttaccaattatttttatatttttgcgggtaatattattattgttattattattttaagaatttttaacgtgttaagcttttgtgttagtatatttatgctcatgtgtcatatatttgggcttgtgtaagtgttgtgtcgtgctcaagcttatttcttttataccgtgtcatgccaatttgtagtatcgtgtcgtgtcgtacttaaatttatatttttttcgtatcggatcgtgttgatttcgtatcgtgttaaaaaatccaatctgtatttacagctctagttggcctagctgatattacccctaattgtaatagttaatttaataaaagaatatacttgtattggtatgataccttatattttgaaaatgtgcatagtatcttaaattcaaatttaatcaatttttttttatcaatttgacaaattcattgttaattatatataattaaatttagagtatttttttaatcagttttctgtttttaaaattgaaaaaataaaaatattttcaaaaatatattctataaaattattatgactttttaattttttaattgagaatcgaaattttaaaaataaataataaaaaaaaaatcacattcaatattttttaaaacaattttttttcttaatcaatatattagactccaaccagaccagacccaaatctctccacgacccaggtgttgaacccggcatcggacctagacccgacttaaataaaataaaaaaaatgaaaataaactttacagaatatatttttattttctatttttaaaattaaagaacaaaagtgtttaccattcgtatttttgttttataaaaataaatttttaaaaataaaaattttacttttgtgattaaaaaattaaaaaagtacggcacctaaacttataacagcagactgattaaagtttcaggaattctcacaaaatcgcataggatatcatacattcacatccataactacaaggccccacacaacaagacaacaaaacacacatatttgcgttcttaaactcagccactcatctct

SEQ ID NO: 215274 - DNA, 904 bp, Cannabis indica
agtaacacacaaaaaaaaaattaaataagtaacacaaagagtttcttgggtcttcactagtggaacggaaatttgttgttaattagatatgttttttttgtacataaatataaaaagtccgagttaaacttgcgaattcgcttaacttggaaaatatcaccagtataaaaaaaaaaaaaaaataatagttttaattagtcaggagtgaagccaccatgaaaaattagagggcaaactatattgtaaatttaagtgttaaaaatttcaatgttttattaaattcataattaaaattaaaatacagaacgtctttcttgcatatcacgaaaatcatcgtcgcttgaaaaaattactaaaaaagtcaccaatgtctcaaatataaaataaaaataaaaactggttataattggcaattttttctttcaatatacacgagcaaacaatcacttaaaaattcatctttcatcttgttgcgaagtgtagtcttcactatattgatagctaaaaaaagatcgttctgtggtagctattgaaaccggaagcgtaagaataagagttatcactttatagacgatttgaaaaatctctacttttctagtttttaccaaccaatgacataaatcaaaaatagttgtcaaaacagtataatcaagaagttctcgtacaggagcaaaatgttcaaattgcatctttagctgtaccatctcgtattctgtaaaatctcttggggttaaaatttttgtacccacttgcaaatatcattaattctgaattatgtgtgcatttctctcggatctaaagctgaactaagaatgagtaactccactgtattatcattgaaatttgttgtttaattattgtagttgaaaagtctatcactgaattgaaaaagatcaaactctgt

SEQ ID NO: 215275 - DNA, 959 bp, Cannabis indica
aaagttcactcaacccgaagaatcctaaccagacatcaagagactcgacccattgatccaaaaacttcttgtggatatgcaagccaagagaatgaacaacttgaggttccaaagtccactcgcatgaatatagatgccaggcaaacacaacctggaaaccaaggaattccacaacacaatgcaaggaatgcaggaaaccggcctgggacaggtcaacctccaatgcatccacaaaggcctaattgcaataatagagacaacacacacacttaactaagtagggatcgtgtgtcaaatctctttcaaaggagaaagccagtacgagaagagccaaaagagacagggtcgagtacagattcaagtggatcaagatcaaggatccacgggcaaagcagatcaactcaaactcatgtgcgtgacaaacaaacgcaaaatgaaggaggatcgcgatgttattatcaagatgatcacgagagcattagcaactctcaaagctaccaatccaaaagttattcgagaacaaggtcagtaagccactatgaccaaaggcgtcgtgaccctgaccttcgcgagcatttaaatcgtaaacaattagacttgcgcgagcatttgaatcgtaatgctccactatctttgcaatcaattaaattagaatgcaggtaggcgaacaaccagtagagcagcaacccatggatccaatccacctcgcctacttgaggagtaagggtaaaaaaaaaacgaaacacacacatcccaccaaatcttcgcgatcatgaaatactgaaaactataatgaagtgaagattttcaaagtaaacaacacattaaacagttgattcatccacatttttaagttgaatatatgtcttgacgatgggggtgcgagtttgtgtgagaatttttgaatctcaaaatctcgtataattttttgttttgattttttactactggcgttgact

SEQ ID NO: 215276 - DNA, 532 bp, Cannabis indica
atgattcatttgtgagaatgacattacaaatttatattaaattagacactattataaatttactattaaagccctataccctttgatgtagcagagatggtgaatgttgataaactcgtccttaagcaatccgcccttcaaaacatggtaacaaacaatcatgctcttttataactcgtcaatttgattgcgtaattcttttattagaaaaaaagtatatagcactcatcaatttgcacttattttaaacaaaaattataatcagtaaaatagtaatttacgggaaaaatacttaagtttaattcttacttaaataaatatttaagtttattttttaagggtaataatacttaaattatattcgtatatttatattaatttttaaattaataatacttaggtacattattgttaaatgttaagtcattattcatgtgtcattttttttattaatatatttaaattattttttttaaaaaaataaacattaatgacctggaccaaataataattgtcatgtgacaatttactt

SEQ ID NO: 215277 - DNA, 805 bp, Cannabis indica
atcttcctgggccttattaggggctccacgtcgacatctgatggagcctccgagaaggtcaacctattcttttcctttatatgaaagataccctcgagattcatttctacgagataaaatagtatgttagcattcatttgaaaaatgagtaaagggggaaatcaggacataatctcctgcataagggatttatcataatcataagaagacgaaaaggaatgactataatatccaaaaaaatccctacaccccgtgatcctgaatatgtcataagagttaattggttctaaatcccaggtcgcatctaaatgacttggcttatccagcatggttccgtactgcttggctatcccatagaacgagtcagaacaactaatttaggcgtggaaccttgggtaccaactataaaacctatgtgcaatgcggtctatgaggaggggattcaaagtgtaaaaattgtaacgactatctcaaaatgacactaaagtgttatgctcggccctaagcactgtgggtgactaaccacattgattacctcaggatgctcctccttcagcttcctaagggacaacgttctagaggtaatgtccctgagccacataatcttggccttcctcgttagctgggataggaatctactgccaataagaatacttgggatatttttgatcgcaagtaaactccttgccagtaaagaaacccacagaccttagaatgaccacgttcaagaggaactcaaataaccgaagaccaaagggaagacccatgaggagcctgtatcgctcggcaatctcgagagtcaaaa

SEQ ID NO: 215278 - DNA, 745 bp, Cannabis indica
aagtgacatttcttgtagtgacctttaatttaaagttacctggtctgttccaaacctaccgttcattcaacattgctacagccggagcccacattcgtcgactggcagaagtgcttaatatgtttctaatgcaattttgggctaattccccttttgtactaccaaaaaataagattcttgccgaattaaagttttctgctccaggcctccagctagactcgagaccaagactccttacaactcgcacaatggctagagattgattgaaaaggcagccccctccccccctttagtgattgtgatcaagagcacacactcaacctgaacaactaatcatcatctcatttggcgtgaagaaaaaagaagctcgagagcgtgggaattctatgttgaaaattattttaccaggatcttagatctactcacaagtatgtttattaacaccctaaatatgaactttctaaaacgatgaaataaacacatataaagtttaggaaaccttacattgggtgcagcggaacataatggctccttccgttcagatatctagcccttgattctgttgggttttatgccctaaataaaactcatttcaatataatcagatttacttattaatatagatcagaaataacatttaatgttgcatggttcacatgatttatttcatgattatatgtacataatgtataaaattcatctgaaaaccctttttcacatacttgatcctgtttattgtgccgtc

SEQ ID NO: 215279 - DNA, 719 bp, Cannabis indica
tatattgagttggtatattttatctattttatgatagaagacatagagaaaaatcattcttattcacatagacacttatacataagttatttgatttagtaatagatacatatgtatattagtataactctaaatatatattgtaatgattgctttgttttttcatatgagattagcacatatatattaacatatatgcatattggtttgatttgtatgtaaatagaaatagaaagagattattgttggagattaagaaacaatagtcttttttttaaaaatgttaaattatttatcattacaaaaagtatacttatccaattcgcactattgtgaattgaattggattggatataaatatttgtatcagattgaatcccaaatatgaaatctgcacttggtgtagattgaatgttgtttgaccaaaaaagtgaagattggatcagatgaaaaaccctagtagagaacctcattgaaaaaatttctcaagaacctcttacctgagaaaatttgaaagagcctaaccattggtccaccttagtcatacttctaacaaatgaggtatacctacatcattccccttcgtcttcacgtcgcaaaaaactttctccaataggatacaacattcaaataaattcaaaggagataaaagatcatataatgggagcaaaaagtcgagtagtagaagaccatcagctatatccgtcttccatggctcc

SEQ ID NO: 215280 - DNA, 687 bp, Cannabis indica
ccatattccacaaagttctcctcggaggtcaacagaataatattccgagcaaccccgacacctgagcaagcttttgggctctatccctaagagaaagagtgaagggagggcggagatatgtggggatctgctggaacccagtatgagtggtgcccatgccttccaccatgaagtactcctcaacaaaatgcccaattttgctaacgaccttgtcccaagtgcccgtcaaccacttgaagtctggttgagagaaatagaagtaccccgacctgccttgcttagggttggacttcaaatcaaaaaaccagctaacctcgtggggagagggcatatccaaattctgggaggtagagagaacgaagagggcgaatagatacttaatgcccttgggagtaaattgcgtcagacagaggcggaagaagtctatcacattcctaaagtacgggttcaaaggcagcaatgccccttgcttggcgtgagcaccagactaggcgcacattcccctttcagggtttgtggctcggttgttgtgggtgggaatgtaatagtccaattcgcccaggtagccatcctggtcgagatcccgcaagcgtgcctcggttaccttggacgcagggctcacacacctgacacccaaagtaccttgccttcaatgaggaaccgcagcagtaagttcctcactggcat

SEQ ID NO: 215281 - DNA, 642 bp, Cannabis indica
agtgtccatatttgtccactgtctttaatcatgtcattaagatttcttcttaattcatgattagaaatttattacttgttcaatctcattttacaagtatctctaagttctaatatttaaataattattatattcaatatatgtatctcatactatgaatatcttttcaattgtttgttaaatactttattaacatcctcaattttcataatgtattattaaatctacatttaataaatttatagataagtaattattcaccattaatatcactttattctcttaagaatatttgatatcaaataattactatttcatcttatatattatattgtttgaatttagtcatatcattcaaatcttcgtataataattttaatatccacctcctaaagtgaacgattcaatcatcgcattcttaatagataccatatctgaattaattttatttttaataagagaaagttcctattaaaatttggagtttttttcattttttacacttcaaaatagttagttttttttttttttttttttattttaggaaattcttatatagtaaacccctaacttgtcaacaacgtagctgtcaatctaaattagtcaacaaaaaataacgtctaagaaaccccgtaacttgtc

SEQ ID NO: 215282 - DNA, 847 bp, Cannabis indica
atatgaatcagtctcttataaatttattacttgcgcaagtgttttaacatgatgaattactcaatagatctcgattctcaaagtagcttccaagcatagcatctctcgattttacacattaaaacaaaactaaataaaagtctcgataaattgcactattggtgctttgatagtggcattatatgaatcatccttgataacaatattaagaattcttgatatacaaacaagaatttataataacaaatatatgatttttaacaaattggtgatatacatgataaataaattaaagtaagaagactcctaacaacttttctactttattctttaaaatatattactaaaacttcattttatttattttatctcaaattttcatattatatcatacatcaatttctctattttttctatatatcatttaaatattatatttttaatatattttatttattttatattaataattcatataatattacacacatatatagaaaagttaaacaaaataatattaaaatatgtttagctcaatgaatagttatttttacatttaactaagcactattcattaaacaaaaaaatatgtcaaatagttaaggtttacctcacttgatggaagctcaatattgtaattttttccctataatttaaagattgagctattttagctcatctattgggagtgttctaaaaaaaacaaaagatggcgtataaatctaacattaggtgataaaaaagtaggtttcgctactctattatctaaccaaaataaaatacatgacatgattaatatgacaggattaatatttttacgtggtcaaaagataatataagtaataaa

SEQ ID NO: 215283 - DNA, 735 bp, Cannabis indica
tggtagacatgatcaagactggcttgccacttagattgttggaattgcagtcatgtctatcttaatgcccactctggtaagcaaatactcttcttattcatatatttactcatatcttaatgtccattccaaggtcaatttgattttatatttgcatatttgtaatggtgttagtaaaattttattgtgcaggagcttatgtatttggaactgacagagcaatttaagagcatccgtagtttaaaacagagcaactctgttttgtaatattactggcgttctgttttgtaatacacagcaaaaagtaaatgttatatagttctcatcgaagtgccaatattttactttacgctcttaaataattttaagtgtctaggaacatagaaaaatatttaattgtacaacgatatgtaaataaaacatagtagtttactttgaagtgtttattaaaaatgagaagaaaaaataggaaaaaaaaaaaaccatattggaggacaaaagatgataacaataatatctccagtttgtttcttttaactgtaaacttcagaccaattcggcctcagtaatattagcaatgtcaaaagagagattatattttcaaaaaaatacgatcagcatataaacaagatacactaaccataagatgagtagtctgattaacagacaatcggaaaaaaaaaaaaagagaattacttcatatattaatttttttaacttttttttttttttttc

SEQ ID NO: 215284 - DNA, 1165 bp, Cannabis indica
tttttataaattttctcctattttggtagaaggactatttgcctttactttactgcatttgtttgtaattttagtatcaaaacactatttgtaattgtgttatctatttatgtaggtcttatctctttggagggattggttagaagttcgtgttcgtatcaaaaagcaccaaggattctacctctagctcggttagtttagctatatatttggctagtaattgttctcattaaaagaagattatatagtgaatattttgctaactctactatgttctctcatttgatttttgggtattgttaattgattgcttccactgcaaaaaaagagctacctatatctcttgatgaggaagaagatccaggatttgagcatatacataatgaagaagatggacaaaatatggaatcaagtcagccacaaaattgtccactttacctactgatgggacaaaggaaaatgatctgaagagaaaggcagttaagcctccatcaatggtttggaatcactctactaaggtaagtaaatgctaaaaataaatgaaaaagctaaatgtaattactgtagtagtgtacatgcatgtggtagcaaagaaaacggaactagtaatttgttgaatcatattagaattcaatgtaagaggttttcttgggaggtgataagaagaaaaaacactatgttttgaattgatgaaaggggagggaaacactttcatgactcataaatttgaccccaaaggaataagaaaatatattgctaggatgattgtcaaagatgagtagccattttcatttgtagaaaacgaaggttttagagaacttcttcaaaatatggagcctaaatttaatgtcgcttcacgtactactattacaagggatatcatgaatctttaccttagagagaaaaagaatttaagagctatagttgtgaagaagaaaaaaggagtttgtcttacaactgatacatggagatcttgtcaaaatttggattacgtgtgtttaactgctcatttcattgatgactcttgggtcttgcataagaagatattgagttattgtgttgttcctaataataaaggtgacactcttggtaaagctattgaacaatgtttgttagattgggggcttgagagggtatttactattactgtggataattcatcatc

SEQ ID NO: 215285 - DNA, 666 bp, Cannabis indica
tttgaatgtatacttaggaaaaaattttcatttggtgtaaacaaaagttaatatctttgttgttatgctcaattgcccaatctgagatacgcaaccaaactttagagttcttgaatgagtactttatagttttgtgactataatcatataaagaataaaatgaaagaactttttttttttctttttttttcttatggttaaggtagttaaatcttaggtaaaatgctatgtgtatgtaaaataaattgtaagttatgacttttctatcaaatccaccaattctgaaaagaatatttcatgggccccataaaaaaattctgtctttggtttgtttttttttgttatttttctacatgcatgaatcaaacacttatacattaaattgaaattttccttttcttcttaaaaattttcttttaatcatccataatccaaagtagtgttttaaggtcaaagagatccttcattagaaaagaggtcaaagaaagagaattgatgatcatcaagattttttaaaagttgaaggtggcaatgatggaagctctccaacggttttagaatccaaagaaccaaacaatagcatactaaactttattttatttattagataaatatttttcaagtttaactgtcacatctacatagtttcttactctttatcccttg

SEQ ID NO: 215286 - DNA, 508 bp, Cannabis indica
aaaaaattataatttatttgtgtctaattaatttataatagactgatctgtttggatagaatgtagtgggaattttcattaagaaaaataaataaatatagaggagtgctaattacaacctctaattacaatcttagttaacttttacgttcaaaattatataccgaagtattttttttcatagcggtattcgttatagttacaatatcatccttgtaaatttttgaaattttttaaatagtttacagtaccgaaaacaaactcctgatattttagtttaccacgcgtgttcaaaaaacttcaaacgtattttcgacactgtaaactattcgcaattttttaaaaattttgcatcgatgatgctgtaagcataatgaacactgccatgaaaaaaaaaacttgaaaaaaaaatatttcaacatgtgtttctagatgtaaaacttcactaaaaaattgtaagaataagttgacggtagctctcctcctaaatgtataattaacctctcat

SEQ ID NO: 215287 - DNA, 667 bp, Cannabis indica
agattttgggagctttcgataaatgtaatgccatattctatttatgctttcgctgaatctcgagccactaaaagaacttgagttgtcattcaattggctaatcgatctaatgtctatcctcgtggagtagtagaggatattctcgtttaaagaaaaaaatttgttttcttaggctgatttttatgttctagacatggaagattactctattccatgcacgacacctatgttgttgggtagactatttatgaatacatcgagtatgaaattggatgtcacgtcagcaacattaaccttggaatttgatggtgataaaatatatttcagtgtacttaaatctaataatattccaactacgggaataattttcaaagtgaatggtcagaagttaaaaccatattaggagtcaacagttgaagaacaagatgcaataatccatcttgttgacctagtgtatgtggaagaatgttgtgaccaaatcgaaccatgaaaaaaattagtaagttattagttttagttttgatttcaaaaacaagttagatttagtttttaatttttttaggtaaaaaagaagagaaaaaaaaaagtgagaaaaattagaaaagttacattagtagaaaaaaagatagatattagaagaaaatctcaaaaaaatcagaaaaaaaaa

SEQ ID NO: 215288 - DNA, 696 bp, Cannabis indica
gtacaaataggacatcttttatacaacaatatataaaacctttccttttaaagtatgtgtgactgtgagctacacttaaataaagcttctatcccttatggtggaaattctaatattagttcggtatcctatggacatgtttcagtgcaagttcgattattatatgatatagtcagattttgtagtaaccatcctagaagaaagcttcacaagataatgtaaaatttggatcactagtagtacttactatattcacgttttcatcatttttttttgtctccacatttctcttttccttattttccccacttatatatctcactcttccacttcttaacatataatttttgtcctccatgattaggtttgggtagaggtggtggtgcggttttagctaatttagcatattccaatcaagatctcaaaaccgcaccacaaaataacggtgcgctctgagcgattatttattatatttatatttatatatatatatataaatataatttccatcggcggtaagtgattattttttatgtatatatatatttatataatttgttgtattttgaaagatagtgtagagaaattgataggagtaatcttacctgttttgatgtcgcatcgatgctttctaaagataaacttgagctgttttgaccgtgtcatggcatctttagcaaaagtgatctcatggaa

SEQ ID NO: 215289 - DNA, 625 bp, Cannabis indica
ttatcttaaaatatacatttttttaataaaaagtaactaattgatatcttatttacatcaaaagcaaccaaaagattaccttttttttattaaaacttgcaaaacactgaaatttctggaagcgagaatttttaagttttttccattatttgatcaaaacaagcaactaaatgtgtatgagaaaaattattttgaaatatatttttttaatgaaaagtaactaattgatatattatttacatcaaaagcaaccaaaagattactatttttttcattaaacttgcaaaacactgaaatttctggaagcaagaatttttaagttttttccatttgcggtaataattttgaattttggtatttatgctgatgtggtatatcgatatttgtgcaaaataaatttgttgtaaagtgtttttgcagataaaatcaatttcagatatattattgaaaaaacccctagtattaaagcccaatccttggattgattcgtcccttacaatttaaaggcttctactgtacgagtcttttgatatatatatatatatatatgtgatactattaaattgatttattattaaagattatgcatattatatataatatgtttagtactgtataatatata

SEQ ID NO: 215290 - DNA, 600 bp, Cannabis indica
ttatctatgtgtgcatgcttacatatatgtgtatcagtgtatgtatatagaatattataatatgattattaattattatatatggaccaataatatggatggtggaattgttttttttttatttattattacaattattaattattacagtatatatactatttgtgattagacattttactttttttattaaaggaagattaacttcacctaggcaaggaccttaatttgctcgtgcatatgcatgcgtaactatcttcacaaataaaatataaaaatattaatccacacacatatattatatatatatatttaatccacccacttatatatatatatatatattgatttgttgtggtctaatttcatgatgcatttgtagccatttagaaatataatatgatcgattaatacacattaggttaaatatcattccacacatgtacatgttaataataatatctgtttattatatatatccatttaattacatctaggcatattttgactgacttattagatattgtatatatatatacatacacatacagatatgtattatcttataatatagctagatttccaaaaaaaaaaaaaaaa

SEQ ID NO: 215291 - DNA, 1037 bp, Cannabis indica
attatttttacatttaaaataggtttttttttttttttatatttacagaaattcacatagataccaatagaataacttaaatcacaattaaaatccatgtatatagtaactcacataaaaattaccgaataaataatcgaaatcgtaaatttaaaaaataaaaaaaaataatatataaagtacttcttctattaaaaattataattaataacaaactataaattagtagaaattattaaaagtgagtaggtaggaccaattgagccaatagtgagacttaattgtgtgccgtgtgggcaactcttggtcggaacattctgccaaagctaattaattaatactaacaataaattaaatattataggatatacttttaaaatgtacccttaaaagggtgaaagcagggccggccctgacttttagtgggccatagaaaaaaaaaaattattttgggcccttatttagaaaaaaaatatggtatttttcaaaatcagtaaaaaaaaatggtataattttaaaaggtaaatatttttttttggacccctgggataggtgggccctaggcacaggcctagcccgcctatgcccagggccgggcctgggtgaagggtacaccgatttaccgacattttagaaaaaaaattagtttaatttttgtataattgtttatattatagttatttaagacatcttgcaaaattttaaaaaattcagaaaaatttaatacgccaaaaacattttgttgcacgtgagacttttattttatataggtgtgaaataaactgtttaaattttattttcggcataataaattttttaaatttatcaaaaatttacaatgtagacgaccatacaaaaaatagattaaaaaatattaaaacatataaaagtacatcaataaattcattttgaaatgtgaattgtagaatttttttaatactataataatatataaataagtataattattataaataattataaatgaggaagagaagagattgggttggttcctcctaatgttttgtacgtacttt

SEQ ID NO: 215292 - DNA, 535 bp, Cannabis indica
tttagttgcttatttctttttaagaaataaaagtactgtatatataattaattaaagctccttttataagtaaaatggacaacatatatataggttggtccacaaaggtgccatatgtaaagaattgggatatagtacctaacaaactaatagcttagttcatcgagaaaaagaaaaaggaaaagctatataataacttataggtgtcgtgtttactcagcaacctcctccaacagtccaagtccaactaaagaaattctaagacttaaaaaacagagaagagtacgttgtcttaatcactttggtttcatattttagagttaattttgttttcttctcataaaagtgacttttcgaacgctggctactactattattacttttagacttctgcggttttaacgataacgatataaagttgatctatttattaggaaggaaatttttcaatgtgtatccttgaacgcttcttatttttttttttctctttgattaaaatgaatgcatactttgattaactaacttatatatatat

SEQ ID NO: 215293 - DNA, 752 bp, Cannabis indica
atagagagagctttttcttatcagatttaggctacgtatcacatagaatgagttgtcttccaaagctgtctcatctctttccttatataatattacactagggttaactataaatgatatgggctaaaataaagacaattggactcaattaaatagcatggctgaaaccttagaagaatgaaccatgactttgattttttccattttttttccaatttagcttaaatgaaacaaattgcattttttcaatttattaccacttattaaatctatttatttaaatattaatgtttaataataattatcaaacaataatataaattaaatatatttattaattagaccacaaagtgtcttaattaacaaataaactattatttctctctctcttttttttttctcaaattggtccaaccttagtgaaaattctcaaataagacaatctatttttgaattctaattgacttattaaattaatgaattgagtcttcaagatgatattattccagataatgtggggaccatgggcctacgaaatcgagctcccaatagtagatatgaaatttactaaataaattttctaacttattaattcctcctaactcaagcatagattcagaagtgcactctttattacatagaacgctctatatattcagtataaaaaacgctatgaattatctattgtttcaatttaaataaccaatgatcatctatagacaatttacatcgagtagggataaattttttag

SEQ ID NO: 215294 - DNA, 875 bp, Cannabis indica
gaagaagaatactgatgttgttgatgatagagattttccataccacaagaaataaagaaaaattagtaataacaatcaaagtcatggcaaaagctcattcacaacacaacatatcaatatatctagctagtgtactattactattctcttgcactaataatataatgtgtgtatgtatggtagtgattttcacgtttgattgtgattggtgtagtattatattatccacaaaccctttaaattttgtcaaatgaaaaaattgtgcttgcttggctttattcacctgtcattcggtatgaaaggttttttttttttttctcttaaaataaacttaaaccaaatttacataatcagacccacaagttgtgaaaattatcgattgtccttcacaggagcattattaaatctaatgttgactaaaattttggacccaaaaaacctaacagattcatggaagaagatacaattgacccacatgcctagaaaatgcatttcgggataataggttgtccttcacaggagctttattaattcattctttatctaagatatgttcttcaaacacaataaatttttcttttagtaaaacccaaatgtagtatattttttttgaaaaaaaaaggtaaaggataatgtttttctttttaacaagatcaacaataatattaaaacaacgcaacccattaatattgtagttatcctataatatgcaaagagattttaccttattccaaaaaataaaaattgcgatttcaaacaaaaaaaaaaaaaaagcaatttcaaaaaaaaaaaagaaaaaaagaaaaaaaaataaagtagggcgggcgaagacgtatagttagtataaggaagtgggtacgtgaggtggtaataat

SEQ ID NO: 215295 - DNA, 511 bp, Cannabis indica
gcgcctatctttttaaaaaaacgggcaggggccaaagggaattcaactgattcccacgcatgagcaacaaccaggttacttctctcatcccgagtccaagcctcttcagatttgaaactcctcttgaacttagcagcaatccctccaaagtaaaggcagaggggtctgtgatcagagttgctggtatggaaagatcggagagcggatctggggaaaagagagttccatttctcattaacaaggcccttgtcgagagccgatttaacatgggcgacgcaggacgatggttatcccaagttaatttatctccatggattggtaaattaatgagacctcaagagttaaccaggttcgaaataatggggataaaggggtccttcccttttgagccctccctctctgattcattgagcacaaaatttgtatcccccaagattagccaagggccgccaaatttatctcccatattttctatcattatatattccataaattataaagcattgcatta

SEQ ID NO: 215296 - DNA, 1157 bp, Cannabis indica
tcgaaccaccttttgtaaccatcagacccagcccatcggacccatcggacccccatcggacccatcgggtcttcgtcttccccaacccattcactcctgaatcggactgcatcggacccggtggttcggtcgagatgggttcgtggtggaggaggtggccgatcgcgtgtgggttttcgttttggtcggttttcgtggtggtcatggcgtcgagcggtgcggtggttgcggcagtcgagcggtgcggtggaggaggtggctcggcaaggaggctttgtgggttttgggtttgatttgagagagaaaggaggacgagagagagaggttgagaaaaatgggaggggtattttagggtttagggaaaagtatacccattttttcaatagctataattattagtttagggaacaaatttaggtataaaaaatgcatagaaaatcaaatttcccgatcatccactaaattatagtgtaccaccattggtatttgtacccaaactatgtccactttgttctttaaggtaaattagcatgcatatatgtgtgtggggttttagtaaaaatgtgagatatatatgggtgataaggtggtaaaaggttttactagagaggattcttttcataagctctgtcaaggcttagaagaatttatggtgaatcaaggagactcacaaatagggaatgctcaatatactatttaatgccttatataaaataattgatcttggatttttatgagcattaattgtgttcattaattcttattgattatagaatgtaaatttataacatatgccatcccagtttggtttgttggttgaggactgtcgtactattgttgctagtttgaataatgtccttatttcttatgttaatcgatctgcaaatagggctgcccattgtgttgctagggggtcttatttattgtcaggttgtatttttaatgagctaaatgctccgctttctttgtgtgacattgttaaggctgatgcctgttaatttttaatgaaactcctttattcaaaaaaaaaaataaaatatatattctgtaaaaattattaattggactctctattttgttaaataataaattagacactatatttttcttaataatacaaaatagaaccttgagctaatttttttattaaaataaaa

SEQ ID NO: 215297 - DNA, 596 bp, Cannabis indica
tttttcagctccaaattcgacctatgccatgtcatcatgatctgtgccacctcattatggcctaggtcgaccgtacatgtcttggacacctaggggtgtgttttgacttgttttttattgttaaaacatattttgtaggtctcgggacctcaaaatctcatttcgacatttgaaaccctaacgggagacctgcgccatcttttggtgccaaaagatggtataggccggctaaggtttatgggaagtccttaatggtatatggatgctagaaaaatactatggccacattagttcttggccaattggtgggagagacctatgccatcttttgggacacaaagatggcacaggtctgccataggtgttctacaccccttgattatttttctcacttgtatttggtaccttgatgttaaaaatatactttggccaaagaaattcctccccaattgatgtggtcgtcttgtgccatcttcttgtgcacaaagatagcacatgtcggctaggttgtttctctaccacttggtggccttcctcacttagttttgatgtgttaatgatgaaaaagtactttggccaaaaaatctccttcccat

SEQ ID NO: 215298 - DNA, 990 bp, Cannabis indica
gcttgaatgtgtgcaaaaagtggttagaacaaaatttttctagtttcctcttttgggctttatcttagatgaaattggtaatctttgtaatagtttttaagtatattttttttttcaccgcgctatcttaatgttgttgcctacatcttagctaaagtcgctcttacaatgtcctcaagtactgtttgatggtcgggttccccaagttatattcagaacttattagtagcagatgctactcaataatgtattctcgcccccaccttttttgagttccatcatggtgagaactttttcctaaaaaaaaaaaatctagatagaccactaactacaacaaaatctactacctttagttatgccatcaaagtgtttatataaatagttaactttgaccaataaaactacattaggagtttaaccatcattatctcttaactttatttgaatttttacaataatgtttatccattgtttaggtgattaaatcttcaattatgtttaaattatattcacaggtttagtgaatacattattaatttacataaattttatagtaaataaaaaagattattagaaaaaaaataattaaaaatattataaacttttaatttttttaaatattaatatttttatttttaaaagtaaatatattattatagaaagtatggagtttttattgtatatatatacatgtaaatgcaatcgtcttgtaaaaatatataccttacattctaataaatttaaaatcaataataaattaaaaaaaatttcctaccaataaaaaacttttgttaaattctaccgtatagtcttgccatatatttaagtaaaaacatataattgttgtcttgaatgaccattcattatttcattgtataggtaagagttggtagtaatataaaggagagaagagacttatagataggtcagtaattgttggtgtgataaaatatcaatggtgattattatgaaatatgaatgatatgaaag

SEQ ID NO: 215299 - DNA, 583 bp, Cannabis indica
tattcttaaactttacgaaaaatgtaatatgtaaatcagtttaccataattaaaatggaaagcatcaatttcttattacaataatttcaatttaaaatataaaataaataataataaaattaaaaatatggttaaaaatatttataatattttaaatttaaatttctttatataaaatatatacataatttttctttttatttttaattccaaagttaaaccaataaatttataaaatataattaaaaatatttataatactttaaatattttaaatttaaataaaaatttccttatataaaatatctatataaattttatttttaaatatatatcataatattatacaattaataaaaaatattctattaaataataggatatatattctattaaaattgaaataagaactcaaaaaaatatcgttaaacataactacaattttatataaaataccaaccaactatgtaagtaacgttaaggtcatgtactactaagttaatgggagaacatgattctcatgatcaaaaatgtacgacacgaacgtaaaataaatctatatatataaataatatatataaat

SEQ ID NO: 215300 - DNA, 694 bp, Cannabis indica
cccttaaataagtgaccaataaatcaaatcctctctgaactcacctattattcttctctctataaaatcatctaagcttctatgcaacagtaagtaacttcaaccctaagaagaattccttttgtgtatcatacaaccaactttattttttcttttacaatcttcttagcttaactataatttaaaattcatccaaaaaccagcttttcaatttcataaagataaaatgtgtcaaaaactacacatccacatggtagaacataaagataaaatatgtcaaaaaccagcttttcaatttcataaagataaaatgtgtcaaaaactacacatccacatggtagaacataaggattaaatatgtcaaaaaccagcttttcaaatttcataaagataaaatgtgtcaaaaactacacatctacatggtagaacaaacgaaaatggctgcagcaattataagccaaacctattcacaaacagttacataacaacaaatacatgacccagatgttgttctcaaaatccaacaactgaattcaaattcaaaataagaaataaatatttgattaaatttgttttttttttttaaatggtcaaaatatcttatagcaattctagaaataatattttgatttaaatcttacagataatttaaaattgatttactgcacatcatttatgtagaagtgagaaagca

SEQ ID NO: 215301 - DNA, 620 bp, Cannabis indica
attcattaaatgcattagaaagaataaatgaatttggtgaacacatgagacgtcacaacattagagtttctagtcaactataaaataattaacacaaagagaattgttaaaaaaaattaccatattagtgtttaacatattttttagtatcatatttttattaggataattaaatagcacattttataaaacttaacaaaataaattttaaaaaatatctgtaaaatactacctataaaaaaataataaaaaaagataactgctatctcgattacggatacccataattattttatccgaacagaaaaggaaataatactgtgtaaattggaaaataaatagagcaggaaataaccgcaccacacatatatgagcacggtacatactagtgtatacccccgcatattctcctcgatatatattgaatattttgttaattaactatacatatttaatttagggtgattctataatacacccctttaaaagggatgtactgatgtacccttaacttgtttcgacatcaaaaaaaaattttagtctaatttttttacatattcatgtacgttataactatttaagatatcctgcaaaattttgaaaaattcggaataatttac

SEQ ID NO: 215302 - DNA, 552 bp, Cannabis indica
catcacaaattataaattatattaacacccctaccaaacatgatcaatagtatagaaagatgcttcttcttcatattataaaagatgtcatcactataactaaaattcgcaatcaaaatattttttttgaataaatctatatattcaataatcattaattgctataattatcaaactcgttgatttggaaacttcagtaattagagataatgataatacataattccaaatacaataataatataatttccagcaaaaaccactgaatttacaaacaacaaccgagaaaaactatgtacatattttttgagttttcttctctttaaattgtttatgtttgaatattgtgtaaatatatatagttttgaaattgagtgtatatatattttctcctttttttttaatcagagtaaatatgtttgatgtttcttattaaaactatatatcactctgtgattattttaattatttatttactaatacaatataggaaaggtaaaactcaaagagatatcatatataaaaccatcttcaaggaaaaatataaaaaat

SEQ ID NO: 215303 - DNA, 823 bp, Cannabis indica
ttgagatcgcctaggatgcaccacggcaagcttgaggataatttcaaagtacgaagaaggtcccaggtttcttgtcgatgggttcttcgagattcaccatacactccagtcaaacgccactcttcctttccttcctcactgactacaaaatcaatgtgatgatgagagaagcccaccacgtgaccttcttgattagctttccaaagtaaggctagacccccacttctcccttgggcctccacagtaaaaacaccttcaaagcccaatgttcttcccacccattcaactctagctttagcacacttggtttcacataaaaaataccaacttgggtttcttttgagagataatctcttttaaggaacttgaaaagtcccacgggtttcccaagcccacggcaattccaacttatagcattcataatgcttggcgggtctgagaacccagaacccgccccaatcacgttttttgaactttcctcattgacaggaatcataattgcatcaagcccatcaacagcctcctcatgtagggagtcactattctctttatgagagtcaaaagctattaaagatatttgcccaggcccactttcgtagcttttcggcccacttgaagagtccataaacattctcttcctttttgtttcatcagtgggtatataattcttttgaattgaattagttgtcatagaattccctcctaaatgagactttcctttcccatcctgaagagaaaatgctggcccttttaatataattgattgaggatctcctttaccaatcaataacttattaccttgattcatgggattgccaccttg

SEQ ID NO: 215304 - DNA, 526 bp, Cannabis indica
tctaggtgacaaaaagggcacatcaaagggacatcaacatgcttcactttcagattgatacatgttgggaggttatttcggcaagctcaccaaagaaagacagagatttttgctggaattttcaagttccataacttcctccacaaccccaaattatccccaccgcccatctaccattcacagcttgaagcctcttataagcactttttactgaatattgaccagaagcttcgaaaaaccagtatctagagtcaaattcacaagatgagctgatcacaacccccctcacaagatctttgtcaacatcagaaaaaagatcattaagaatatcctcatcccaccttctctcatttagaaccattaattgggatacttttgcattcaataaagctggatgagtggatgtaatatacggattatctttattcatcaaccaaggttggttcaacacatccaccaacgagccattagctatactccaatgaacaccagacttgattaaggattgactctcaaatatgctacg

SEQ ID NO: 215305 - DNA, 1095 bp, Cannabis indica
aattaaatattacacatttttttaaaaaattaaatcacaccaaatgtttattaaaatattattttatttaatatttatttttatttatattgttctttttagtgttatattatttttattttatttagtattagtattttatttttgttattttgtatttttaatatattagtgtgttttaatcaaattttttttagctatcattaaactaaatattattatatatttatataacataatttaaaacctaattctcatcacaataaaatacaaatccaacatacataataattattagttaatttaatttaacctaattcttacgataatataatcaaaatataacaatacaacacaaatccgatccaacctaataagtataagtttagctcttaataaacaagttcaatacgtcaaatgcaaatatcatataaattaataaaataaattactcttaagtttaattttttaaggaaaataatacatggtaatttagatttaggagtttttatgtgaactcatgtatgcatgcaggtgaatattaagaataaaattaaataatatatatttttaaaactaaataaataaatacataaattaataaatatattttaaaaataaatttcccatgtgagtgtatatgcatgctttatagccctaggggcaaaatggtcttttgacctttattttctacaattgataaaagagtattttgagggaataagaaatcaatttctggacatttctttccctcttggtcgaccctctctctctctctcaaaccctctctttttttctctttgatttggtgagaaaattgttggaagcttgcttaaatcttgctattttggaattgaaggaggttcttgctttgtttgaggtagtttttacagcctttaaactttgaattcttgctgaattttattgttgataaagcatgaaattggttgagaatgtggttgtgttgcatgcttgatgaatttgagttaattttgataagtttgagtgtgtcttgcttgaattcttgatgtgttggttaattgaaatcttgatggagattttagggtttattttcatgtcttgaattcagctttt

SEQ ID NO: 215306 - DNA, 657 bp, Cannabis indica
ctcttaagaaaaacaatacatggaaagttgtatcccttccccctggatgccatgtaattggaaataaatgggtgtacaaaatcaaatacaattctaaaggagaggttgaaagacataaggcccgattagttgcaaaaggttacaaccaacaacatggcattgactatgtggaaacttttgcaccagttgcaaagtttaacactctcaaacttccttttgccctcactgccataaataattgggaattacatcaaatggacatcaacaatgccttcttacatggtgatcttactgaagatgtatatatgtccattccaaaaggctatgttcatgatggtcctcttcccccaaacgctggctgcaaactcaacaaaagcctatatggcttaaaacagtcatcaaggcaatggtttgccaaactcagctcaactctccttgatattggtttcaaacaatcacccaatgaccattctttattcattagaactacttctaccaacttcctatctctcttagtttatgtcgatgacataatcattgctagcaacaatcatgatgatgcctctgcctttaaactattcctacactcaaaattccacctcaaagactttggttccccttgattctttcttgagttggaaatagctcggtcaaaag

SEQ ID NO: 215307 - DNA, 534 bp, Cannabis indica
cgtaatatatatgatgagatgagatgattggtgatgagttgaatatgttgcagatgaaaatagttctggatagtagtcaactgaagaggcttggtgcccctgaagagattgctgctgctgctgttttttgggcttctgatgatgcttcctacattactggagaaacccttgtggtggctggaggcatcccatccaggctataataataataataataataataataataataataataataataataataataataataataataataataataataataataataccatataaaataataattatagactccatttaagatcaatactcggtccagttgagtgagaaaacgatgtttacttctttacgaagcctgcccaattaattctatattttacttctgttaaaattacagaatattaaatggactatatgtattacttttatgaattacttaattattcttttctaatttcgtcattttaagtgttttcttttttacttcaaatgatctcaatgcgccaataacattcg

SEQ ID NO: 215308 - DNA, 569 bp, Cannabis indica
catatttgttagtttaaacttcaaagatgtaatttagtgtgataaatttaacatcaacttattaagaatatgaaaaacagaattagtaattgcaatataatgcaaagtatttgaagataaaacaaaaaatgagtaacaaggcttaaatgagcataaaccaattcaaacttgtatttatgagttttaagaacttcattctcatataagatttttttaagaaaaaaaaagtcgtgaaaggctattaaattcttataacaagtataagaaattgaagacagaaaaatacaaaaatataaggaaatattacctggtgcagcatagccaatagatccctttaagccaattgtgctactagcttgattttgaggaaaaccatttgtggttgagagaattctcgctatgccaaagtctccaacatgagcaaccatatcatcatcaagaagaatattgcttggctttaaatcacagtggatgattggaggttcgcattcgaagtgaagatactgtaatgcagaagcaacatcaatagcaacatttagtctttggagaaagttcaagtttcttgaaca

SEQ ID NO: 215309 - DNA, 701 bp, Cannabis indica
tgccacgtgtcatcaatttgcggcatctccctaagcaatctctcgaaatctttgaaggaaatatttgtggtcaaagttgttgtaatatcgggtgcagtagcagtagctgatgatgatgatgatgaattataatgatcggtagtggagcgtgttctgaaggctctgtggccatcgtggccgtcgtcgtgatcttccaccttggaatcttttccggtcagcttctgtaccacatctttgaagcctttggcgtcggtttctacgtattgggtgttgattatcacaacctttgggggtttgttactattattgtctcttcttggtgtgttataattaccactgccggacatggtgacaaagtatataatatatatatatatatatatattcctctctcttgattctgatgactaagttgttccaatcgttgagttatatatatgtatataataattgaaactttcttttaagcgatatgatcaatgaaattaatgatgcatgtaataataaatgatacttgtacggaatttatattattgagaatcagaaagaaattattaaagaagtaggaaaggaatcaatgaagtaagttgaccgttgtttgtgtcggtctcggtttaattaattgatatataatttggtcaaaccatgcagttgactgttgagaaaatcttctctaattaactgctatatatatcctctta

SEQ ID NO: 215310 - DNA, 398 bp, Cannabis indica
aataaaaaatacaaaaaacaactaatttaaagtgtaaaaataaaaaaacttcattattatttttatttatgttgttctttttagttttataatttagtgttatgttgtttttattttatttaatattagtatttttatgtgcagtattattgttattttgtatttttaaatatgttagtgttttaaattaattattatttttgtggtaaattttaatttaaagactaaactataagattatttttttaaaagaaaattacgctaaattgatatagattcaaaatataacacaattaataatgtagaatttaatgtatcatttgagtggaaagatgccgaaattctacacaactttataaaatagtgcatcattggaaatattctaatagtgtgaaatt

SEQ ID NO: 215311 - DNA, 879 bp, Cannabis indica
aattaaagctaagcagtctttaccaaaaagggcgaaaaatccttaagagaaaaagccctataattatatcagaaatatctaattagactcgtggactatgcagaattttaactgcaaaatcacgtaaaaagctttgtgttctttattttttctttattgctattattttctgtccatcacgatttaggttttaatatagttaacgaaaatctacgttaacatcactctaagatctctctaattagtattatttgttctctccttaattctcttatttttataatttttaattatattaattgactcgttaattattaattaattaataaaatatttataaatattaaaaggagattaacggaccgtaactaccattgaaaacaaaattgtagcgaacttattttttttttaaaactttaagatatttaaaaaaacttcaaatattacacaattatcccaaaaaaaatagatcattcacgttttttttaaaaaaaattaaaatacttaaaatatatatttatatataagctaaattattatagttcaatttactgtttaattttttttaattctatttctctcttattccctcatgattggagttatttttttcttaccggcttaaatagtgatacaaatagttagaagataaatttacattaaagtttgtagaatgtgagagtcacttaatattaagtaataattttattcatactttttcctctctttaatttttttttattaattattcaatacttaatttgtctatcatttatcctatagaaaaaatctaatgcatacataataataaaaaaaatagttcttaagtttaagaatctgttgagtgaaggttttttataccgtctacaaaatttagaa

SEQ ID NO: 215312 - DNA, 521 bp, Cannabis indica
atatatatatatgtgtatgttttgttttacttttgatgtattaagaattttttgattgtatttgatttaagtattttatgtgtatgttaaaaaatttaaaaaatttaaaagaatgaaaaaattgaccaaaaaatataataatcattaaaaaattaaaaagtatttttatttttatataaatattttaaaattttaaataataataattattaaaaaattaattaatttatttttattttattataaaaaaataattttagtaattaattatttttaagtaatttataaataaattttttatatattcaaattaaaaaatgaataagaagaattttatttacttaaatttaattatatcaagtgaaataataaaattagttaaattagtaatatttgttatatttacttaataaaaaataatttaattttttaaagttatatataaaaaaaaattgaatgtatttaataatgaatatttttattattatacttacaaatttaccatatatagctttcttata

SEQ ID NO: 215313 - DNA, 940 bp, Cannabis indica
ttaactttaccttttgaatttttttatttataaaaatattttttcaataaaactaataaaccattttttagttgttttatagttgtattataactatcataatattatttttctggttattttttgctgttttatatttaatttatagttgccgtgatgttgatttcttgttgttttttagtttattttttttttttactttttgctgagcaaagtatattttataattttaaaattttacaagcgtaattttataattaaaaaattttagactataaaattataaataaaaaaaaataacttttaaaaatttccctctaaattattcatatatctaatcaacataattaaatttagacttattcaaaattaattttaaataagatttttttaattaattaagcacgttttgaaattattgatccatcttaataatggttccatacaattattagtacaattattgcctctgatatttgatattcagtggggttattatttattttttaaaattaattgtaaaagccttggccttatacaaaatgcagcagttcattttgagtctaactgtgtaataattaagattaacaattatatttagattagtttttttaggattaaagtatttcattatattgattgtaattttgtctcttttcactgttgctactgtattttattgtcctaaactgtttgttttagagctcattacattataagaaggtgttttagggtcatcattcttcttaaaaaaataatggttctataatttttatacatttatgtctatttatgtctgttttggtatctaaaaaaagagtagtgctaatcacaccttattttacactctctctatattctaatgacaagtgtcattttttaagcaatgtttatttatacctaatatttattcatactattataactttattacatttgt

SEQ ID NO: 215314 - DNA, 508 bp, Cannabis indica
aaaatatagagatttaagatgaggagtacaaacaaaaatggtaaagatggagacaccaatttgatctcggagttcgcccaaaattaccggctacttctccgtcaagcttcttcagagcttgaatccattcatcaacaataggttacaatctttgatttacaacttttgatttcactcttattttctcttttttgatactaacaaatctctctatttttctttacatgaacacacaagtgactgtctaggaggaactctcacaagctggctcttttgtgttctcacttttgttctctcataaaagaaggaaaaacatatccttttatagatctgtgatttctgatctggggcaaagccctagagatattttctgtaactgtttttctgttgtaactgttttatcttctttacttgatcttgtttttgttgtaagttgtaagtgtaaatatatctgtaattttggaaccctgtgaataatattatgcaacttaggatatataagggaatc

SEQ ID NO: 215315 - DNA, 650 bp, Cannabis indica
tgacaacataggtgatttcaggttgtgtaatggtgagatatattaatttgccaatcaagcttcgatagacagtaggatcagttagtaatgcccctttatccttgctgagtttgaggttgcattccatgggagaggatgttggtttagcacttagagtacccgtgtcttttagcgattgtaaagtgaaaaggcgttgagaaacagatattcctttgctgtgcgacctatttcaagccctagaaagaatcttaaagaaccaatgtctcttaatttgaacttgctgttaagagaaagcttaaaagtgaatatagcatggtcattgttacttgcaacaacaatgtcatctacatatattaacacatcaatgaacatgttttgttttttttttagttgaataatgaattattagatgatgattgttgagaagccactctttgtctcagttttgtagtaccacttgtcctacgaggcgttgcttttaggtccgactatatgctcttttttaagttaggcgaaacggaaggtcaggggaggcagtatatcctgggggaagttttctatgtaaacttacttcttcaaggtcgtccatataggaagtgcattgtggatgtctattagtgaacattacaattgttcattgcagcaagtgc

SEQ ID NO: 215316 - DNA, 581 bp, Cannabis indica
ctggggaaacatcttcaccggcgaccactgtgggggcagttctcgcatatcacacctactgtggtgtttgaaggtatcatccaattgaccacggcccagtatacgaccttacaagaccaaacgcaggctttgcaggctgaaatcaatggaagggtcaggacccgacgtcctccaagactaccaaacacatgttcagataaccccaaggtgacgaatactaggcgacaaactaatcgcacttgcagagaatgcatgactggacaagagggacttgacttgaatcaaccaacacagagggaacaagtcgcacgaaactccaactgtgaagtaccacaagaggaggatcctaagtgatgtaacccacacagcaaagcccaaccgcataatgaggtaaacaatgttgaatctcattcttcatcctcacaaagttgtactcctagtgtctatacgaggtctggctctgtggaaacaccacgaggaggaagataccaaattcacagaggtgatctacgtgatcacctcaacgcaatttttagggcacgatctaacacgccccataaccacgatgagccccgtgatcc

SEQ ID NO: 215317 - DNA, 1076 bp, Cannabis indica
acacctagtaatactagagtaaaatggaaaatacattaaatgtaaatttacaactaattgctagcttgatttcctacagcaatgaataatgaggttgatgctttaaagaaagcccgcacctagacattggttccttatcaaccttcacatgcaaatcattgacaacaaatgggttcatcgaataaaactcaatgctgatggaacattggacaagttcaaatctcgtcttgttgctaagggatatttgcaaactccaggaattgactatgctgaaatgtttagtcctgttgtgaagccagtcacagttcgcattgttctatcgcttgctgtcacctccaattgggaagtaaagcagctggatgttagtaatgccttcttaaatggagatttacatgagactgtctacatgacacaacctagaggatttgaagatccctttaaacccactcatatttgccatcttcacaaggtgttgtacggattgaaacaggctccaagggcatggagtgaaaagttgagacacacactgctacaatggggattcaagcatctcggtcagacacttccctctttacctatggttcaaaagacatgttggttatccttttagtatatgttgatgatatactaattactggaccaaataatcaactcatcaccaagcttatcatggatctcaacacatgtttctctttgaaagattttggggccggttcatttctttcttgatattgagatctatagagatcaagctggaatgcacttgtctcagagtaagtatatagccgaactcttagtaaagttacaacttgatggtgctaaaaattgtcccaatccaacaagttccacctccaaattgtctttaactgctggtgaactgtttcctaatgtaactttgtaccgtagtacacttggtgctctacaatatctcactcttactcgtcccgatgttgcatacataatcaacaaactcagtcagtttatacatgctccgactgttattcattgggaggcttgcaagcgtctgttaaggtatctcaaaggcacgatttcagatggattgcttcttcgaccag

SEQ ID NO: 215318 - DNA, 1907 bp, Cannabis indica
gggtcttccgctctctccgtcgtcgggcattcatgcgcaagttagctgcccaactcgtcactgtaagcttcatctacaatttcctttattcatattctttctttctctctacttttagtagatctcaagtattcaaaaaaaaaaaaaaaaatgaagactttcggattacaaatttggtgatccttgtgcagcattattgcagaaaaagacctatacgaaatgggcagagtcgaaaattttcaacccacagtgaagcaggttaatcactcttatcctttcaactacttaatttgggtttttacttttcttgtcaaggttgttcatttctggaaataatttaccaaattaaaatgtttatttttaattgagatcgattttttatgtattgagtggcagatgaccttgccttggaaaaagatgctgaaagaaaaattggatgggtgttgaaactgttctttgctgggactgctacgttttttggttaccagatttttccatacttgggtctgtacttggatgttttcatttcatcatttactatctcagtttatttctttcttttgttacagcattttaatattatttatataattatccatgtaatgtaccaggggataatttgttgcagcagtcattgtctcttttgcatgtaaaggatccgttgtttaaaagaatgggagcttcaagattagcccgttttgctattgatggtaagctacttgtttgtgtctctgaaaggactttttatgtttaactaaatgccaatgaaaacttaaatgcccagttcttttttgttatttatgattgtttctcttcaatttaacttctcatttgccttttttatttatcacaatgttaattgaagtattggttggctcataaagaagtcaggcaagtgctacctttgttgtagaggggagaaaatgttagagtttgtgatgatactgaattatagagaaaatgtctattgacaaactagttagtcgttgtcattcacaagacacttggtgctagctcaagtttacttttgggtgtgtgggaaagggagggtttcaaaagaaaaaaaagtttcactcaattatctagactatactttgtcgtcagtcaattgagaaaaaagattgattcgttcaattatctttactttgttataggttatgttgttagtttccttcagatactttttatcttaagctggctgtgcattggattgtaacagttgatttcttggactttagaatttatatataaaacttgttcttttctttttaatgcttagatgaaagaagactgaaaattgtcgaagttggtggggctcatgagctcttaaagatgttggaggcagctaaagatgactgtactcgtaaggaagctttaaaggctctctcggctatctcaaaatcaggtcagactcagttttccacttttctaatatgcctacggagccatgactagttttgaattctgttctcgctaccaaaacttttttcaattttttattttttatttttctttcttccaatgagttccttatagtcccttcaaatgctttatactaataaagattttctaagagaacgatgggctttgtgtaactacacttatgatactctactttcattgttggttggaaagaacatgttaactcttgtatcaagacaagttacaagtataatggtcctgtaactaacttatgatatgcttggcttggctatatttcaaagcaagtccttaacaattttcagttttgtaatcttttttcgcattccagataaagctgttgaagcattacatcaagctggcacaactgctataatcaattctaccccaaattcctcgcagaatattgaaatcgagcagtacaaatctagcttgttgaagagattccatgatctgaaatatgatgt

SEQ ID NO: 215319 - DNA, 721 bp, Cannabis indica
ctaaaattggccatactatactcacaacgcacctgtaaattgaaaagtacataatcaatacctcattaaacatacattcatcaaatgctaacagtagttcacactccgagaccctatgcaagtataataatcaattatatgacaaaaactacaagttaatgtaggataactgcaaattgatggctacatggttctgattgtcagataagttgagcagctagcatttcactaccagcttacataaataacccaaacaaataagtatgagtgattaccaatgcttggtcatttagtagttggcttctattttgaacctgtaaaaaaaattataataacctcaaatatgcttcatcgatttggaaaatgaagaaataaaaatgaaacgataatcagcatttttggggagtagtacctctcgggggccataaacagcagccacaactttggtgttcccatttcaaaaacggcagaactgatacaaaataaatacaacattattcttgttattattatcaatccagaaactgagtttgtattacagcaaaaatgtttagtattaatacccgtctgctttagccacggctccgagttctgctcgaatttgcctcatctgataccaaagaaaaaacagttttataaatattataagccataaattaaagattcaaaagcaatatttgagagagagagagagagagagagagagagagagagagctagt

SEQ ID NO: 215320 - DNA, 689 bp, Cannabis indica
gataggattgtgttgggacgggtcgggtcgttgagggcctaaaaacgggtacgggtaaaagctgccccacttgaaaatagactaatctttaaaatacatgtcgttttgtcttgtgaaagcgaaaaacggcacccaagtttcttggaactaatgaacgtctttgtcgtttttcaatccgttaagagaaaattatggtgccttaacatacttttaattagttttttatttttaaaattagaaaattaaaaatatttttcaaaaatatattttataaaactatttttatttttaattttgatttttttttaaattttgatttttaatttttttttattatttgcatacccaagaattctctcctcaaacaaagaatcacctcgcctcccctcaaacgatatttcattggtccactctctacttactagtgtacctcatttcaatgcgttggaacaaaaacaccttaaatggaattgtgagattaccgtctaactaatgtggaactttggttgcatgctcaacaatcctcccctcaaacaaaaaaccatattgcttcccctcaaacaaaggaccacctcgcctccccttaaacgaactaccatttgtccattctctaccaactagtgtactttcttccaatgcgttggaacacacggttacatagaatcgtgagattatcgaggctcatctcc

SEQ ID NO: 215321 - DNA, 1245 bp, Cannabis indica
attgtgaggtcctcatatttgtaaacttgtaggtggtgtgattggtgtagttatttatgaaactaacacaagaattaaatttaatatataggttgtagtcaaatataaatgtatataggctaatcaattgcttggcctatttgggcagtagtctaactatgtatcaaggcccaacatcaagatttattatttcttttaaagcaacatctatgtttactataaatgaaacatcgttttgtaatagtctttagtgaactcaaacatagtatcacatcttattagtcataaaagattttagaaaaataaattttatattagttaacacgtccaaatattgtgatggtaattaaatattcatcagtaaaccttctatctattttcatgaattagataaataatgtaatcttttaatcttgtgatgttgtcattttttttgagtattatagcttttttttttgggaaacaacacacttatttctttcatctcaatacttcttttgttttgaagatttgtctcttggataatatacttatctatgttattgtaccatatataatactggtcagttggagagcttttatgattgattttttagtaattaacaaattaatctccaaaattttaaattgcacttagatatatataagatcattatttataataaaaaaaagagattacatgatactagggatagagaataccctttcaccacatgcatgcatgcttttaagagtactgtagaaggacgtgactcaataccaactaaagttactaataaacacgtgaacacaaactaaaacgcaacatactcttagaaagacaacataaggcgtaccataataagaacacacaacaaaatatcataaaaataatttagagaaacgttagaccattcgtaggtttggagaggatggggtggccagtgagtggtgcataaaaggcgagttcccaagacctcaatagagaagaattacctcagggactctcgcttcacctttgaggtagtcattgacagcttccagaaatgcttccaccatcttcacctggtcacttccttcaccctggagcttgttttgtcagtacatggtcgaagcaagctcgataatcctctttcgagcctcatctaccaggtcaacacatttgtttttgaagcattcactgagttaagagtgctttgcaacatgacacaattgcagcaaggttctatcgcctgagaccggtatctcctggaccgagagggagat

SEQ ID NO: 215322 - DNA, 768 bp, Cannabis indica
tttttttttttttttgttgaaagttgcataccaattcaattttattactgaaaataatacaaaatagttgctaatagttgatcttaatatacccaacttattattattgacagcaatatgattcttaattttggtcaaatttcaccttttaattatatacttattaatatttaatttataaattaatataaaattatcacttttacatttaaatacatgatttattttaaaatataatataattattagaatgtataattaggaaattaatatcctagtaattctacaattatatctaaacactccttattcataatttttgtaacgtacaattctataaaaatatcttcttttaataattggctctcctaaatatttcgtcctagctccgcccctagtccttgaataatattttgtctaagtagtttgggagaaatttttaatagcttgaaaagtttgaggacacgattttgtacacaaatttagggagcaaattagccttctttttatattgggggggaacgagaacttgaaccttctcttatgcatcgatacttaaagtgttactattttgcaaatatttgatattattgtcgtcagaaaaattgaattggcatttaaatgcaactattaacaaatatttggtcctactgccgaaaataccactattttgttcagggaagaacgaacttttcctacactactgcaaaaaacaagaagctacaaacttctaagctatgtcatgaaaatgaagatgttcaaacaaaa

SEQ ID NO: 215323 - DNA, 590 bp, Cannabis indica
ctaataagaaagataatctatggatgaagtgggtgtatagtgtgtacattgatcaagaaaatttgtgggagtacaatgcccctgcccacagcagctggtactggtgtagaattgtcaaagtaaaagaagaagtgaacctgatatcacctccagatcagtttattgcatctgatttcaaatatagcacatatgtacaagatgttaaatcaagaacaaagaagttttcatgttagcaagcaagtatggagcaggttaaatgttccaaagcacagttttcttctctggatagcagtgcagaatcggttgaaaataagggaaacttcaaaaaatgtagattgtggttgatgcttcctacatactgtgtaataatgcagtagaaaacactctgcatctgttctttgactgcaggtacactcgaagctgcttacaagaattaaaaatacggcggcactagaggatcaaagctgaatccctaccgagtattttgagatggattgatcgagcaaaactgaacaaattcaaggcaagctgttacacagcatgcattgctgccttggtttacaagatttggcaagctaggaatcaaatgt

SEQ ID NO: 215324 - DNA, 759 bp, Cannabis indica
gatgtttactgtgtttacatgagatttttgtctgtgtgattttgtcactaaatgtaaatttgttttaatatgaattgtgtgaatatcgctcatcatcacgtgataaacagaagaataaagtcttaattaaatgagattgatcgatcagttagccaaaagacatgtgtgaagcagaagaaacagtagtacgtagtaccaagtgggaacatatcagctgaagggacgtgtcaaatttatgtgactaattatcttatattaattggaggggtcaattttataatctcataacagcaacagcttaaatagattcaatgtcaaaacttagattaattggcaaaatggtaatgattggatatgaatcttttccaagtgaaatatataactagagcacacaaaataacacttacaagtagacgatttgtatcagaattaacccaaaaggaaaatttataagttctgtttgttttatcagcttgtttagtgctaaagctaccctcctgaagattgagaagtaagatcggagttgaaagtaattcttcatgtagaatcccaagatcataaagataacaatgaatgagcaagacttaacataaatgaatataagagagaatggataacattatttttgcaagtgaataccaactttattgaaatagattaaaaaacatgacaggactaacattcatgcataagtgcatagaacaaggtaagaaacacaattcagacaatcagactaaagtgaacaggaaataaaggaaa

SEQ ID NO: 215325 - DNA, 726 bp, Cannabis indica
tggtggtgctcgagcaagagagagagggaggagagagggggcagaaagagagagagctgaaatgtgggtttgctaaaaattattaggttgctgaaatgagaattgggggggaatacttaatgttcagtaaaaatatatatatataaggggtatacctgacagttttaaattgtcgggtatagggggtatttttaattttatttaatttttcttttttaaccaaaaatgtctcctatttttgttgctacggttccaaactgtcgggaatactcatttttctcaacgattttaaattgtggctcaatttttttagcgacggtcctcgaaaaaaatcatttttaggaccgtcgtgaattgtcatttttgtagtagtaagtgtagagatttcagatcggtttttacacttctccaaaatcactgctccaaccccagagtaatcaccatctcatcagtagattttctagcactaacgcaagtctagaaacctaatttggtgtagtctaagagtattaaaatatcacccttatcgactaacatatagtttctcttcttgatcttaagatttatttgattgtcttccaatgttcctttcctgaattaatcttatgcctactcattactcccactcaacagtaggtgtatggtctaatgcatagcaaagcatacctgagacctctcactgttgatactaaggaattatttccttggcttttatcttttctggaa

SEQ ID NO: 215326 - DNA, 586 bp, Cannabis indica
cccaagtttatgtttagagaacgccccacaaacagatgttcaaccattgacggagattccaatttaaaggcatagtacttcagtacctaaagcaaaacaaaaatcacctgtaagtatttattttttttcttttcttatgttttattttcacttcattttgtttattaacatgtctcactttgtttaggtttggaaaccaaaaattacaatgcaaagttcaaaacacttgataaacagatgaaatatatcttttcaaatcaaaaaaatattcatggtgaacttgtgatattcaacaaaaattttaaagattttttttagatactaagtgaatacacaaggagtactccatcctaaagatcttatgttgatatgtctgctcttgaaaatgatgttcctcttactaagttaacctatttctttaaattctacattccataatgctcatagggatattgaatttaaattgctaacttgtttctttattttaatttgaaaaggacaaaactgaacattctttatcaagccatggagttgtacctcgtaatgttcatggggatgatggatatgcttaccctcaaaatgagat

SEQ ID NO: 215327 - DNA, 557 bp, Cannabis indica
tccaagagtgcgccatttgtcaacagcataagtatgcaaccactaccccacctggtttactgcagcccattgccctgcccgctcaagtttgggatgatatctctgtagatttcatcgaaggtttgccaagatcggaaggctgggataccattatggtagtagtggatagattgagcaagtacacccattttgtcaccctaaaacatccattcacagccacaacaattgcgcaagtcttccttaaagaggtagtccgcctccacggtttacccttgtccattatttcagaccgtgatcggatctttactagccacttttggagtgagttacacaaatggcaaggtacatccctcaagcgcagcaccgcttattacccacaaactgacggttaaacagaagtggtgaatcggactcttgagacacacctccgttgttttgctaacgagaaacccaagcaatgggctaaatggttggcttgggcagaatattggtataatacttccacccattcgagcaccaatcttactccattccaggcattgtatggcagagatccc

SEQ ID NO: 215328 - DNA, 528 bp, Cannabis indica
agagagagagagagagcatcgaaaatctgaaaatcaagaatctaagatcaccccagaaaaaactcaaatggtcatgtgatttgctttgctcccacaaaatcctagactccttcgaggtttgattcgaatttctccagagtacttatatagcaattgttgtagtgtcttagtcctagattaggggagcctagtttcaaagaggaaattcgagtttcttttactaattctttgtcatagcaataagaatttaaacatgaaaagagagcttaagagtaaaagattgaaatatttggagaaaaaaaaaagaagcaagagtgctggcccttcctacatattgatggttttgataacttttataatggccaaagaatttatacaagtacaatcgagagaatgaattacaagaaggcaaactttatatctttgtatgttccaaagaatgaccactaaagggtactaaaaaaacctcctaaatctctaaggatactgggctgtacagagtttgccttggctaggctagtgcctaat

SEQ ID NO: 215329 - DNA, 733 bp, Cannabis indica
tctcattatatttgatgtttttacgctgttttagcgggtatcatatatgaaatcaaaatttgagtatatttgagaaaaaatgtatagatccaatttgtaagaagatttgttggggcttttgccaaattgttgaatttggttcagtttaattaatagaattattacttcttattaaaaacaaataatgtatattaaacattgataatcggtgttgagctaatttttcaatcattttaaagagaattcatacgaaaataagcaacataaatgcaagaaattaacagaaaaagagtgaatttccattaaattaaaaatatatcgaactacatatttctacaagaaccaaaacaacacgaaaaggggaaatacaagacctaattacataaccagacctagtttttcctattattttccattaacgcgtttaggccttcttgggagatttgggcgatttagttgcagttttctcagattcagcagacttagtcttctttggtagcaaaactgggttaatgttgggaagaacaccaccgctggcgattgtaacaccgtggagcaatttccccaattcctcatcgttcctcacagccaattgaacgtgtctagggttaattcttgtcttcttgttgtcacgggcagcatttccagccattccaaaacctcagcggcgaggtattcaagaacagcagctaggtagacggggagcaccggttccgagtacgttgagcgtatc

SEQ ID NO: 215330 - DNA, 617 bp, Cannabis indica
cgcttaatattataactacccttgaggagggtaatgttgatactttaaaaagggtaggattgaatcattaccttctattatattaatttgaatagaatttttgaattaattaataaatttaaataccaataatattatcatttattataaataaaatattacagtatatattaagtttgtgagatcggtttttttaactgagttatttttatattattagcaataatatatgtatattcattatacataaattttatgcggatagtgtacacataaatgacatagcaaacaaaaataaataatatagtgataaaatatataaaaatattcattttaattaataaaaaatacaataatacactataatttttatttttttaatacactattatagttataatagtgtatattcattattatgcatacactaccctaattttctttaaataatacactataattttattttttttattactactattataactattcatttatctgagtacgtctgctcacatttacacagacatatcctaaaaatatacaagatatctaacaaaaacttacaacattgaaaattttttcctaagtagtacgatcacatatctcatcca

SEQ ID NO: 215331 - DNA, 701 bp, Cannabis indica
atgtgcatagcaatgattgctagagattacctaagcaggctgatttgggtgtttacggtcaatatggacttctctgatgccctgtgtggagaactgctacagtttgcttggcgctagaggttgcaaaggacaaaggacaccagtttatcctggtggaaagcgtttcaaagatagtgatcaacactctcaacggcttggatccccgatgggaaattgaaaactactctttattttgtaaaagaatcgctcattccttcactacttgtttattttgttttacggctagatcgtgtaactttatggcccataacgtggccaactgggcttttacccataactactatggttgtattgatgttgcaactattcctaagaatatttgttgtaatgaccgcgaggtctaatgtcttatgaatgaacgtttcttttcaaaaaataaaatatatagtcacatgctaacgtttgtgatttaatttttttttataaacactaaaaaaaaaatgataagttgtcttgtctcttgtgatatttttttttattaaaattaattacgaaagtgatgggtggtcttatcacttgtgacaattttttttaattaaaactacattcttacaaaatcttctcctacacaatcttctcaaataaatgcttctcttctctctcaatacccatattcttttgtagtaggtatccaaaaaaaa

SEQ ID NO: 215332 - DNA, 758 bp, Cannabis indica
gattctaactcctaagtggcttcttctaccttaatgttcctccagagtatcttgaccaacgctatggtcttgttctgaagaacatttttcttcctatcgaggacttgaactggttggtcctcgtaggataaatctgattgtagctctagggcttcgtaactcaagacatgagtcaggtctgacacatattttttcaacatcgaaatatgaaatatgttatgtacaactagtaatgcttgtggtaaggctagtcgatacgtgttggtattatggtacaaaatcaggtgagcagtgaagagtttcatattatctgattatcattgtaccaatatcctaaaggatctccagatatttgtacattaaatcaaaacaataaaatacaagtttagaatatacctcttgaagactatcaaagtatcctcgaaacttctcgtatattgtattccttaatccagatgatgagtatgatgcaattagactcacactagtgtttttcaaatcgttccagcacacaagaaatattgtgggctattaggataaagtgtataactttgctcttgttgagttctcaacacatgagcaagaacagatgagagaaaaaacaatttcttttttctctctataattttgaaaattacagtgttttgggaagtgagaagtgtgttctgatttttcaaattaaacttctatttatagtagttaaattccattaattatgtcatattaattgtttaaacaaataaatgtctataaccaaa

SEQ ID NO: 215333 - DNA, 773 bp, Cannabis indica
ccatttatcattttacaaaaatttggtacaacactcttgtactaacccattgatatacggtatcatttcataagacaaatggtagaatctaaactttttgattttgttttttcatgtgtatacaggtgctcaacttgttgacttgctaacaaaggctttagatgcccacgcattttttcatgttagaaattgtactggtgtgtgcaccatctaatttggtcacagttgcatctggtattcaacacagttttatttcatttattgttggcttttgttacatgtctaatcacatatgagcttcacaggatttttttagttgtgtgcttaacatttagtcgtcccagttgaaaaggctacctcccataaaagtaacgggaagagcttcctttagaccaatgtatggcttggggagtttggtccttctcttgttattcattgagaagaataaataaggcactggctacatctctatggaagtgtgaaagccataacttgttggaaaaactcattgagtgttgttgcaaaagagatcatgtgttttcaaaattgtgaaaaatagaaatattgctttcagaagagtgagctgccttgattcacctcttggtggctcacacgaggatactttcacacactaatgacgacttaagtgttcagatcttctgttgagtttttttgtgagcttgtatatgattttgacttgtttttggtcaaactacaattggcattctagtcatttgttctaatcctgcttgtgttgattactaaatttctta

SEQ ID NO: 215334 - DNA, 563 bp, Cannabis indica
tagctgcattaatttatagtgatcatgaaggctatgcccattgactcatagcgcacccctttgcaaatttagtaagaattaatctatttagaggaatttttcttagtttgattttgagctatatatgtatatttttgtgtatacaagtggtatatacttgatcaatactaaagacaactacgtaaatgtagtactatatatatatagaaagatggaatacaatgtgcatattgcattaatttgattttatatgtagaaatagtaagttaattaattagtatatataaatagaattttgtatataacgtgtttaactagataaaattaaagaaagtatataagttgttgatatccatacgcatatatagggggttttatatcaatttatatcaagataagttttacaaaataacagtgtgttagtgtgtcacagtaaaatttataaaaatattcccttgatcatatttttcatcttttatattgtacacacggaaattcaactacgacgctttcatcttccaaactcatgcacaaaactactagagaaacacaaaaacacccaa

SEQ ID NO: 215335 - DNA, 611 bp, Cannabis indica
aatagagtagagctgatgctcagtaaaagtgttagctaaaatagataaaattgaattttgatgaagcattttaaaaattagaatagagatgctgatgtgagtgctactattcttaaaaaaaaggaaatatactcagattttttttttttacaaatgaaatatactcatttagtaccttgtgtttttcatgaaaaatatatttggtaccctaaagtaaaatttaatcaatacagtgttatcaatttaactaaacaattctcagttatatgtaattaaataattaaatttgaattcagaattcataaaattttagactgttgattgtattgataaaattttattaaaaaaatttgaatttagagtattaaataggtaatattttaaaatatagggtactaaataagcattattaaaaataaagaataccaaatctgtatttagataaaataccaaatgtgtagaccaaaaaaaaaaaactttacgggcccgtttggtacacaggactggattggattagacaggctaatttgtccaatccagtgtttggacatgttacaagtctggataactaatccagttaacctcatctgtttgggattatttatcccatc

SEQ ID NO: 215336 - DNA, 523 bp, Cannabis indica
aatgtttaaagagtgttcatttctaaagaatttttttccaaattaacaacttgtaattgtaaaatttgtaaaataatcacattgaattgatcataaaaagaccatgaaattgtaaatttatggttgaataacaatggtcacagagtgtaattaatgtgtggaaagaacagtgaaagctagaggagcaaatgggattagatagcatagtagtcctagtagtaaacgatagatactagatgctgtgtgtattgagtcccgaatttggagtatcctaatatcaagcaattcgcatttacagggatcaacgagcaatctatatttcgcgatcaagtagcggttcttatatattttataacaatcacattccatataattttttggaaagttatgttgctaataaattttttcttaaagactatttttacaaaatactcatttctaactggggagaatgataatctgtttgattgcatttaacctattattttctctgtttttttaactcaattcattaatttctctt

SEQ ID NO: 215337 - DNA, 722 bp, Cannabis indica
ctcacccacgccaccaccgccaccgcgaccacgaacaccaaccccaccgcccctcctcacctgcccctctacgaccgaatgcgcccttgcaccctcgacgacgtcgtcggccaagaccacctactcgccccaactccctcctccgctccgccctccatcgccaccgtctcccttcccttctcttttggggccccccggaaccggcaagtcctccatcgccaaagccattcttaactcattccccaacccttcctcctcctccaccacctaccgattcatctccctctctgctgtcacgtgtggtgtcaggacgttcgtgacgccgtcgatgaagccagaagatcaaagacgaagaataagagaactgtcctcttcgtcgacaaggttcaccgcttcaacaaggcccagcaggactctttcttgcccataatcgaagacagaagcattgtcttcattggcgccaccacggagaacccttctttccatatcatcacgcctcttctctcacgctgcaccaccctcgtactccatgccttagagcccagtcatctggcctaactccttaggcgggcggcagacgattctcgggttgggctcactgctagcatcgggatgaggcctgttaaggtagagacgcgtaattcactttgtttcggctaattgcgcggtgatgcccgcgtgcgctcacgccttggaaatctctgccaccactgcagcctctc

SEQ ID NO: 215338 - DNA, 1073 bp, Cannabis indica
aaaaagaaggtcaaattaacaagtaatatatatatatataagctcattgactcctattcaaggtcttctctgtgaggatattatatatttatctcttaactatatatgtttatttatatacacgttaatttggaaattgtgcttcaattataacccttgttttaatcccttctatatttcaatacattataattcataaaatagtagcatatatatacattaatttttgggatgaatattgtaaatatttatataataatatatatatatatgttatacattaaattaaagtatgataaatttggttttttctcttatctcaatattgtcatagtgttatagtcttttcaagtatgaaaatatacatgttattatatattattcctcgtccttatccaatcaaaattatattaaaggctaaaataaacttatattattcttactttttttggcgtgacggccaatcttgacaaaaacaaaacaaaacaacttggcttcctggttttcgaccttattatataattaattaatatataaacatatttatatatatactcaagcctagctagctacaacactacatatatatgtacttaaagtatatatattgctcagttcacatttgatgagtttattacaactttatattataggattactcacacgtacgtgatccatgagctaatatatttatcaatattatatatatatacatatatatattagcatgcatgtctgcgatcttgtttttgtgtagccaaaaataacaacaatataaaacaaatgaaatttaattaatatatattatgtacttatgtatacatatatatagcatattgggcctctagtttaataaagaacatatatctaattaacaatctacaattatatatatttaattatactcctaagaaaatctagaagcatatttttatatttataaatatatgtatgcatgcatgtaacaatgtagctttatgttaatttataattaagaagtttaaactattgttcaattatgaacatttcatacattaattttcctgtgtgaaaacatatataaatatatatat

SEQ ID NO: 215339 - DNA, 537 bp, Cannabis indica
tttcagatatttaataattatactcttataattaatgtatcatttattttataattatattctatacattctctaacatattatccattaattacttatttttagaacataaatctcaacattatggttgattgtgccaagtatggtggctgattattttgttttattttatatttaaaactcaatttaaatttttggggaattatcttatatacttattttttaacttttttttttttttttttttttaaatttacggtttgagtttctaaagtggttgcagcgctagttgcaatatgagtttttatgtagaattccgtaaaaaatagacaaaaaaaaaaaaaaaaaaaaaaaaaaaactgttttagaaatgtaaaaatgaaaaaagctacctaaatttttaggtataaaagattatctaaaataaaatttaaaattgtgattttagtagaatgtttagcatgtagaatattccaattaagctacaataaaatttagggttgtaaccaaagggatctctcttccctttggttaaat

SEQ ID NO: 215340 - DNA, 551 bp, Cannabis indica
gaggttcttactcagaaagaggttttttggagcaagcaatcgaagcaattgtggctacaagagggggataaaaatagcaagttctttcatgccactgcatcttctcggcgccgaatgaatgctattgataaacttcaatgcgaagatgggagttgggttgattgggactcgggcttatctgatgttatgtgctcttactttcagaatcagttcactagttccaattattttatggatgatgttattgctgggatttctacaactgtgactcctcggcagaatgattctcttttgcaacctgtgactgatgaagaggttaaatcggcattatttcagatgcatcctgataaatcccctgggccggatggtatgactcctggtttttatcaaaagtgttgggcaattgtgggtgatgatgtcatcaaacaggtccgctcttttttcttatttggttgtttgccgaatggtcttaatcatacaaatttggtgttaatccctaagaagaaaaccaccactactatgggtgacttgcgtccgattgctctttgtaa

SEQ ID NO: 215341 - DNA, 533 bp, Cannabis indica
agattgaagttggctaggaaaagaaacaacataacaaatgcagcaaaatagggggaactggggtacaacaagagaacatacaggaaaatgcatcaaaaataaaaagaagctgaacaactaaaaataacagtagaacaacggaggaaaaattgaacatatattgaagcataggatactgaagaaaataatttacatgcaaatttcattaatttcctattaatattaaaaatagagcaatacaataatatttgaaaaattataataaatatatgaaagaaaataacattaaaacaacattaaataataataaaacaataacaaaatataaaaaatagataagttggagaaatagggtggatttggaagtgcggtagagatgaagttaatgctttaagactaaagacactgaataacataaacttagtgggagttttgtaaagatttctacaaaaatctcatcacatatcaagctctccatctctctctctcacacacaaccccacactcttaactttcccaaatcttcttcttgt

SEQ ID NO: 215342 - DNA, 550 bp, Cannabis indica
aaatgaaccactaaatggttcggtcaaagagaataaatgaaagagtcaaagactcttctctctccaatcaatcctttggtcaaggcaagatatgagtcaaaccccttttcttcctttgattatttcggcccaagaacaatgcagcccaatattgatattctctctccaatcaacaagagtcacaaagattctttcttcacaatagtggttcggcccactaagcttcagcccagcatatgtataaccctaatatgaactcaatataaaaggtaatgatctcttctaaccctaaatacatcaacacacggcagccactatcacaaattccaaaaaaattcaaattttcttttctttctctctaaaggcagcagcaagataaatctagggttagggttttatttcttctcttcttcttctcttcaacacaaatggaagctagggttatgggttctaatgggttcttgtatcttcttgattcttttcaaccgaacctagggatagggtttgttcaagcttttcttcttcttcttcttcttctcttcttttacag

SEQ ID NO: 215343 - DNA, 522 bp, Cannabis indica
aaaaatataatatgtaataagtatatatttattagatttaatttttgtgttaaatttgtaacagttggttgttttgtgtatttattttcataatgtttgttttattttattacttagaaatattattgttttaataatttgaaacttttaattgtactacattgtaataatagtatgcttatggagtactaaatttttttttaatgaattaaacttaaataaaaggtatatttaatttttacgtagtttttcttcatatttttatgttaatattaaaatttgaaaatgtaattgaatattcaattaaaaaaccgatccaatccaattagtaattggattttgaggtctaattggattggatcagatgaggaaaaaaatgttaaattggatcggatgcccacccctactcacgacaactatagacaaattataaaacaatgaaaaaataactagaaaaacaacttcatgatagctataatgtaactataaaataactgggaaaaaaaaaacagtttattgttt

SEQ ID NO: 215344 - DNA, 995 bp, Cannabis indica
atctaactaaggtccaaaacaagagtggttgagactatgtcgtctggttgagttgagcaagagtacgaagctcaagaaaagttcaaagagtaaaaatactaattattctctttttttttattttctatgctattactcccaaccaatttcatgagtaaaatgattcgtacaatacagccaaaaatttggtgtaaaacatcaaaggggcaacattactcggttactaattcttctgtcaccaaaggggcaacacgatgaaagacaaaagatatagatatgagctctacattacaatttgctgaggaaaaaatagaccaacatggaagcacgtaccatgcacagtgaattcagtaattcaaaatttatagaagccgaactgtatgaattatgaaacagtacttatgttgagactcttattaggattgtaagtaacaattttctgcatcattcatgctagcctcaatttgcacaacagtacacgttatggcaataatattatgagtacaataaaattcactagaccacataggcaaaggaaaaaaaacacttgacaaaaaacaaaaaaaacaaaaaaaaacaaaacgaaaaaaagaaatataggctagtacacaaggcacatccatcagtctataccagactaccaggatgattttatgatccatctattgattcccaccatgtctttcagccaaatatcactatggacaatccaaaactggcattattgggtttgatatgaatctcaatttctttctagcttctaaggtttggtaggaattgatcctccttgagcccattgaaaaaatttgcagcatcaacgcctatctagaatctatttgttcctgcctatctagaatcacagatgttcaaaaaaaaattaagaatgaagcttaggttttgatttctgtttctttgtgtccaatgaccctaaacctttgcccaatcccaccggaggttggcctcgcttcctctgatgatggttgatctatttttac

SEQ ID NO: 215345 - DNA, 1521 bp, Cannabis indica
atcttggtaaccagcaacatggggatcggccagggatctcaagctcaacaatagccccctctgtccatcttgcgaccagccaaccaccaacaggagtccccatggccagccaaactcctctagcagcccccatggccagtcagagaaaagcactccctccccaaggggagcgagtcacccaaagatcaattttcaactgacgaggactgaaagcaggtggaaacacccaaaacaacaatttgagaagtgaagttcataacttcagacagttagatccaccaaactccagcaattggtgtgatctaccttatgtcaatgcacaagctccaccagcctggcagagaagcataggcgaccaggccctgcccagcttagggctggccgaccgtgtacaagcaccagatttagtttccttataattttttaaatatctattaattctgtgatgcttaagatatgttttagtttccttataatttttaaaaaaaaacattatgaaaattacacgataaaataaacttatttagatattatcatgttacttttaaatataaagtaataaaatatttatagtaactcataaagttactagtatatttaatattgtttaaatttaaaatttagttacttgtttattaataactataaaagaagcttaaatgttggtatgaattttgattatttttttgatgttgataaaaaaaataaggaaatttgcggtaaaagtcctcaaaaagtttattttgatacagataagcgtctaaccttgaaaaatagcggtaatagtcctcaaggtcatgctttttatttgtctgttagtcctaattttaactgagcctttttttttataaaaaaattatcacgtgtcaaaatattatttgtccaaattattatactaattttaaaatataaatataaataaataaataaattattttaaaataaaatcatttatctttttctttttctttttctttcttttcttcttatcttcttcttcttcttctcactgccagaaataatcaaccaccaactccaaccctaaaccagcactaccacgcctaaatagccacgaccctttctatacttcttctaaagactttctcagccctaccctttctcttctctcttcccttcgtcttctttcttctacgcctgaacctccatagccaccgtggtcagaagttactcatctcatccatcagccacctctccctcttattttgttcctccctcttggtgcaggcagaaggccagcggacgattcagaccctctcctctcttctctctcgctctcaaaaccccctctctctcgttctcgcacgacccatccccctctgccccgcttggtgacccagatcggcaacccagacctagatctattaatctcctcctcctcggccaccattaaagctcaaataacctcaacggattcatactccggtagacacatgtttgagacttgtcttcaagcttgggagaaaaaaaatggtagagtgaaatcgagagagagagagagag

SEQ ID NO: 215346 - DNA, 587 bp, Cannabis indica
ttagctatggagacggtcgttttgtttcaacacccatttatgatggttgagagtgactctgagacagttatgaagaatctaaagggaacttgttccatttggggaatcgataactacgtgcatcattgtaaacatctctttacttttatgttaggttgtattttttcttttattcttagagtttgtaattttgcggcccataatgtagctaagtaggcgtttgctaacaatgttatcggtatggttgatctcttttctataccagactttatcctttgtaatgaccacgaggtcttacttttggtgcttctatttataaaacgctaatttttaaaaaaaaatattgtaagttaaaaaaaatattttcttttaggacccgtttagtacgcaggattggactgaaaaatattggactagactggacaagattagattatgctaaaagtaatcccgtgtttggtttaagaataaattagactattttatgtattttcttttacaaaaaaaacttaaattaaaaataatatataataataaattaaaactaaaatagataataataaataaatagggtcttttttattttt

SEQ ID NO: 215347 - DNA, 799 bp, Cannabis indica
atattttacaatgtcaaaaataaggcttaaacaattgcttacaacatgcgtataagaaaagacagtcatacatgcaacaaaatatttgaactatatttttggcattatatacaatttataattttctgaaaatttatagataactgcaaataattatataaaaaaaaaaaggtaaaaaattaaggctaaatttttttcttgtatgttaaaacagataagaggtctaccacaacattcattattttggataaatctttaatttaattttttttttatttattgtgtgtacgttataattatttcagatatcctataaagatttgagaaatttataatatttttttttggaagaaatttataatgatttaaaatataaaaaaaatattatttaaatagtctatttcacacgtgtataaaatataagagacacgtgcaacatactaatttgaaacttattttcgagatgttaaatttttaaaatttctcaaaattttacaaaatatcttaaataactacaatgtacacatctataaaaaaaaaatagtattaaaaatttctcttaggatgtcctaaacagataaaggttgcataattcttgtgaaaatacaagtcatgttgtgtcgagccataaaataaaatataaattatatcgtgttgtaccaatagttgatttatagaataggtccgacacgatccttgtaggctagatattttcatactgtacttactgaggctaactcattttttttttatactagactcagattcatgcttgataactgttaaaaaaatagaatta

SEQ ID NO: 215348 - DNA, 542 bp, Cannabis indica
ctatatatatttgactacatatttcattgttgatgagtcagtcagaaaatcaaactaaattatatatataaaaaaaaaacactaaatttgttttcttttgtgaatttttcttttgattcactcaactcaaagaagagggagcttgttataggaagcaagctagtattgtattgcattaaattcccacatgaaatgggaagttatggactacttattacctaccatcatatttatatatatgtatatatgtataaatatatatgttatgggaagttataactgatattgtgaatatataaacaactcatcccaccactttttggttcctccaatgtgcttgacaacaaccttaaacttgatcagtaaacttatttattttgggggcattttttagagatcattattgtgatgactgtgtaaatgagttctttctgaggctcttattcaaaacgaaaagccactcattttgaaccataaaatgttgtctctttaatctctctttatggtccacatttccacaagagtctttgattgaatcaacc

SEQ ID NO: 215349 - DNA, 1269 bp, Cannabis indica
  modified_base (1215)..(1215): a, c, t, g, unknown or other
  modified_base (1244)..(1244): a, c, t, g, unknown or other
aggaccccgaaagtcaacccggggcatagggttttcacccagcacccaggtagacattcagcttaggatttcagtctttgggcccatcttagtacaaatggctcaaactttatactttgacatgaataagacttattttgaacatatttgagcccccaaaatcagaatcagagcaattaaggcaccaggcgccaaggacacctaatgcacacagtgcccagactgacatattttcaacctgaggcgcttccaaccataatattgaagaagtatcccaagcatttaatttgtctccatccaaaacgagaaattaagtgcgttagggaaagaaactgatcgacttgaacgccaaaactaggacccaacgcccaggttgacctaagcgttgggctcagcgtctaggctgatattttgccaactagggtcattaacaatagtagttcagaagaagccttctaagcatattatctattttcctcaataattaagatttagatactttcgagaaacaaacaaattctgagagccaaaactgggacccagcactgaggttgacccaggtgctgggcccaacgcccaagttgaaatttcgtcaaccttgtccatttccaattagtttttccgtgaagtcttcttggcatattctccgttcataaataactgggatacgagtgttttcaatcaaatagaaatgtttggtggaaaaaaagtggacccagcgcccaggttgacattttgtcaacctaggtaatttctagtcacctttcttgaaaagtgttttgggcatcttgttcatttttggaaataatgaagatacaagtgatcttaggaagcaagcaagattttttagggtcaagtaagaagtaatgcacctctctagcctgcatcaatggcagactaacatgatgtgctagtaggaggtccacacattgccgataattcaagaaaagctttaaaagaggtatgtgagatctttgcaacatgagccaaaattaaagatgttagagattggcttccaaaatctctacgcttcgagtgtgcccagtcacgttcggagaattcaaaatgtttactaccctcaaaatcaccccctcattgttgaggtgcacatagccaatatgatggtggctagagtaataattgatgatggatcatctagcattctctgaacttcagtagcactcatacttgtacaataaacaatgaattctctcnctgatcaaagccagaagttgggaagtttntcataagtctctcattcattccatg

SEQ ID NO: 215350 - DNA, 398 bp, Cannabis indica
gtgattagaatcactcataaattactaatcatgaatcactctaaaccttaaaccctaaaccctacgttattaatcatgaatcactctaatttttatatatataaatcgaaatttcattaaagtataaattgcctaaagtaaagactattacctcataaatgcttgtagtaattgtcatataatgtgctatttttaaatgtagtttaaaacatacatgtgacacatgtgacatgattattaaaataatatattttgatagatttcatgctaagatagagacattaaaaagtttgtattcgacaaaacgaggttaactaccactcattaaacttgcacttttttttttttaggttttctttagttaaaaacaattatttaaaaattgtcaaaaaaaaaaa

SEQ ID NO: 215351 - DNA, 544 bp, Cannabis indica
aataagtataacatttaatatttccatttgatgtaaacatgtcctaacaaattaaataaaataaatttattacaaatcaataagtagtgtaggtgccttttttttttttctttttttattatttgcatttttttttttctttccttccttcttatggtaatggtttctagaagttatatcataaatatttaaaagattattattttgttatatagttgttaatatagttttgtaacaactttttagaacacatatattatcaaaataaaaaattaatcccaacttaaaaaaaataaaaaatgaaaaaagaaaagaattaacaacattacatgtcttctttaaaaattaaaatagtaaagctaataatattacatgttaaattattaccaataaaataaatttatagattataagtgtaatgattatgctaataaatttgaacaaaaaactaatagtcattatacataatttttcatatggcatcctatatgattttttttctaatcttcctcttgttataatattaataattatatggatgtct

SEQ ID NO: 215352 - DNA, 651 bp, Cannabis indica
tacactatctattacattacattttttttttgctaaaattacattacaacttctaattataatgtacatttttatttgcaaaatgtaatatacattctaacacattaaaataatataatttggttaccttatttatattatttattaattttagtttatacaataaatatactttattattactttttttttcttccttcaattacaattttcctttttattttattttttatttttttatttgtttattttctatctttttattagctattcccaaatacagtgtgaatgaagcatactagtaattgtgccttacaaacaaaaaagcataggtattatcattatcaatttattgctttttactttaattttcctttttttccttcttccttatttttcctctttttcttttcttacgatttattttctagtgttgctttcttttaattactctaggctctctggaaacacttcctaggagagtcacccagcccaagattactccaggccaaacacacttaactgtgaagttctcaagtgatgtgctaactaaaaaacaaaatgcaccttgatgatataggtagtacccatcaaatcattctatttaagtcatctttaactgtgtagtcctatacgtacctacacagtctt

SEQ ID NO: 215353 - DNA, 944 bp, Cannabis indica
gttccctatactaataaatatgtaccttatcaagctcaatatatatctccaccaaatgccaaaggaacaccttgctcgttgaattttctctcctatatatacatatgtatgtgatattccacaccttattttaatacaattaaatgttaatagaatacataacttagagattgctagcacatgtccaacaatatcgtattatatttatttgatgtatatatagccatataggtaagtgatatcatcatttttttttaattttttttttcaaatttttaaatccatcgagttactcattttttttttattatttatagagaataattcaactaaatattaattggggctttttcatttttacacttcaaaataattttatttacatttttgtgaaattttacataaaaatccctattgcaactagcgctgcaacctaaattgcaacaaaaaatcgtatagaaacccctattgcaactagctctgcaaccactttagaaacccaaaccgtaaatttaaaaaaaaaattcaaaaaaataatatataagataattctccatattaatttaaaaaaaagaaaactcaattaattattaatatacataaccaaatgggacaaaaatatgttccctgcatgtatatatatatatataatttattttcagaaaatgatgagtgtaaacaaagcagagacaaaaatagtttttgttaaggtgtcaaataattaaaagagagagagatcatcatgcctatttttttttttttttgttacaaaaattaaaaaaaaacaactacatcgatattttttttttcctaaagtgtggggagagaggtcccctcaccccttctaggcttctatatatgtagctccttccctgactgtaaaattttactagtatttttcacgttgtaatttctttattgtgtagttaggcaacaaaatgaac

SEQ ID NO: 215354 - DNA, 857 bp, Cannabis indica
actaaaagtcacatttaattacaaaaaatttatgttgtcactaaaagtagcagtttttttttttttttgtgtagtgtatgatttataaagtaaataataaattaatcaaaaatgttatattttaaaattttaagtttttacttaactaatattattttattttttaaattattatatattttattaatatataactaaaacaaaagtaatagattatagaatcatttatctttattttattttttattaatggagctctttcaataagtttgcaattggtaatttgattaattgtatgccatcaattctatggaatctaactatctttaattatatgagtttggctatgcgtttagattgtttatatatattggttttttttttcttttgattaaagtgttttaataatttttttaaggtttttaaaaaggttataatgtgttgtgttttctatggatcaaatgaaaagaagaaaaaactctattaacctatattggtagaaaaactctacttctatatatgttactcaatctatactctaattgggttggagttttaaatggatgatgaggtctattgttgtagaattggaagaattaatgaaattataaaatgattttgttaggttgagtttggaacaatgttattttttaagatatatttagtagttctgtataaattatgtaattttcccaaagaaaataattaattagagtatttataaaatagtaaattcaatttaattcaatcttcaaagtatctattgaattagattagaaaatttaaaatatatacttgtacaggttaaatgttaattgacatgtaaatgctttttcttagaaacactttggtacaag

SEQ ID NO: 215355 - DNA, 1211 bp, Cannabis indica
tttttaatttttattacaaaaaaatataccatcaatgtcattggtggggcattaatactaaatttcaagaattatagtttttttttttttatctcaaatggtatatcattattatattttgtcaggctttccagtcactaaaatatagtatttagatataagttgacactacattagttttagtcacagtcacaacaagtcacttgttgtcacttgttgtgactaaaaatacatttagtcacaataaattataatttttgtgactaatacatttaatcatgtagatcttttaatcacgacataggaatgatgatttataattagtcacaacttttttcacttttagtcacaagttttattgtgactaaaagtaagatttttttgtagtgattccgtttttattagtgcttaagtacaagaaatatagtttttttttttttttctaatagaaaaaaatacaagaaattagtcaacaatattatataattatatacatgtggatatatctgtaatacatcactagtaaaataattgaattataatgaacatataaagtaggataaccaaaaaatatatattatgaatatgttagagatcatattaagttatccaaaaataaaaattaacttacaattttgtaagatttaatttgcagctaaatttgtaagattttagacacaaaatttattaaatatatatgtgaaccaaattgctccaattagaactctaattgttattctatacatcatgtaaaagtttttagtgtcccactgatattagtgggatgtagactaacttctttctttttagtttttaatatgaaaataatgtatttatgattaaatttatatttatatatattatgatgtaggatagtttaataaaataatataataataaaaaatatttttttaatataaattttagtattatagatagaataacaaaaaattagtgctaaaataatattgttttagtggtaatttaatactaaatttaaattttaatatttgatggttgccgttattctttttctaacaaatatatggaatattcttgacctttaataaattaaagtttatatatatttattaataataaagggacttgtcatcaactacatacataccatagaattgggtgatgggtctgaattttcttgccttgacggcaagttaattaggatacgatcgacgtgggacgcggacgcc

SEQ ID NO: 215356 - DNA, 515 bp, Cannabis indica
tttaagtaacaatattaaaagaattttttttattttatgttacttaattatttaattattttatcttggtataaataaaacattttcggtggactattatgctatgttaatagggggaatttttttcttttatagaaaaataattagttgattttatctactaggaatattataaactattaaaatatttaggttagtttcttaaaaattttaatttagaggaattagaactaaatattaagagatagtgctgcttagacgatcaagtcgtctcaaaagaaacaatcaagaaggaggagcttcaacacctacaagaagtttaagaaggagatgaactacgaggctaagttagtcatggtggaggataaggacaacaagttgcactattatggaagtggcacccacgtaagtacataacaatgcataggctgagttgagaggacgctcatttcgtgagtagttggtgaaagagaatgcgaagcttagggaacaactccaacctcaggatgaaaagt

SEQ ID NO: 215357 - DNA, 1918 bp, Cannabis indica
tatactttcactagtgaaataatggtactaaagaacacataagtaattagaagggtaaaaatttgaccaaaactaattacgaagcaacacaaggatggctaatcactggaattgattatatcaatggacactgtaataaacttaataaatgtaattctataattactaagagttcaattccatatttatagtggagtaatcatagaattaataactaagattatttggttgatgagatttaataattaatctaatttattggtgcttagtattatagatccatggtcttcggatcgccaccttgcaacactgtcaagggtatgaataaagctatataatgatttttagaaaaatctattttgaattggtaaaatagtaattatttattttgtaataaataatttattttcaatttattatttaaacaatttaggaagaagacaaagtgctagcagaacaaagacatcacccttatctggttaagataatgttagtactcgtcacagtgtaaggacaccattataggtgcctatctgataagatgtaactcacgagatttgttgttggattagttaattaattcaaatgataaatacttatttgaatttgaatttaaaatttagttacagatatttacggtggttgagatttttcctcaaaatggttgaaaaactctctctagatggttgagatattctctcaagtggttgaaagattctttcaatatcttattagtatttagtttaaaccaaatatttaaatttaaaataaatatgtatagcagaatcagttgcagatatttattcaaatatttcaataatattattttaatatttaaaataataattcttttatttaataaaatatttattattattttattgatttttattattattcagatatatcatagatcaaacttaaaaagattaagcttttttattattattcaactcagatggaaaagaaaagttacttgcccatgtgttgagaaaaactcaaacacatttgtagattttaattagcccatattaatccttatgtgtgattgtagatctagaagattgcggggtgagtttatcatcaccatcttaaagataaaacttataaaacaattcaaggataccccgatttacaagaggtaatgttgtttgtgttcttagagttgttcatccctaaaatcacactcatcaccccgatgggaatccgtttagtgttttattttatatttctaaataatatttcataatttgtaatttatgtttgcattttttaatatattagtatttttcatttaattacttttaagttgtgttttggataataattagtttactgaataataattaatgtgtaatatattagtttttatgtaatttaatattttaatatacataaatttttattaataccttaatttttttatgaggagattctccgctctgttcctattcttattaggggatttttcgctccgtccccatccttattaggagattttttgctctgtcccaatccttattagagaattttccatggccgatggaaaataagccagaatggtgattaaaatttttaacggggatgggggacaaggagagcactccccaccaatttcctgccctgtgtacatccctacaaataatgtttaggtgattgtttaaaattgtaaaaagaattagatatccccaacaattttaaatagtcatgaagcatccacgacagtttattacaatcacttaaaatttggcaagattttttaattagttatctctggcggtctaattgagaacaattcagctattacctcaaattcacattcatgctacataatttcaatataaatatacaaattcataagagtaaaataattatctagtctagatattaagtcaaaaacaaaataatgaatatttgc

SEQ ID NO: 215358 - DNA, 535 bp, Cannabis indica
gcgttaataattcctagtccacgggtcagttgtattggcccgttcggcaagtattcagataatgcaagtgtttacagtataaaccctagctctaaactccttttatttcttttgatgaagaagaaagcttgtaggaatttttgcagaagtttggatagtataaaattgtttaccctttgtacataaaaaatgaggatatttataggtttacatgtgggtaaggccattccctttacccacctagggttttgtactcagcatgcagcaagggcagacactacaacatgacgatctaaccattggttggtaggaaactttcccatcgtgtggtgtacgggtgcagtgaaggattccatgcggacaagaacatgtgtcactcaaaggtttcaccttgaaaagttattgcctagacaagttgttggacaaaaagggaacttcagaggcacgtacacgcactactatgtcttaaggttaatgcagattagtccgtaacctcaaaaattggcggtgagaatacctaaggtcgacaaagttg

SEQ ID NO: 215359 - DNA, 628 bp, Cannabis indica
ttaatttttgaaaaattttaaaagacaatagtggtgtctaatactatactatatgataatatcgttattagtctaactaattgtatcgagtttcatatagtttaatgcaattatttttagagagtattgctactcaatcgcaagacgatatgtctaaaagtgatagacactactaatgttcaatagcaatgtattttaatttaattaagatgttcttgaaattttaaatttttagggggaacacttcaaatcatgaggtccacacccaagacccccacctagagccaaaaaaatcttttgacaaaaaaggtcttaaatttatattttaaaatatcataatttgtattattattatttattaaaaatataattattttttaataaaaatacctaatttattttttaagatactatagtcaattttattaagaaaaaaagcttaattataattttaaaatactatattttatatttttaccactatacataaaactataatttttttatattaaaaaacttaattagattttttagcccaaaactccaaattgacttgagaggggcatgcttcaaacattttgaaatctcaaagacaaaaaaatgtttaataataagggtaattaaaaaa

SEQ ID NO: 215360 - DNA, 784 bp, Cannabis indica
caaagcaatctaaaaaggaaaacaatagaaaatagtcatacaaccttcattaattaaagattttatcaagaggaagaacttcttagaggactaagacttacccctgctgcctgttgtttggtggccaccgatagtgtgtattgggtcaacactactacttacaacccattttttggacgtgagctcgctcacgctgagacccatgttatccaacatctccgcaacataagaagcaatggctttcccaccttaggcaccaaggtttggctcaccgcagtaatatcaaacactggaccaagtgaggaaggttggcgaatccccttcgcaatctcagctgtcttgatggaagacaatcgggtagcctgcttttgaaaactcacttgctcctactcatggttccttttcaaggtagcagcagactcacccgccttggtaagatagtcatggcccagaataggaggcctcatggggaaagaaaaatccaacagaggaatcttacccaaagtcgtgtgctgagatgggtcagtgggtgcagacctaggattcgaacacccagggagatgttggaatgacgaagaccgagatgggtgtggagtggactgtgatgtcacaatctacaactggtggggagacaaggtcggttgttactgttacagttgcagttgcagttgctttgattgttattgttacgattgttgttcttgttattgtggatgttgttgttgctgcatttgttgctgctactattgttgttgcaacgacggtggagtggttgatggtgtac

SEQ ID NO: 215361 - DNA, 560 bp, Cannabis indica
cagaaagtttgaaccttatttttaatgtgttaaatttttttgaatttctcaaaattttcaaaaatatcttaaataactataaaagacacgattatgaaatataactaaaataatttttcggacgctgaaatagataggtatgtatcggtgcactgttaaaatgcattgtagaatttttgaatgtttttaatgtagttatttttagtctaaagatgataatttagtatagggtatttctataatacattttttaaaagaggtccattgatgtattttctatttatttcggtatttggacaaattttttagtctaatttttttttatgatcatctacgttatagttatttagtccagttaacaaaaccttgttttagtggatgttttcatccaattctcatggattttgaaagaagtaaagagacaactccaataatatatttcattgcgtataatattttcacttgtaaaacatattatcatctcacaaatttttagatcaaatgttgacacccctgtagtcagaaagacttcaaacataagtgtttttattcttgaaaat

SEQ ID NO: 215362 - DNA, 666 bp, Cannabis indica
tcacattttctatgagtttagaactctaatgctcattattatgataaaatgacgatcaaaatcttagaaagttggcatcttttcaagagacttgatcttaaacataccccccatttgcacgaatgacctgcccattaacccactcactcccatcaccagccaagaatcccaccacaggaaccacatccttaacctctccaagcctccccatggggcactcatccaccactttcttcaagtcatcctcactcttccccgaaaagaacatatcggtcgcgattggtcccggggccacgcagttggccgtgatccccatcccctttagctccttagcaagtatcttgatcatcgtctccacagccgcctttgacgctgcatacaccccgaatcccggcttcaatccccccacccatggacgaagatatagatatgatccgacctccgccaccacgcttcaacctgtttgctgcctctcttaggcacaagaaagctcctcttgtattcacactgacaattattcaaacagtttgtgagcattaacataagaaattataacacttttagaatccctttagttagattttcaaagagacatttattcaaacagtttgtgtgcatttaacaaaatatgtgcaaaaaattaagagtgaagacctgaaagttcga

SEQ ID NO: 215363 - DNA, 528 bp, Cannabis indica
cactaaaaacaataacttaataattcatatggaaattaccaaataatattactatcttaccaattaaacaaactttaatcctagagataaaatggtcataactatatactcgaggtatcccagaggccagaacaacaaatactaactaaacttctcggtatcaccaatatcacagctaataccgctgtgacatttttcgccaccagtcgggtttccatagttaccagacctaaaaatatttttatttcataaatagcatgtacattacctacgtattttaataaaatattcataattaataaattacgcttatttattcaattacattaaaatctattactacgtaattagattaataagattataatcttacctattaaactatttattaatccatattttataaaatatgctttaattatttataactaaattgttgagatattatataggtactattggtattttttagtattttttattatttaataggtaagaatataaaatgatttcatgaggcaaaaatta

SEQ ID NO: 215364 - DNA, 660 bp, Cannabis indica
tattatatacaataaaaccctaaccaactttaatttctaggaaattagagaaagtgattagtacaaaaatacacgtaatataataaataggtctctcatttctataattttgcatagaattcatttactataattatttctttttcataaattttcagatttttcaattattttctacccttctcaatctcttgggtggggagtcttgacaccttcaatcacacaaataaaggtttttttaattaaataaataaataaatttgttgattttattaattgtgcacattaaagagaaaattactaattattattattattattattattattattattattattattattattattttacagacacatgaaaataaatttaaaaaaagaatataaaccaatttggtacttactataagaaaaattatggggcaatattcgacgttggaattgcgtaagtaatattaatttttttctttataatttaaaaaaaaaaaaattaaaaattatgatataaaatgttataatatattctaatattattaaaataaataagctaatatatatttaaattaatgtgtatgtgtctatgtgaaataaaaattaaattttcttgttgtcttctattataaaataaataaaatgcactaactcaatatatta

SEQ ID NO: 215365 - DNA, 995 bp, Cannabis indica
gaccaaaccaaacaatgagacacatttcctgtctctagaagtaaataaataaataaatctactgttacattagcatatgggctatgaaacaaggtaggctgacatatactattcttaacggtaaaaaaataaaatataatattttagtataaaatgagtgggttactttggtctggttggtgtggggtggcgtgggctcagaaacaacagacacggtcagagattcccaatggtagaaatcagatatatatattatgagcagccagccaaaacaatctccacacatattatttatttctgtttggatttttattttttatttttcactattcaaataataataataaaaagtcagaccatcctcctttatttgagatttcaaggacccttcttaccatcagtctgatcagagacccactctctttgatcacagcccaaacaagtccccccattttccaaatcagaattgctaaaatgtactattaagtatttagtatcttttttttgcatgttatattctttaccactaaaaatcttacttttagttataacaaaatttgtggctaaattaaaatagttgtgactaattacaaatcattatttatatgttgtgactaaaaagtccgtgactaaaagtattagtcacaaaaatcacaaattattgtgactaaatatatttttaatcacaataatttttatgactaaaattaaattagtgacaacttgtgtttaaatactatgttatagtcacaaataattttttgttgtgactaaaagtcaagttacaaaaaatttgtgttgtaactaaaaaattgtcactataagtagctattttttgtagtagttattgatataattaagtattgactcttacataacttaaaaaaaatatcttttaaaaaatattgataattaaaacgctatttataaaaaaattatttggtgtttaatagcaatttttttttcaaattgaatagctaataagcctaaagcaa

SEQ ID NO: 215366 - DNA, 612 bp, Cannabis indica
ttgatcagaaaagaaaggcacccattgcatttggtggcttaagccaggacaagaggttcttagggaaccaaggtcgaggcaaccgtcaaggtagctctgaaacccgatacacttaccctgaatgccccagtagtaaaaagcatcatctgggtgagtgtagaggacaagggtgcttccagtgtggtttgcagggcactataaaagagactgtccacagtttaagaaagaagaatagaagactacagcaaaacccgctctagctagggtgtttgctctaacttaggcagatgtagaggctagcccctcagttgtaacagatcagctctcggtcaacaactcttacttcactgtattatttgactctggggccactcactcttatgtggcagccaaaatttttagttagttgggtagaccgcatgatagttgtgatacagcgtttagaaccctactgcctggcagaaaattagtcatctccaaaaggtggactaggtctatgccgatcagaattgaggatagggagttgagttctgactcaatagaaatgggtttggcggattttgatattatacttagaatggatatcttatccaagtattcatccagtattga

SEQ ID NO: 215367 - DNA, 503 bp, Cannabis indica
ctagttataataataatatattataatctagttatttatataatcaacaaaagtaaaatttaggttatattaaatttttattttcaacgtctattattttttatttttcttactttaaagtaagtaatttatatgcatttcaaaaaaaaataatttaaaataatcataagtattttaaaaagaatacaagtataaaaaaaaaaagtctaagttgttcaaaaaaagttgatgtgattttttaacatgcacatttaaattataaaattaaaatttatatgctttattattaataacatatccaataaatatatatttatatgctctattagctaatttaattctcttaagatcaaaatttctaacatatgccaaacaactctaagttttaaactatgagatattgggttgtttatttttcaaattttcatatagagaaattttacttttagatttaggaacttttattaaatacacaacactcagttaataaaattctctccacc

SEQ ID NO: 215368 - DNA, 458 bp, Cannabis indica
tatactacacatttttttttttttaaatatatatgtatgtgctacaattaatgtaacatctttcgcaataaaattgctatagagatgatgataagagtactatcgtcaaccttctattacaatctctcagtcgacctccgtgtctgaaaaatacatgctgaagttatttttttttttcaaattctttttatggcagtgtttattatagttacaacatcaaccctataatttttttgaaaaatttcgaataatttacagtgctgaaattaagtttaaagttttttaaacgtatgtgatagactggaatatcaagaatttttttttttttttcagtattataaactatttaaaattttttaaaaatttataaagatgatgttataactataacgaatatcactataataaaaatttagaaaaaaaatttatagtatataattttgggcatagaaattaat

SEQ ID NO: 215369 - DNA, 512 bp, Cannabis indica
ttttatttattttgttaaactatttttatttaaatttatgtcttagtatatttaaaattgatcctcactttttttttttaattataaccgatttatgaggtattatgtattattcgtttttacttaatttattgtagaattaattttgtttttaattatatttcagtattttaggaattgatgattttctctttatttttttcgttataagtgatttgaattattttgtgttatttgtttttattttatgttatagaaccggttctattttaattataaatggtttaagttattctatgttatatgtttttttatgttataaaaccggttctattttaattataatcggtttaagttatcctgtgtatttatttttattcattatattataaaaccgattctatttaattataaccggtttgagttattttgtgttatttttttattcattatattataaattcggctctattttaattataattggtatgagttattctgtgttatttatt

SEQ ID NO: 215370 - DNA, 713 bp, Cannabis indica
aaagaagcatacgaacaagggaaagagatgattatattaaccaattactcttagaaacatggcttaacttcgggtatagagttagattcctagtaaaaatgtaacctataaataagacataaataaagactgaaaaatatggagacttcgaaattttgtttttttttaaaaaaaaatgggataaatttcgttatatttttttggaaattttattatcttcaatgttctaaaaacatgtcaagtgtgtcaaaaattacctgagacatcattccaaacggtgttttttgagttttaatcactcctcctcttcctccacaagtgctacaagattttatgtcattactagattttgctcctgttccatcacaaccattgcatgcctcaaagcaagaaatttcaacttctcgccgtccgccaaaaatggattcctcaaagctcaaatgcagatcatgtctgcaacagacaaaaccaccaattagtacagaaacagggaaacagggaaaagcttaaaaaatatacttatatttatatgtatatatatgtgtcagcgaatgaaaagagaagggtgattaccctagtgaatagtgaccttaagaaaattaccgaatgtcaagaccctgattcttcttgcttctcgaattaaaattgaaacctccttcttcgcccatgcctgcaaaaaatccttctgatcctccaaaaaatgtatcgaaaac

SEQ ID NO: 215371 - DNA, 573 bp, Cannabis indica
ggacgggtacccgaactcgccggtataattgccatccctaatgccactcgaacaaagtgaggaagatgctcagagtgctactgttgtaacttctattcaaaatgacacagaatattcaaggagaatatctatgttcttagaccaggatggtggagaagttacctccgctaggactgttctaaggaaggatgaggaatcaataggttgctgacactccatgttgtgttcttaacttgttgacttatttctttttgttgtagtaacctctggtcttcacttttaacagaaaatatgatcttcttggctgccatggcatcttgttcaaacaagaagaggaagattttaacgctgaaggaagctgagcccccagcaagggaagtggttcaacacatccatgctgccttgctgcttcgaagaaaaaggtcaagaagaggagtataattgttgatgttgctcttcctgctcatgactttggtagggagaagtcaaacattgttggtgcggatgagagactctaatttgacctctctctagatgcttttgaacatgttgctccgaactcgagtttggact

SEQ ID NO: 215372 - DNA, 553 bp, Cannabis indica
ttagttcttatagaaaatatgatatatttttattcatacatttaatattccatttactcttttccacaattcttatactcgtatgtatatataaactagcaaaaagctacgtgcgaggcacgtatactaaattttatgctagttatccataacctcagcatgctttcaaaaatcaaatcaatcaacttatccttttttctaagtgccacataatactagaaaggaaaataaaaactctgcggtctaacacacaaactattgcttgaagtccaaatagcttcgatctagttaagaatttggcaaatcataaacatgtttggtatgttaagagtataaaataacttaaatgccctgttctgattttatctccttaagtccattccctgttgtcccttgtatttcggttgtattgttacaacagttatggttgttatagcagttatgttagttatagtcagtgggcagtttggtcaattcataagtgtctgtacctatataatctatactctttcctattcaatgatatgagaaactattttcagatagttcattt

SEQ ID NO: 215373 - DNA, 899 bp, Cannabis indica
ggattcagtcaaaggcctagtgttgattatggtgaaacatttagtccagttgtgaaggcttgcacgatttgaattgtgctaaccattgctgtagcaaaatcctgggaggttagacaactcgatataacaacgcatttttgaatggcactctgaatgaagatgtttatatgaaccagccacctggttttgaagacaaaaatcaccccgagtatgtgtgcaagttgacaaagagtctatatgggctaaggcaggcaccgagagcctggtttgacaagctgaagcaaacattgttgagttggaattttgtcaattccaaggctgattcctcattgtttttctacaaaacagaaagtgaaattttgcttgttctcatctatgtagatgatataatcatcaccggcaacaattcagaaaaattaaagctcttcatcaacaagctgaatctggtttttgcattgaaggatcttgggcccttaaattactttcttggtattgaggtatacaaggatgacacagggatgttcttatctcaagccaaatacataacagagttattaaagaggaacaacatgacaaatctgaagccgtgtcccactcctatgtcagttggtaagactctgtccattactgatggaaacttattcaaaaatccaacagaatataggagcttaattggtggtttacaatgcttgactcatacaagacctgatctcagctttgctgtaaacaaattgagtcagttcttgaaagctcccacagattgtcattggtctgcagccaaaagaattcttagatacctaaagggtactctcaatcatggtctgcacatcaagtacagtgagaggttgacactaaaactaattaagagcattgaaaagagaagaaataaaactaattaa

SEQ ID NO: 215374 - DNA, 1529 bp, Cannabis indica
accgtaaaatcaacaccaagaataatactgattcaagtccaatatagatcgatgtgatctatgattctactccagtcttggtacatcactgaaacttcttttattgattgagccagaacacaggtacaatacagttgagagcgattatctgttttgattctctctaggtgttttctctaacactcttccttgacaagcttcttcatctatagaagcttatcctttacaaaattcaagacccaatcctctcttttctctgtacctctcaattaaaactctctctcaaagaacttgcatgctctgcttctagtgttttgtgtaatattaaatgaagaggatggttgtatttatagatcgaggatatgaattccaaaggtcgtggcttcaaataactaagtagttaattcagttaagacttaaccaacttaactggctccttaaaatgagatctccaagtcagctcttggcatcgagctcacttcaaacatgtatcaagcttcccggacggacatcccaaactgatgaagcacaatctggaaggacgccctggataggcgcaaagcctattggaatagactattcggaaccccttcctggatgaaataactagtcttttggaactcctttttggaggacgactagctttccacaagacttcttctggatgataagctggccttccataacaccttttcggacaacgaccaactttccagaaaacttcttctggtttggataagctagcctaccgcaacgcctttccagatgatgactagctttcctaaagactcaacttgaggcatttttatttggaggaactatatcacaaatccacctagttcttttaaattaaaagccatggttatgaagaaaatatgcaaccatcatggttgttattttgggtatctcaatgtgctaatttgtgagattgatcaagttcaggcagtgctggaacttgttatctgttaggacctaagtcccaacattatacaaattatcttttgatttgactttctctaattcatccggtccctcttctatcttttttctaatccaatagagccttatgtctatatgctttttcttttcatgataaaccgggttcttgcaaagatgaattattttctgactatctgagttgagagataaatggagctaaaaatatcaaaatttttgatcgaaactatcacatggactcgagaattattctccttgatcgttagttccttctttcatgcatgagtggttttagaaatatgtatatgtgtacatacatatataaaagatatagcttattagtactattttcccccttagagacttcaattatatatcaaacattaaaatactaaataaaggattagtgtggtcacatgagagttgcactcttagtcaaggtctaccgattgtgaagggaggtattgaaagggagttacggtttgattgggtataacttcgtaattcaaaatttattaaatatcaactagagttagtctattatcatggcatgggttagaggggtatgtaat

SEQ ID NO: 215375 - DNA, 492 bp, Cannabis indica
cactcatacctgctgcactgttttcacctctataaacattctattctcattccatttttatgattattttctgttcatactgaacccaccctcgttctccactccactccatgacagttttctttattacttactccctctttaaaaaaaataagtaatttttaccccctttttttttttttttttttcattgtttacacctcttcttcttcatctaattttgaatgtttttctttttctttgtttctctagttttttggtgaacacatggatatggagtgtctagaacaaggactaaccaccacaagctcagggaatgagttgagattcgaggaagaagaaggttatgtgttatcacgaggtttggatgaaagaatgccatttcttgaaatgttacaaagcgtggactctccatctttcttgcctttgaaagatccaagctttcaaactcttttgagactccaacacatgaaaaagccgtgggaaccaaat

SEQ ID NO: 215376 - DNA, 676 bp, Cannabis indica
agggccgccaattcttctgagcgtttgaggaaaggggtgttgtacacttgaacccaaagaggaagtttgagcaggctatccccgttgaggacatccagggagttcggaatgtccatgagaatcgcttggttgaggtaagtccaaggttgttgcaacaaaacccgacgcctatctccatcgcaaccaaactccacaagaaaaagcccatgagggcgctcggtgatgatcacggggttcctagagatatggttccagttcttggtcattttttctataaagttctttcggttgaaagacttgaccgtgtgcactttagcaacaagaaagagtggggcttgttgaatctcggtttcaggggtgtttgcaggaatgagttcatgaagcgtttgaaccgtacattcggtttctgtgaggttgagagcaacagaaagagagtttgttagatcctccatagagtaaaaaattgaagagcaataagtatcacaactcaagaaaggaccaggccgagttttagtgaggggaagagactgagtgggaatttgagaatacaaaaattttgattgggtaatgaaaagaagaagactatgagggtgattgagagcgaggttgaacagggaagtggatattatgtaaaagaaaaccacggcagcaatagataaccccagagtaacccaaa

SEQ ID NO: 215377 - DNA, 1571 bp, Cannabis indica
gtgggctgcccaggttgtctgtgtcatgactatgatcacattttgccttactctaaggtacttgaatttgaaatttaactccatttccctgtgggtttaattaatgtgtggatatcattacttcaattcgacattctccatatgaggagggctattgctataagccaatgagttaatgaaatggcaattattattattgtcttaatgaaatgacaatttggttttcttgattcttttatctccctcagcagcaaataagggtctttttggatgttctctatctttggttgagaaaattaatacactattccatgtaattagttagcttgaaaaatataggaaaagaaggaagtaatctgaagtgttactacaaaaaatcatttgcaggtgagactaaaagttagataaaattgctgccagtttgagcttttaaccctggaaactcctcaccataagaaatctgcaagggtaacttggtatagaattatgaaatcatttttgtggaagaatcactttaggtttgagaagcctgaaaactatgctgcgtctgattagtcttcaccttgtggggtgtgcatttactcgagatgtatatacataactcttagaactgtattaatagtgctcactaaatcctgaaactaaacattatatttgtagagaatgctaaggcttgaattgtgtatcttttgtatttcagggtggacaaagcacactagaaaattgtcaggttttacaggtatgcaactcttcttttttcattccaatacgcttgtaacgtgcaatgcatgtatgcattttaatcaggtgcacttttgtacatctataattctgtagatctagttttttttttccttttctttttttccttctctcattcaaccagctttggctaactgtttaagccatatgcctttctttttctttctatgtcattatttcttgaagtctatcttgtgctttctgtccttctgttgttgtctgcttattatagatttgcccatttggtcttttgaaaagtgggatcatggtttttcatcctaatatattaaactacatactaggttatcttactttatattatgatgtttgatcacgttctagtagatacctcatccaacctagttttcatacttacaaccttttcagccttcactgtttacaaacagttgtaaataagggacaatgcagaaccgtggggcctattggtatcttgggatgttgcgggatcttttttactcaacaatttcatttgttatcgtgacagctaataagatcataaaaacagcaaaattttctactgtctgatgatgaaactaacactttcaagagaatactttgatgcattgcaggcaacagttaaccggtcaaaaggaaatcgaactgagctatccagagctgaacttattcagaaaagctcttattgtcgtgtctcaggtattccaaaactcacttgaaatcttgaatggattaatccagctgattggccaactgcagactctttaattggtttgaacaattacaggccgcgacatggatcttctcgagctttctgcctatggtcaatgttc

SEQ ID NO: 215378 - DNA, 787 bp, Cannabis indica
tggtctctctttttggtttaagtattaatgactgcaggcaattacttaatttgtatgagtagagtttctttattgtttgtgtatcgtttcgttaacataatagctcataattttgcaagagcttcatattttttttttcatagtgagttttcaataatggcttatacagtatttataatcgaaatgaattaatggagagatttaacagaaaaatgaagaataattaaaatcaatatttgtaatatgttgtttactaaaaaattttagaaatagaataatagtaatttatcttgtttaatttatcagaaaacataatcggaatatttaaattgactaaatcacttttttgagtcaaactatagtatatgataattattttgtaagacatattttaaaggaaaaaattattattatatatttaatattaaaaaataaaaaaataataaaaattcattacccttatgacatgtttacaaataagtaatgggaatcaatagtaagttaatcattttcttttatttattttacttatattattaaaattaagaaaatgagaacttgattaaataaggaataaaagaaagaaaatacttccccaccaacttttgtaaggaatgactcagtctctatcaaagttgaatctctattctctgaatttgctgatttggttcctgggttctttggtagaggctgcaaaggcccctagctgtgtgtgggtgtggatattgttatttgcacggatgcttcatgggcagctggtaaggctggtattgcaggtgtaatgacc

SEQ ID NO: 215379 - DNA, 536 bp, Cannabis indica
cgtgtcgtgttgtaccaatttgtcagatcgtctcgtgtcgtgtcgaaatttatattttttcgtgcctagtcatgctcgtactgatttcgtgttatgtcaaaatgctcgacttgtgtttatatcactaaattctatggacacaatttcatacattagtttttagagaaatactagtaaatggttttatttctctctctagtgaaagttaatgtctctttttaagaataataaagcaaatatcttttttttttttactttttgttacctaaaatacccttaactatatataaagtattatcatgttttattcattcaaaagaaattatgaacaacgaaacaaatttctgtgatcaaaatatggagcatgtcccatataaattgatttaatatattataatttttttgttgtggtacatcaatttgttttctaatggaacatttcactattgatgcataataaaacaccacatatcaaatttgaatccccttacaaatttttaccaaataagacctttgattacatgaatttctcattt

SEQ ID NO: 215380 - DNA, 765 bp, Cannabis indica
tcttgtgttcaatacctcgctacatgatagtagaaggaaaatatatagaaggggttattcaatgcctctcttacggtgtgtactccccacagaagcaagcgagataatcaaagaaattcacgaaggtttttgtgaggattatgcgggtggccaaagcttgtcaaagaagataatccgccaaggatattattggccaacaataaataaagaaacacatgaatttttcaagaggtgcgataaatgtcagagattttcacatatacctcgcgtaccaccaatagaacttagaatgatgaccttgccatacccatttgcaatatggggaatcgacctgattggggcattactcacaggtcaaggaggagcaaagtatgcggtagtggcagtcgacttcttcataaaatggatagaggctgaacctctagtttccataacttgcaagaaggttctcgattttcttatcaagaacataatttacaaatttggaatacccattaaaatagtatccgacaatggagttcagtttgatggcaaattatttgctgagttctgtgaaaggaataaaatcattaagagcttcccttcagttttaagaccccaagcaaatggtccaatagaagctgttaataaaaccttaaaggatactatcaagaagaagttggatgttgtaaaaggaaaatgggcagatgaactaccacaagtactttgggctcacagaatgatagagaaaacaacagggcatattccattctcgttggcatttgg

SEQ ID NO: 215381 - DNA, 986 bp, Cannabis indica
ttacattgatgtccccttgtccaaggtccatcacacttaaagcaaactcctctagctcttttctcttgcacctctgaatctgtcagcctgcgatatcccttgccaagttcaaattctcttctctcgctgttgggagtcaaagcacgatatgtgctattctgggcagaagggcctttattacttatcccacccagcccaaaataattcttttgattgagcctagttgggctaagtgcagaatgtttaattgggcccattcctttactcggcccactcccaaaagcccttatcaccttcggattggcctccacaatttcagcaagttccatcgtcttctccaacccgactggttcaagaagtcggagtgtgccctgtatctcggagttcaagcccttcatgaacgctgactccagcaacggctcagccatcggacctagcgccgccgtcaacgcctcgaactgctgccggtattcctgcaccgtggatgtttgctgcaacgccaagaagcggtcatacgttgaaccttcatgcgcagggagaaatcgccggagaaggagacccttcaattccgtccagctacgtatttcctgccttcggttctcccacctaaaccagcgaagcgccggaccttccaaacagaccacggctacctccaattgctcctctgtcgtaagcctctgcaaaccaaaataacgctccgcccgatacgtccaatcgtcgggatccgaacctgtaaacagaggtagctcaatgtttctcgggcgaaactccgatcgccttcccccattacctccaaactcctctcgactactctggtttcccgatccactagacccgatcggaggttgaacggatctcgcaattggacttcgtggaccgtcggtgagctccgtcgccattctcgcttgcccacggagaagcaaatcaagcttctcactaattacagcaatgccttgttcgtgagaatcgattttctccttcatcga

SEQ ID NO: 215382 - DNA, 515 bp, Cannabis indica
tacatatttattatatataaatgtctatcattttataataatatgattacaaataaaatagattaatttaaaaaaaaaaaaaacaaaaaacaacaaaaacaacaaaaaaattacaaaattatagttgtacaaaatgttaaatatttttacggtttgaaaattttatttacataaaatatggtctttcgatgtattttaaatacttttattattttgttgttaatttttttattatttgtatattattttttatgttgtttcattgctattttgttattgtttggatgttattttttttgttactttcatgtgattttgttgtgtctttgtaaaaactgtaaaaatttaaaaaaaactttgaacgtaaaagtgtaaaattttatttaaactaaatacaaaataaaactaataaaaaaaaatatatatatatgaaatataaatttaaaaaataatacatatatgtatattttttattttatataaaaatattatttattaaaatatgattatataaa

SEQ ID NO: 215383 - DNA, 692 bp, Cannabis indica
acaaaaactggtaaagcctctcttaagtattaaaaaaattacccgcaatgataataaggtaaataaggacgagaatgaggcagaagaatccaactaaggacgagacagcagaacaaagctcagtagaaaccaatcaaaaaactaccaatgtgtgtaaaattaataaaaaggcaaaactccaatgccgtggttgacgacaatgatgaccaaaagagtaaacagaactccaacctaaacaaacgagcataagaatacttgattaatgatctttgtaataacagaaaatttagtgtactttcaatataaattagattaaatgagttatgagtatgttcaccttgttagtgtaagtaaatagtcctatttggtagaagttcagaaattattgctccaagaaatctcaaaagagcaccagaagcacccacagaagtattattttgaataaatagtgaaaaaaatatactcccccaaaagacctgataagaggtgtatgattccaattcacactgccaaatgttacaccctcaaaacaaagacaattagaccacatttgcaagaggttcactacaatttcaagcttatgtaaaactagctttttaaaaataataaaaaaagaacataccaaagccgaattgcttctctaagcgaattccgatagagaccaaactaaacatgcatgttcacaagacaat

SEQ ID NO: 215384 - DNA, 1159 bp, Cannabis indica
gtattgattagataatcatttagcgtaacgataaagttggtcattgtaaggtgttgtgattttctcataatgcgtagtatgtgggaacgtataaatgttaatgctgtatggttacgcaagatggatatgtgtgagtcacatatatgtatatatatacatgtttcttatattgagatgtgaatatctacgtttacaatgctattaatctaataacttttcttgctgagtcattgtgactcacgggtgcttccttgtgcagataagaagaatggtagatgtgttcagccatgagcctgaggtctcccagcagtgtacatatcagccgtggtgtcttggctttcggaaagtaggattgacttctttcttttatgtttgggaatgtaactttatttactaataacgattttaaaatatgttttatagaaattttattagcaggggatccccatattacgatagtactctgaataaaagtttttattttaaattttatttaaagattttaattaaaccacactttttttcctaaactaatagattaatgatagtaaaattgaaaagcacacatgtaacaccctaactaacataggcgtattacgtgatttttaaacgtactgtgcagctcgttgctaatcaacgaggtttatggaaaaacgtgattaattaaaattttgctttttaattaaacttataaaacaatattacaaaagactcgggatcccgattataaaatcatttacaaaaagatttaactgtttaactgttacataaaataaaagtcgtctaacgaccagttacaaaaatcagcctcgctgtcccgatgatcgtacgctccaggcctaaccgccccgacatgtacaatcttcataagctcgctcacggtccatcagctttagccttgcctttacctacacataaacgtagaactgtgagtcgacagactcagtaagaaaagcataataatactcatacataattctaactgccgtgtccaacacgatactgagtcccgctactgccatgtccaacatggtactgagccactactgccatgtccaacatggtactgagttctgaacgttcatagggacggtactattgacacgtaacaacctgatcggtcgaaccggtcatactccggctgctggtcatactccag

SEQ ID NO: 215385 - DNA, 746 bp, Cannabis indica
ttatattatcgttaattatatatatacattattatctccatgttttaactaaaaataaataaataagagtattttttgcaaatagaaaataataataataaccacacactatattttttttatatactaataatctttttaagaaattacataataacactatatattattatatgttacataaattatatctataatttttttcgaacaaaatttatatatatagtctgaatcagcaattatactctgttttagtagttgctctgttttttaaaaatcattagtaaaataatcactttttttttttaaaaaaaaaacattaaattcattaattattaacaaaataatcacgtttgatgatcataatgattatttttgttgtcataaagtataaagttattttttttttaaaaaataataataaattttatttcaattttggaacaaaatataatcaatatatcattatataaattaaaaaaataccatgaagactttagcaccagaattaagtgcattaataaccatctttctctccaccggaccagtgatctccaccttccgatccgccacagctggcggcaccgccgcgcaaacccaatcaccctccctaatattcttagtggcgggatcaaacccgggggcagatccgtcattatacctcttctttgcctcttttctacactcaagcgcgtacctcacgcgctgcttaaactccctctgtaactgcgccacaaaattaagag

SEQ ID NO: 215386 - DNA, 984 bp, Cannabis indica
catagtggatccgatttcgtaaccgaaaatcacgatgatgaacaacaagaacaagaagaagaagatgaacaagaacaagaagaagaagaagccattgaagaagaaactgtaaagaaagatgttagtgttccacatttggaattctacattggtcaagaggattgtacattgattccagttgaattcagttctaacaaggttgaagaacaaggaaaatctagcaatgaaaaagaagaagaagatttgatattggattttgatttgtcttctggtgtggcaaaacaagttgaacaagttactgaaacttgggtcagttcaggtgatactttagagttactttcttcaaatgaatgtattcaatcagatgagagtaggaggaactcatttgcctttcatggtgagcaagtagagttagaaataacaagggagtttcagaaagttctcattcatcaagcaactcaaaccctctctgatgatgaagactttgaaagtggtcatggtcaagctatgtcaagaagaggagaaattgacttagatgttaatcaaggtatgttttatatgaaaatttggtgtctagttactttgatttgattaagaaatttatgaattcttgtttatgcagcttctgaggatgagattgatgatgctgaagtatcaatagggacagatattcctgatcatgatgaaccaattgatgaaattcaatccaaacaagacccttcttcaagttctatcaatttgcatagtgatgacaataatcatgatggtaacaaattaactttcatatgcagaaattagttttcttcttttgttagttacttttgtttgatgagttgttgtttttttctttctgtcaatactagattttgatgaagctgaggaggaagtagttgaattcaaaaccttatcagttgaaacaacaacaatcatttattttcggtttagagcttaatgataatgatgaagagaagtttcatagaagtt

SEQ ID NO: 215387 - DNA, 631 bp, Cannabis indica
tttgaaacgtccgagcccactgatacaaaaatttgtactcgttgattactgggccctaaaccttaactaaattatttaaatctgaaattgttttatgtaataaattggaatcaagtggttgataaataatatataagatacactatttaattataatttgtaagttcaattaattaatccttgctttgcttgtgatattatgtataggaataaaagtatatatatatttgggtaaatttatagtatactctttaaggtttgagtaaattctatatctatttcgatatttaagaatttttttttgtatgaatgtgtatattgtagttatttgtgtatgttttaattatttaagaatatctgtaaattttattttgaataatgtatagtgctaaaaaagaatgttcaaatattttattgcacgcatgattattttttcttatatgcatcgtaagcaattatttaaactctatctttggcactataaactttttaaatttttaaaaaatttacatacaattttaaataactataacgaacacaacgatcattaaaaaaatagacagtaaaatataacgaacacaacgatcattaaaaaatagacagtaaaattctcctgaatgacgaaacatac

SEQ ID NO: 215388 - DNA, 638 bp, Cannabis indica
attttaaactgacacgattctttttagaagttttaatattgcaattgaattttattttgttcattttataatttatttagcatcatcataatttattctgatattacccaattttagaacccataaaactcattatagtcccattaattttttaaaaaaatttaaacattaaaatatatgtttctcattttaaaaacctgttaaaacacataaaaaaatattcaaataatccattacaattttcacaacaattatatcagttaaataaatccacgcagaagctccggtgactgactagcggtggtgccaccacctcatggtggttttcggggtattcgagctattggttttaaagctcacgacaagtggagaaagagtatggaagttatttttcttgaaggggtccggagtttcttagatctaagccgagacatctcggctctagcaagttattccataatgaagaagggtgaaggaagctcgaggacatcgagacttgggggttttggggctcgtggagttcattcgtggccgccgtatactcctaccttgaacgacgatggcgctgtgtaccctgagaaggagacatgaacggagaaaaagaagaggacaacaagaaagagagagaggtttagggg

SEQ ID NO: 215389 - DNA, 1095 bp, Cannabis indica
ttttaatggcctaaaatataattttgaactttaggcctaatatgaaactctacagtacactatacgagatttatcttcaaaacaataaataaatttgacttttttgatagaaataataagttctccacgatacaacttactggtaatcttaagtaatttgcttgaatcaatataatagtgaagttggaatgtaagtggttaactatatttctagaatatcaattcatttcaataaaatatgcatgaaagtaatatttaatgtatctcaagaaagatacttcatcactttgtataaagtggtcttaacttaagttattctgatactacttaacattcctaaaataaatacaatgcaaagtcgtattcagactctcaggcatacattaggtttctaaaatagaagtaaatgaatattactaatttattctcattctagatcaatttttagatgctgttttgagtttaatgtatcacacttaaagataaaaataacatgagatgaattatatataattttatttaatcagagatgttgtggctactctctaattaattaaagttatatatattatttatattctttatctcaaagtaatgatttgagatataaattatttcaccttatatagaaaacttctatcattatttgcaagtaacatattgtctatatataaatcattggataaatggtttataaatcatttgcttatgatgccatcctattttttatgaaattgaatggtgtaaatgactatattccagatattctatcccgaaatgatataaattctcgattttaaaaatctcctacttgtatatgcttactatagacaactttaacttagggttagattagtagtggtggtccaagctaaataaaactcaagaaatatttggtataatttaagtcttagactttaaattttagattctaaatagatttttctttttcagtttcctagaatacattggacaatacagtatgactttcacaagttgttaacatccattttctgtcaatagatccaaactgttattaatgtatggatattgagttttatattctgtgacgagaacccacttggactattctaa

SEQ ID NO: 215390 - DNA, 607 bp, Cannabis indica
aactcaatatattactaaaaacaattaagaagttagaaatttgtgtcttttatttaatattactagaaaattaatatatattatatattatatattataactttttaaataattaatctaattcgctcaagtatggattttaaatttttcaatctaatctaatccgcgcaagtgtgaatatctacattttgcggattacattagattgtgtgaattaacttagatcagatactttgtgaacaatcaaagacgaacccactagtaccttaatatgggggctatagcccctactaacaaaaatattatcttttaaaaagttaaatgtaatatttttagtttcataattatagactaaaatagtaaaaaaaccgaaaaaaaattaaataaatctagtaaagagtaattataatgtatatgtaaatattctttaatgaaataagccccataaagtaaaaattctggatccatcactgtgaataacccttatttataattgtattcaatttaatatcaatttcatacattttaattttaaaaaaattatagtacacttttaaaaaggcgtgttctattacatcatttatctatttcaatataatttttttat

SEQ ID NO: 215391 - DNA, 502 bp, Cannabis indica
ataaccatagatttaaagaatacatttgttgtttcaaagagaaaaactcaaatagcggaagcgtaccttaatccatagatagtaatgatcttaatccattttgtagagataatctttgtagtgattttgagtactaatcttccaagaaaacaagacttaaagttttttaattttctctcttgatgggaagaagagaataaaaatgggctcttgtttcttggggaccactaccaatttataacatcatagctaggttattaattttaagtatttctaatttagcccctcaataaattagaaattaatatcgcttagggtgtctacacatttaggccatgatactttaatacccaatgacccataattactaaaatgatcactttatttggttcaaattttaaaggagaattttcataaataaaggaattaagggtatagtttacttttttatggcataaatatatatcactatagggttgtgagtttttttatttattttttt

SEQ ID NO: 215392 - DNA, 1068 bp, Cannabis indica
cagatttgagcttaaattgtaacctcggaacataatcttttgccacttttctctattttcagacagcagcaaggagatgaaaccccaatggtatgggaaatgctgttatatatctacatcctctactcgccagattggcattaccgaagcacaatgcccaccttcctgtttctctacggtgctgcatttgctgttttccattcactcgttcggtttggaatgggcttcaaggttcattacatgatcctctgtcttctgtgcatcccacggatgtacaagtactacatccacacaacagatgcacacgcgaaatggctagcaaagctgtacttggggacgatactcgtaggaagtttttgttggctcttcgaccgagttttctgcaagaacatctcgttttggtacattaacccgcaaggtcacgctctgtggcatgtcttgatgggtttcaattcttatttcgccaacactttcttgatgttctgtcgcgcccaacaactgggttggaatccgaaagtagtccagtgctttgggttttcttccttatgttaaggtacagaaaccaaagacacagtgaaagtaaaaaaaaaaaaaacaaaaaaacaaaaaaaaagagaaagtaaaagacttttgagttagtgaaaatttgcagtgcaggaaaagaagctttcttttaatttttatttttttttgttttctacttactcttctttcactttcttcccactccaatattttgaaagtaggtggatttgttttttcaagggcagcaacagtaattataattctttgcttcgttttacttgatgaatgttaatggtagtttttgaaaatggttatgataatatatcattgctcacatctttagatttggagaactaatgatttgttgttttttctaaattctaaccaaaaacatatgagagaggaaaatggggttattttagatttggagaaaggatgttttttgattttgtaggttatgattcttaatcactaaatgtatgcatcttggttattattgatcacttgattaaagaccccattaaattggatttgttatgatta

SEQ ID NO: 215393 - DNA, 287 bp, Cannabis indica
tgtgcaaatcaagttattcaacttgatatgccctggatctattgtcgatgttcatgcgggaaaggtcttagtatgagatgcccaagataaaaggaacgaatcttgtgtaactggtttatttaatgaatttacgataaaaattataataataagagtaatttgtgacataaatatttaagtttaattcttagacggttgcaaataaatacctaaatttaattttttacagtaataataattaagttatatttctggaactctatacgtacctgactattaaatatgaa

SEQ ID NO: 215394 - DNA, 944 bp, Cannabis indica
taaatcattgactctactcttatatgccccccttataatctctagtgctgattatatcagttatatatattgcctagcttacgttaaatattagtataagtgttgaatatagatttggcaattggcatattataacgttcatatatatttattaattgatttattgtacttaatatatttatatgagtagtgcaaaattagttgctcacatatactagacatgtcctggggttttccaaccattatttgttaagtccaatttgccaatctggcacaaagtttagtgaagtattaatctaaagaaatggtatgtagtgtatttattttcttaatataaaagtaaaattaaaaagaaaaaaaagggtatataattaagtaattaagattattaacgtatgatcaacactgcatcatgtgtcagatcatgcagcacagagttggcgataataatcacatgcataataagtcacgatattaataaattaagaaatcaaagtgagcatttgtattgtatataccaaaatctctggtcccttgtacaatgtcattagctgttttcaagtaaagatactaggtgtctaatgtctatctatcacctcaaattaaaagagagaagatagataattaagtatatacatacgttttctaagatagcaaatttacttttattacatatattaaaaatatttttttttgatactgctggatcattataattatataaagttacttttactatttttgtagataataaattataatttttttatttttacatgaaaacatataatatacttaattattataacagactttttaatttagggaaatattcaaaagtagctacatataataattctaaaaaaaaaaaaaaagagctatttatagtaattaaaagttatatatacctgttaacgtttaattaatgaattaattattagttt

SEQ ID NO: 215395 - DNA, 882 bp, Cannabis indica
gattgctattaggtattatatagcacctaacacagtattgatgtggcaattgattagtagttttttatattattatattacgattggttagcgtttttgatatttaggctctctattaattattaattgttttttagtttttgttctaatttttttaaggtcattttttatttattgcaacttgttcgttcaatatgattacgcatgaattaactgtgcacacacttaaagtaaatggtaagctaatttgaatggaagattttccattttttctttatcatgtactcaacagtgattttttttccatgaaagtttatttattttttttaaaaaaaaatatgtgtgagactcgatattaatttgcagtaaccgatcttgtggtgtttgatagttcacattgacaccataaaatgtcccttagcattctcattaactatataccgtggatataattaggcactaacatattttcttctttatattcttaaaataatttgaacaaaaattataaaccaaacataccaaaatattaaggcaatacatagctgaggagaccctgaaagctaatgggggatttcgtgacattataataattaacaattttattattgaaataattaatataaaatatattatttagaaaagaaagaaaggatctttttaagttaaataagttatttgtctacccgaaaaatagatgtgcaactaattttcaaattagggttattttacatattcaccctatgctatatataacataaatatttggaagcccttttataagacatgcagatatactatatagtactatgttagttttaattcattgatcattttattttatttattgataataggctgtactatgtaatttatgtagta

SEQ ID NO: 215396 - DNA, 584 bp, Cannabis indica
tgatgcagccgtagctagggcggcatagggaataacactcaaaatgaacctgaccttagagtttgaagaccacgaggcagacctcatggctcatgaactaggagacaagaaaatgctcaggaagaacaaactggggagaatgaggttccccctgaaaatctgaatgatcagtcagaaccctctcatagaaatgagaatggtaggcaaccagaaactaacgaataggaaattcctcgtggaaatgaggaagaccctgagacacagcccgtggaacataggtcaccggtgagaaatcaccagcgttcttcccgaactcaagagagagggctcgtacaaaccctagaggggaaaatacgacaaaccacactcaggggggaagaacagggcgtaaagaagcaagtgtgacctcaaggagctcaaggacccacagtcagtcaactcgaggaagagaaagtgctcgtcgcgttgatgaccgagaaagcacgggaaccagtaaatctgcaagtcactcaaagatgaggtccatgagtaggacgaaatccatgagcaagacgagatccataagtaggacacagtctgtgagt

SEQ ID NO: 215397 - DNA, 520 bp, Cannabis indica
atttaattaaatatttgaaaatagaaaaaaaaaaaaatattaaatttcaacttttttcgattttctctggttttagctcttgcagctgagaagctggttctatggctaaaacaagatcgaagaaccatggaaaatcgaaatttgctactaaaaattcaaagaaaagagctggtaatggtgttcctgatgtggattgttctgtttcgattgggcgaattactgaaatggagtcgctggaggtctaagacgaggaggatttgcagggcgaggatcgagattttcaaccattatctcccaaatcttccctagctgagattcaaaggtaggatgaggctagaagtgacgctcggaaggatttcattcattttcttatggccaatgatcaatgtaacggtaacatactgcaaggtaagaactcgataccccctattctgtgatctgaatctgtgatgcgtaacttggagaactcatttaaggatactgaacaggcaaataggaaagtgaaaattactcttgatga

SEQ ID NO: 215398 - DNA, 553 bp, Cannabis indica
ctcacttggcgcgtcactatatcgtaatcttaatgttttttaataaaaagtacaactattttttttttaaaaaaagtacaactattatagtaaataaaaaataatttaaaaataataaaaagagagtttatttcttaaaaaaaacagtaaaatgaaaaataaactaaaataaggtctgcctctctctctctcttcagtaaaagagaaaccttaacattgtcgttctctcattctcgcctcacaccctctctctttctcaatcgaagcctctctctctttctctcagtcgatacctcttctttttctctcagattcgaagcctctctctctctctctgagattcgaagcctgcctctccctctctcagatttgaagcctgcctctccctttctttctctcaatcggagctactgctcctcttctccgacaaccaacaacagttcgaagcctgcctcttctttctctcaatcgaagcctgcctctccctcctcagtcctcgaagccccaatctctcctctcagttcgacatattgttgcccagaacaaagcccca

SEQ ID NO: 215399 - DNA, 726 bp, Cannabis indica
acacccaacctcattatacaactctttttagaactgtgcatgagttgggttggccgggttaagagtattttaatgacccaagccaatgacatctacctataaatttttaacaaattcacatcctaaatattttataacccaatctatttttttttttttttgcgggttgggttagtttaggttagattataacccttattccataattaaaaaaaaaagattttgatattatcaaaatcatacataaattaaaagttctaacataaacatattcatccaaagttacaaataattcaagatctaatattacagtcatctaaaatttaaaactatattgtccataacaaacttaaacaaaatcaaaatcagtttcgatatcaacctcactcaacaatctcaacgtcaattgtctttgcttttgatgatgattcattgaccttaagttttttgttctgcaattatatataaaaatatagttagtagttagtcaaattattataaataaaataaataaataaaagacataataaaaaaacaataattcaaatatttatcaagaaattatatgtacctataagaaaatcatacactctctcataagaaaaaaaaagttaaaattataataatattagcaactacaaaaaaaattatttagctatatagtatatactaaagatcatagtaaaataataacaaatctaatgaaatcaacaaactaaaaaaaaa

SEQ ID NO: 215400 - DNA, 703 bp, Cannabis indica
gagtacatcattagctacaacttcaaaattttaatgcatgtttgatattataattttttaaaaaaaatatttttaaaacaaaaagaaagagaaaatagaaaactattttccaagaacaattaagcgtgtttttgccatgttcttaaaaaataaagttacaaaaaataaaaattataagaacgacaaattgttgtttattattttaaaacataattgattttttgttactatatactttttcttcactttatctctctcaccactttttctctcatcaatttttttgcctctctctctctccaggggccgaaggttggtgttcgggtttaggtttaggtctaggactgtgctgagtttagggtctgagtcttggtctgaggctagtttttcggatcaagggtcaggtttagggccaggtcgagtcggttccagagacgaggttcgcatccaagttagacctgaggttgaggtccaggtttgggtgttaggctaaaattagtctaagtttcgggtcgtattttcggttagttttcactctttgtttctagttttagggctatattacacttgattctttgatttcaggtcctcgggcatttaaagaaagtatgtacaagaattgaggaaaagtggttaaagaatcgagaagaaaaaccaagattggtgtcgctacctgttccagtcacgacggggactttgccag

SEQ ID NO: 215401 - DNA, 648 bp, Cannabis indica
atatataattgattcaattatgaaacaattgctatgtaacatgtctaaatattaacctacgaatgtaattgggggaattaattgaatcttttgcattaatgtgttatgtataacacatattatacaactatcaatcatttattggggcaatggttgaagaatcaatagtttatttaataagaatttttttgaaactttatttaatgtgtcaaatataatatgttaatgctttacgtttctgctaatatttatgatatgatgtacaattttaaatcaatcaactattatgaaattacttaaaaaatagggtgtctacacatttagtaccttgtgtttaatttaaatacaagttaggtatcttgtgttttcaataattcttatttggtgtctgtattttaaaatcatacatatttagtaccttaaattcaatttttttttttataaaattttatcaatacaatcaagtcacataataaagcgattaagtaacgtaattaaaagaaagcaaaaacaataaaaaaaaatgaataccaaattttaaagaggttcgaccccataatatggtaatagtctactccccttgtattgtattgactttaagaaaaggaacagagtattcttcccttcgaaagctcttacaattgatct

SEQ ID NO: 215402 - DNA, 354 bp, Cannabis indica
attgttttggcattatattgagaggaagaaagggttacaacatatatattaaacactagtgttggtataattattaatttgatcacatacaaagttgaatttctttgtttttcattgttatcatgacctttttagttatggctatggataatacactatactttaattgattttttagaggagttttatttattacacttcacaaaattataagtacacatgaatattttaaaaaaaattaattaatttgaaaaaataactcttaattaattttctttttcttaaaattatttttcatatcattacggtatcaatttcattaattacgtacttatatatagtttttataataat

SEQ ID NO: 215403 - DNA, 694 bp, Cannabis indica
aaatattattttgaattatgtggtttgtaaaaattactaattaaattttttattttgttagatgataaaataaattttatattttataaaatggtacaaataagatcttgaattgatttttttttatcaaaacaaaattcaataataacctgatttagacgtgttataacaaaattagttatatttattgtatttttttgtattaagaattgtttaaattatttatattaaaaaaaatgttgtaaattgaactcaaggttctattatattattttaaaaaatacataatttattttattattttaaaaaaaaaaaaagactctaagtaacttttacaaatccaaaataatatttagtcttgtattatattgttcaagataaaaaatgaaaattaaactcaaaagtcacaaccatattttaatttttcattgtattacaattgcagctttttagtttttggaaaaaataccagttgctgttataaactgcaccaaataaataaatagtacattattgataatcaccaattataatttttattccaaaactttaattatatttataatagttctcttaatttatgtatttgaaaatatatgtcagaatattttttcttaaatttttatgatggtgcttattataattatatattaattttggaaatttttaaaaaattctagaaatttagatgttg

SEQ ID NO: 215404 - DNA, 522 bp, Cannabis indica
gatctggaattactacgagtgacacaatgacttatgctaagatggctgagaaggctctgtgagctgagggtgcagtgaaattccttcaagagccctgagagactccaaatgttggtgggaccacctctattcctacttctagatatggtagggatggtggtgattccaccattgatttgaagagaaagactatcccgacatcttgtggttcgggatagaataaaaggttccaagggaaccaaggcagaggtggatgtcaaggttattcttaccttgagtgcccacattgtaagaaataccatctcggagagtgcaatcggaaaacatgcttccagtgtggcatagttaggcattttaagaaagatttccctcaaacaaagaaaaaagaatagaagcaagaggcgaagcctgtacctactcaggtgtttgctatcactcaagttgatgctgcagctttcccttctgtagtgacaggtcagcttcttgtcaataactcctcttttgctgtactatttgactctg

SEQ ID NO: 215405 - DNA, 891 bp, Cannabis indica
taatattatgtggaccaatcaaaacatagcacacatacaattgtgtatacaaagataatccacagtgacacttaactatagaaatctaacagagtggtaaaaacaaaacagaagtgcagttcaagtagcaaatcatcaatatcaatatcaatcaatataaatatataaaggaatgcccaaaggattccacatggcaccctaattgtcattatttcctaatctctctacttctaatttttttgatttaatcttaatttgtttagttatatttttcactttccatatatacattaatggacctattacaatgaatgtgattttaactttctatatattgattgtttttaatgggcgtttatgattacaatttcatttccttaatattttttagggtttcaaaagagagaaataaataaaataattcattcttttcctcaagaaaagaaaacagagagagagcccgatattggagatattagtggatagtaattggcattaaataatattttactatctctacaaacattaaaatttaatgccaattattgaaaaattttgattttttatattcctcagttaaaaggttgttaattgtgaattgattgttaatatgtagaaacagtttttcttcacaagataataaaataatgatttaatgcttttaaaacatttcttcttattatcaatatatctatctattaagctatgtacactcttatctttgtagcaaaaaaatatatatattaatcacgtttcttacaaaagtctaatgatatatatcaaacattaaccctcacatttctcacactcttttctttagcttatatttttattcttctgttgtgaaacaacacctcggcaagaacagaaacagagtataccagatcaatg

SEQ ID NO: 215406 - DNA, 642 bp, Cannabis indica
atattattatcaatgatgaataaatttttgggaaattttataatatactctcttaaaaagatacaccaaagatacaccgatacatttttatttgttttagtatttaaaataattctttagtcaaattttttctcatatcatctaaattatacttatttaagacctgtaaaaatttaaagaaattcagaaaagtttaacatgccgaaaattgcgttcaaagagtatgttacacacgtaactattttattttatacgcgtgtaaaatagactatttgaacattattttctatattgtaaattattccgaatttcttaaaattttgtacgatatcttaaatagctataacttacatgaatataaaaaaaattagtaattaatttttttttttttgggatgctgaaataagtagagcgtgcattagtacatttcttttaagggggtgcattatagaatcaccataaaatatataagtaattaacaaaggtcttagaattgaatctctggttgatttatatcgaaattggccagtcattttgtatctgtggaatgtttaaggtttgatggatctatttagaaatatgtaaaatccaggttcaatacaattctatgctttttttttcttgttcctaagatgtgatctg

SEQ ID NO: 215407 - DNA, 776 bp, Cannabis indica
taacatgaacatgggaagttggagatgaagaaaactgtagaaaactataactgcctcagagcatgaacaagggcagacgctctttgttatctaagcatctttaattaagctaattacttagcaaattaattccgatacattttatcaaaatataattctttgattaatatatactttgatttggtcatgtcatgtgtgtctagctataataatttttaagttggccttaagtttttgtttgacaaagctgcccctattacaccatgcgtgtgcatcacatttatttttattttttaatataaataaatgaaaaaaaaatagtacaacaaaaagaaaatttgtgtaatggtttaatggaggaaagaaaagcaacaataatagagaagagtttcatcgtttgcttaattccattgattgatgattgttaaatgacaatgtttctttcattgtatttggagaacatgcatagttgtatcaatcttaacacaattcaatgttttcaataattaagaactctggtatgtaaccactccaatgtgttaaatattgaagcctatgtatttgttaatccactttctttttattgttgggtggattttgattcgtttttcaatttttttgctttctccaaaatatggtaattttgatcaaaagtttttttttttttaaaaaaatctttttataatccttcattttagtagtcacctaatctaaatgttttgtctttgatttttggtgtttttacttctattatttttctgtttaaaatttattgc

SEQ ID NO: 215408 - DNA, 526 bp, Cannabis indica
agcagcctcaagaattgaagaataaggaaaatattgagctttgcgggttaaactcaataaagaatcaggacgcttaaggattctctaagcttgcttagcaagcatgacctaattaaaatgagttaaagatctaaagcctagacctcccacaaacttggactggcaaacagtcctctaatttttccaatggactttttgagtttcaactgaagacccccaccaaaatttggagacaagggattcaatttccttacaaatctttgtgggtatacgaaaacaagccataacatatgaggggatagcttgaagaacaaccttaataagagttttcttgctcgctctagagaactatttgtgatgccaggagtgaataattgtggatatattatctttgagaaaggtaaaagcagaatattttgcacgagaaagacattgaagcataccaagatctttagtgataaaaggcctattctctaactaaaaagtgcaaaagaaaaggtccctaatatcagtgtgagtgttaggt

SEQ ID NO: 215409 - DNA, 638 bp, Cannabis indica
agagagagagaggacgtatcataatctaactctcgttcgacatacatgctatttagagaaaaataagatgtaaacggcatctgaaatgtcccaaatatttgttgtacatgtgtggatatcaacaaaatgaaaaaaagaggttgttataatgactagtttgtcccaactcaattgttaccagaaacagattatagaccaaagcaaaagaaacactcttatatccaacaaattccaaaggacggttaagatagtttacgaacaaaagcttaccgttgtcctgagcttatactcagaagaagcaacagttgaggacaaagccgaagagctatctttagaaagtaatgacaaaatctcttcagcaagtgaatttaggttcacagcagcagaaagcccaaaaagaacctgataatttaatgattcaaaagcataaaaaatcaacacattccaatacattttgcaacaattcaatcaaaacaaacaccaaaagaaaatttgttgttgcagcaaaagacacaatgaaaacactcacaatgacacggggagagcttgttgatccactggaggcccttttctctttcaaaatagctgcacgtttttgatctcgtagctacaaagtgacaaataccatcgcaccaaat

SEQ ID NO: 215410 - DNA, 725 bp, Cannabis indica
agctattaagtaataaactaactaaatattttttttttcttacaaaataaatttacagtagtatttatccaccctccattatattaatagaacaaattaaattagtttatcgttgttttaacttattcaatatttttcaaaatgatgtattttttttaacaaatgaaaaataattttaaaattttaaaaatacttttaacatacgtattattacattaacaaatcatttgaaaattcaaaagtgtattataataatttaaaatatcaatttaaaaataattactaaaactagtgtacataatttcgtaaaagcttttacaactaaaaaaaaataaaatgtgcatggtacttaattaatagataattcagttgttttttagattttttttttttgtagcaaaagacgtttatatcatagggttgtttttaaataattattatgaggtattgttttaaaaaaaatatatatagaaaaataatttagtttagtttaatattaatttttacaaaaaaacaagtcttcttttctcattttagaataataaaagtttttatatatatatatatatgatgaatcatatgttataaattatttttttaaaatgtataataatcaaattaatttaaaataatttattttattttaattatataaggcactgcatagcacgttttttctccactaactatatagaaaaactaattaaaacttttttttcagctac

SEQ ID NO: 215411 - DNA, 517 bp, Cannabis indica
ataatattttaaatttattttttgcaggattcttgatccaaatatttagcgtttgtacagtagtttctctcatccaaaacatgtctcctcccaaaaaggcttcttaagtacttctatcctttatattgtcacattgcatttatctcatgttttgaaaaaacgaacagcaattttttcttcactgttgatctttcccatatatatttgtgatgtagatattctagttcatcaaaaatttgatttccatatttttgtatgtggagttagaaaatgtttctctctgatcatgttttatgtatggagagaatttcactcttatctttttcttctggatatcgatgtagatgaatcttcaaaaagtttactgctagccagatatgagttgggcagttcttttcattaccagctttaactttttttaaaaaaattttgagcttttagcataattgcgcaattttgtattgtcagttagcagatgtataattttcagattattataacttcatggtgtatcaat

SEQ ID NO: 215412 - DNA, 558 bp, Cannabis indica
caacgagttatgaatattatatatcaaacccttatttgataataacaagttttttaatatgcatttattgatattattatatcattagagttgattcatattccttctgcaggacacgtgttagcttctggagcatagccaaattttaggtataacaattgccctttaacttatttattaattactccttacaaagtttcttaattaataaacaaaccctaaatcttctttttcttctcaaataaacccttacttagtgaaaattcacaaacaagacatagtcttattcaaaattctaattgattaattaaaactaattaattgagtctacaagacaatatgatctcaactagtgtaggggccatgggcctatatcatcaagctcccaataaataattctaaaatttaccaagtaaatttccaatcttattaattcctcctgactccactatagattcgaattgcactcctgtttacatagaacaatctttaatcaagaataatatgctataattatccattatttcaatcaaaataatcaaagatcctctacaaatg

SEQ ID NO: 215413 - DNA, 1348 bp, Cannabis indica
acaatcatgttattattctatttgttacctgtgactaaacttaatacaatgatcaatttacaacactgtgaatagtttgagaacttatttttaacaaattgaaaattttaagattataataatacataggtttcagaggtaaatatcatttagataaccgcgcgttgcgcggtctcataataataataataattgaatttatgtattaatttagtttataaatatataattaatattatttataatgttaatttctaattaattaatattattatctaactattaaataaaaaataatatatatatatatagagatttataagtgtatatttaataaaatgtatgattccgtattgttgttcaaataatatcattgtataactaaaatacttctaaagataatactatcataataatatgttcgttacattagttttattttttatttttattatagtaaacattacatatttattaaatatagaaatattaaaagaaatgttacaatatataataaggatgtacacaataataatatattagatattataaatatggattataaaaatgaaaaaaaaatataaattttttcacttcataatattaataaatatataaatattataaatgagagttataaaatagaaaaaaatatcatatatatttttttcctcttattattggaaacaaatatcaaaataaaacaaacaatatataatatagctatatcaaaattataaaaaatttctataaaagaattatatgactaagtctaaaacaaatttatcataatacataattatttagtacttatacacaaatatatataaacatataaatatatataaagtgagttgaaagaaactcttacctcttacctaacaaaataatatcagaaagagttgagtcgccagtgaaatctcacagttaaatattaattgaattatcattgtgtacacatgtgtatacgtgacatgtttttattggcttcgaagttttactgtcacgtgtacgcatgttgtaacaccctaactaacttaggcgtattacgtgatttttaaacgtactgtgcagctcgttgctaatcaacgaggtttatggaaaaacgtgattaattaaaattttgctttttaattaaacttataaaacagttttacaaaagactcgggatcccgattataaaatcatttacaaaaagttttaactgtttaactgttacataaataaaagtcgtctaacgaccagttacaaaaaattcagccttgctgtcccgaggatcgtacgctccaggcctaaccgccccgacatgtacaatctcataagctcgctcacggtccatcagctatag

SEQ ID NO: 215414 - DNA, 931 bp, Cannabis indica
attaaaaacaaaacttcagttgttcccattattcccaagtctaataaaaaattcccaactcttgaaccaattcaagaaagtaacgctgaagccgccgctaatggatctggtaattatatatcctttaatttcttaatcaattctaatatcttgattaatgaattaattatctttttcttttttatacagacttgccaattgccagaagaaactcactccatcggttcttggagaagagaaaagacaggtacgttttaagtactcttcttaatagtttttttaattattattattttcttaataaaatcaattttttaattaattataaattttagggtggcagcaaaagcaccataccaagtgaataataatcgcccagttaatatggcttccccaaaaccagctgatgaaggaaatcaatggaggagtacgagtgctagtgaaggtgaatgttcagagcaattagaactcaagttataataactgtgacttgccagagagatttgagctcattcatcatttgttaatcttagatcctatatatatataattgtatatttttattttattttttttggtcttatttaatcattaaattagcaatttataaatcctaactatatatatactcctttaattatcatccatgcattgtttaatctcagatttttgtaattactcacttgtaatgatttacttttccattgttattcatgctagctcgtcgaatgctttgagaattaatgaatgagttctgttatcaaaatgtatataataagcctgatataatctctatattaatcaatcattaattagcaataatttacaaacgtgttgaaataatatttaacaaccttgtaatttttgtgcataaattaaaggtaagtttggtaacaaatatttaaatagtttattaattagagaatcagaa

SEQ ID NO: 215415 - DNA, 884 bp, Cannabis indica
caaaactgttttgtcggcgcatttcacctatgcggcggtaaaacattctttaccgaccaaggttcgctgacatgttttgccggcagaggttttctagtagtgttgttcgttaaagcttggactgcctaatacttacactttgggaacatgataatataattgagtgggagcgctaatcatatatatagaatctatagcttctataagtatttagaagtgaatcgataattttcttcgagcttagcttaatagagataaatgattgagacctctattcaataattatattagtttacgaaaatatcatttataggtaactaagtgttttacgcataaaatacattgaaaggtagaaaggtaaatttatccttacttgatgtagatcatctatagatgatctttgaatatttggattgaaataataggtaattcaaattgcatctattttttgtaatagtgccttctatgtaattaaaagttcaattacaaatctatagcagcgcaaggaggaactaaagttaggaaatttatttggtaaatttcgaatctacttattgtaagcttgattacatagggtcatggttcccacactagttgagataacactattttatgttatccattgcctataaataagagaagaaattcatttgtggggcaatttggaaatagaagaaaatagactttaggagagagcaaccttctcaaaagctagattgtttttatatttcatcatcaataaagatatattgtttgagggatttaataactctgtgtttagatttagatagataatcatattctctaagaataacttatcattatttcataatttttttagtgtgatttttcttatagtgtgtaaataaaaaaaaaaaactaaa

SEQ ID NO: 215416 - DNA, 1059 bp, Cannabis indica
ggtacacactgtaatttcttatgtgtatattttttcttatgctgtcgtggcaactcctagctttgcacaattttttctgattggtggattacttaatatcataagtattaataataaatataaatattaaatttaggataccattgtttaagattttttcttatgcatgtagaatgtttttttttttttttttttttatttaagcgtttatatattacaatcatatttacctgtgactcgaatccaagatcttcaacacacacccacttatggccacttgagttagtctcaaatggttgaatgtttttctttcaactatatagaaacttatttatttgtaaatgaaaacatagaatagaatacttttatgtattagatttttattttggacttaacattaacgtttaaatattctgttaaaaacatagtaggttagtgttatactacaatctttattatttttatagagccgtatgtttaaattatttaattacgtttcaaaaatttactaacattatacactattctcatgtaattatttatattctattctttgatatatatagatatagatataattttaggtgattctacaatatactctcttaaaagggatgtactgatgcactctttattagtttcggcatctagaaaattttttaatctatttttttttcatctttatatacgttatagttatttaagatatcctacaaaattttgaaaaattcagaataatttactatatgaaaaataatgttcaaatagtttattttatacgtgtataaaataaaatagttacgcgtgcaacacactacttaaacgcagtttttagcgtattaaatttttttgaatttcttaaaattttataggatgcgatgtcttaaataactataatttacatgatcatgagaaaaaaattgagtaattttttttcggatactaaaacatatatagatgtatcaatgaatcccttttaagagagtactttatagaattttcctataatttttattgcatcattactttttaagtagaataagcgagcattcttattaa

SEQ ID NO: 215417 - DNA, 697 bp, Cannabis indica
tcctaacagaatcccttgacaaatcaaagaaaaaaaagatgaccaagaagtaaaccacactctcctaatagaatttcttgacaaaatcaaagaaaaaagagatcaggccaacttgaaattacaagcttatcaacaaaaagtggccacatactttaacgagcacatcaagaatagaaaattctttgtgggggacatggtacttcaaagagtatttctaaacaccaaagaccttgcagcaggggtggaccatataaagttacggacatcacaattttgggcgcatacaaacttggtcggtacaatgagaaaatggaactaatcttgttactaaggtattggaatggagaacatctcagaaagtactaccagtaagccaatttgtaaagacactgctcttaagtagtggctcgtaaacgatatgccgcacaggaattcattaataatatatcactcagtgatggcttctacatggtatgccgcatagaagagcttgaatacttaagtttttaaaagcattcttgaggcctttaagcttttattttaatacatgtatgttgcccaataacagcacatttgtaagaccaatgaatgaataaaagtgattctttcatttagattgtgtcaaataacttgctaataattgacttattaaagttaatattatgtctagcatccatgcaaacaagaaactggacag

SEQ ID NO: 215418 - DNA, 781 bp, Cannabis indica
attgtgggtatgaaagaaaatttttggtaatgaacaaaaactccactttgtattaaaaagtattttaaataacttttttgaaaattcttttctatttctagtctcaaaaagtactttagtttctttcttggtatcaaaataaaaatagaaaaaagtagggtatgcgatataaaatacaaatagagaatctattctcttttttcctaaaaaaaagaatcttggagattgtttaatgcttactctaaaactatttgtttacacggtagtaatattctttgtctctctattcatctttggattcctatctaatgatccggggcgtaatcctggacgtgaagaataaaaaataaagaagattttttgttttttttgcttgattttaaaaagttcttagtagggttttagctatttcccacttttaactataagaaaataactaaaaaaaagggaactcgcgaaaaattcgaaaggaaatacaaggttattgacgaaaacggaaagagagggattcgaaccctcggtacgaaaaattcatacaacggattagcaatccgacgctttagtccactcagccatctctcccccaattgaaaaaaaaaacatatatataataagaagggttttttctaagccttattttggctttatggaaccttatggaacatagtaattattcttattatatatatatttttttttttcttaattatagaaatataactataaactatataaaaaaacaaaataataaaaataaaaattaaaaaaaaaaaaaatacaa

SEQ ID NO: 215419 - DNA, 877 bp, Cannabis indica
gtcaacctgggcgttaggcctaacaccaagtcaacttgggcgttgggtctcagtccactcctaaatgactctgtttgttttcccataagcacatgtatcttaattgctgatgaaaatggggaatatgtctaaactactgttgggagtggctcaggttaacaatatgtcaacttgggtgctaggtcctagttttagcctccaagtcgatctctttcttccccaaaagtacttttttcctcattttggatgaagtcaaagaaaattctcgagatacttcttcagtatggtggttagaagcgccccaggttgacagcatgtcaatctgggcgctggttgtatcactaggtagcccatgcactgggtgcccggatattccaattaggaaatattccaattctgattccggtgcctctaatatgtgcattttttatagtgtatatttaatttattcctgataatttttttgttgtatgtgttattttgtagatgtagatacatatattacccattatatcatatactctattttgaaattataagatttattatttctattattaatgtaactatttatttaacttctaaaaaattaattgtcattttaactgtcactaactcaaaaatgtaaaattgaatgtatgaagttgtaacaacaaatttcatgaaaaaaataatgtagtagtataaaatgataaactaattaagttgtcaaaattaaagtgaaaaaaaaaaaaaagaattttgtaatacaattacatgtagaggagttgatattattttgcatattgtaacgtttattattttttatgttatttttttttattattattttacagttgttttaatgttgttgttaaagtattttataattattttt

SEQ ID NO: 215420 - DNA, 624 bp, Cannabis indica
gttacttcaaccttcatttttttcttctttttataaaactatatattctttatcgtgctcaattataggttatattgaatatgggtatatatactaaaagagttacgattatatatatgtcagtatataaggttcatcttatatttaatcatgaaaaggataggaaaaaacaagaaaaaaaaattagaatattctttctccaattggaatattatatgcatgatgataattaggactaaccatcaaaccgcaccggagagtttgaaattttttacgatgcgattgtggtatttttttgcaaactgtatgttatgtggtgctatttgcgattttaaatttaataattacgatttaaactccgcaacattatatattataaaattaattattaattttataatatggtttttatttgttttttatacaaagagcaaatatatacaatacatatgtatattattttatttttagagacaattcaatatataataacttgataattattatacatgttgaagttaattaaaagtttaataagattgtttattttgtattgttaaagctttatttgtttaatttttaaaattttgttataatatcttataataatgatagtgtaaatcg

SEQ ID NO: 215421 - DNA, 870 bp, Cannabis indica
tactgtgacaacttaatttggatgtttttggttatggatttgatttgatttactcaccaccatcaccatgcttctatttcattaaatatattttttattttattgctttcagtatatagttttaggcacgtgtgccacacgcatgaagaaaaataatggagacagctatttccatacccatgcctcttccacctccctttctatttgtttggcctactcacttgttgtacattcactcataatatttttccattgtccttttaaattaattatttacacccaaatctgatatacttccaatttaattggatttatttttatttttttggggtccaagagcaattgaggtgtgtatgaaatcgggcattgaaatgcaaagtgagcctttgatgatttaaaatttgtgcgtgacgtaaatcatttgaacctaattttaacaagcatgtggggcatttgatgtgtatagtatattaccaagaaaagataagaacacacatcataatgtcaatagaactatttttggcccatgggaaagaaagacaaagacaaagaaattaagaaatattcttggcccatccacttgaaactagttttggtgaaatttaagaaattaaccattagtagaagtctttctttttctttttttgattgaaaagaagtctattaacacacgcattttctaggactcatttgacaatgccatttatagaactactcggataaataaataaagctttccaaaaaataaggccatacacatgcaacaataatggtgacagaaaaaggacttaaacagttcggcggacagctacttttgttacttcgtatattgagtcagtcattttccagagtaaaacgtttaaaataaaa

SEQ ID NO: 215422 - DNA, 615 bp, Cannabis indica
tgggaaaatgaaaagaaacaactaagaaatgagaattcaattttgtttaataaatgtggggcatatagcaattattatgagtggaaattagatattgttttttttttcatttcatattaattaattaacaattgtccaagaaaaaaaataaataacattaggtattttgtttttctcttttttagattgtaatgaatgaaattaaataaaaatgcaagcatgcattggcaaatatatattattaaaaaaaaagtgaattaaagtataaatttgatggaaagtagttgataaagtctattgggtaccaatccaaacatcacaagatgctttatttttattatttataattttgtgatttttttggataatttattcctttctagaggtaaacaacacaaaacccaaaaccatttaacatatatttaaaaaatggatggaaacaaataaataggaaaataaaatattttctttaatattatggcaataaaaaagggggaaatatatatgtgtaaaccctagcattttttttaataataaaaatatatatataaaagtgaacattaatcatgattcaggacccaaacaaaagtaatatacagctaatcaattccattc

SEQ ID NO: 215423 - DNA, 1045 bp, Cannabis indica
gtaagttgtaagagtatatttgtcatttttgaaaccctgtgagtagtgttataaaattttagggtatataagtgaatatgtaacaacaattatatatatatttgtatattattaatacatcaagtcacattatcacaagcattgcaaatatgacctcaaatcatatattatattatatggttattctaatacatgataagcttttatactttcacgattaggagaaaaccgtacccaagtggtgaactctactaatttcatgatgacatgctatgtatagtggttcttccagtgtatgactatcatgggcccacatctacaatgttcttaaggaaacacaatttaacattacactcacatactaaaccataggaacctcgacagataggaactattatgcactaaaattaaccatataatcacaaatagagtcatagctagatattaatcaaggaacaaaccaataatagtagcacatccaataaaaaaatatgtgtctcttgaatttgagaaaaatactcctcctaaatttaactagcaatgcatctcatcttagataaatcacaatcacaagtgttgcaaatatgacatcaaatcatgtattacgttaacgggctatactaagacgtgataagctttaagatttccacactcaagagagtatcacttatcgtacccaagtatcaaactctactaatttcacgatgacaaactatatataatggctcttccagtgtacgactataatggtcccacatctataaagttcataagcatcaacattacacgtacatactaaaccattttaacatcgacaacttggtactatcatacactgaatttaaccatataaagacacatgtagctgaaataactaagcgtacaaatatctaaatcaaataactaatactctttctgtatacttccttagatttttatccttagtattcattgataatgtctttaatttttttagtgtttacgatcctactaggttttatatacagactaagatactgaacttagacttccaaaaaaaaaaaaa

SEQ ID NO: 215424 - DNA, 638 bp, Cannabis indica
tttggatgagttatcggctataacactataacctacagagcattgatgagcattactttgtttaacacaaaatttttttggaattataaggagttttgaagccaactcactccaatataatagtaattgagcgttaaacaaagtaataataatacctattctaactaatgaacttccatccaccagtgatcatcattgaaaattttaaatatcattgcagaggtgcaagacaacttagacaagatgaagatgtagtactatttttcatttgaataattacattgaaaacacaagcattcaatttagtaaaaatgggctttttttaataatcttacgtgggcatatgaacttgaatgatcttcttacacgacatcctggatacatatataacaattggtaaataacggttcatgtaactcagagcattgatacagagattgcatatatatattttaccactaacgtaggaatatttgaaacttagttttaatgaatacgaatcaccttgataataaatgacttgaaaaaaagtgtgccttgacagtcccttaactacaggaaagtagaatatttttcacaagccatgtacactatttgcatctactattcacttttgttcatacgattagccacatcat

SEQ ID NO: 215425 - DNA, 681 bp, Cannabis indica
gggaggcggatgagctccatccactttggtttgtgctcatcaactaaagaagatcgtgactgtggctggtatcaagccgtctgcgtctggggtctttcaccgcctgcctcgagacgaggagacgcccaatcacaactatggggagttcggagcttggagccaaacccatcttatgttcggggccatgctccctcttcaagattactttattaacttccttgtttttgtcggccttgcgccttatcaactaattccacaagcttatcgcctgctctcaggcttgtttattttttatgttgccagaggctgggcttcgcctagcccggctgaagttttatacttttacgtacttgtatctgtccccaagaagggggacaagtttaaagatagttttttcaccctccgggcccatcctttaaatgagggctcggtcctttttaattatcaaaagaatgtaaaggaataccgccatcattttttcttctcttctggcttccaagccgtagaccgcccggagcttctcacagagtgggttagaattcctcctcttctctgcactgctcctacccagttgtttctccaacatgccaagactttctccacttatgataaaaaaggtcttaacgtgggggacttggtcacgacggagaactatcgaatggccaagcttatctccgggag

SEQ ID NO: 215426 - DNA, 721 bp, Cannabis indica
aaagaccaagaaggtagatgacagacaatagttgaccctcctccaggctgggatccgcacggggacccctttctagaatgaactacaacaagatggagcagctaatctctaagactttcgaaaagggtccaaaagtacatcaacttggaagaagcccaaatagtggcttacggaggatactacccaaccggagtgtcgagatatgcacctggagcgcagcttctaggagccctatctcctgccactcctcaaataagcggaatacaattcttcgctaccccaggatataatcaaagccttaccctagctcccgcatcatcacactttgggccacccatgggcaatcccacggggatgagtgtccaaaccccatcccaatctgcacctaccgccagcctggcaggaactccacagagctcccggagtaagaggtcctcaaaaggaagtacccggactgaggacaaacgacaacggaggggttatacccctcaatacactcaatacacggagctcacggatacacaagagcgtgtatactttgccactcggcaaaatacgcattaccggaagcctcccccttgtacagcgataactcccggagggatcccaacaaaaggtgtgagtatcacaatgacattggccacaacactaatgagtgcaagaacctgaaagatgaattgagacctaatccgattaggcacttgtacgaatggattaagac

SEQ ID NO: 215427 - DNA, 552 bp, Cannabis indica
ttaagatttaagttttacgagaagccaaaaacacaaataggagctgccattttcgtgaaatttgaggctaaagtaacataattataaccttttttttcacttgactgtggaccttgttctaaacgttattttgaaagtgtttttacaaaaatattgaattttgagtaaaaatttataattttattgtaggacggaatttttttacaaaaatactgtctttttatgaaacaactataaaacaacaaaacgtaacaattaaaacaatagtgaaacaactaaaaactaatcgtgaaacaaccgtgaaaacttaacattatagatagtataaaagttacacaatatttttgaaaaaaaattctgccccacagtaaaaaacataaaaaaaaaattgaaaaatttcagtatgtggtgtaaaaatctcttatttttacttatatttgagtcagggccgtcctaagccattttagaactttgggcaaaaaattaaaattagactttttattaaaaaaaaagggagtattttcataaatataaaaaaaattagtaaaattt

SEQ ID NO: 215428 - DNA, 606 bp, Cannabis indica
cattcaaagaatagaaaaatgaagttcaaaaaactttcaattgaatggacaacatattgttcattaacgatattaatataaaaataccgaagaataaccataattcaaaaatcatcaacaatattttttttggataaatatcattaatataatataattaaagaataatcataatatataaataataatttttttcctttcttatatttactctaattttaatattaaattattgttttcaaatatatgaaataccttacttaaaaaatatcattaacgatattcatagaacataattcaaaaataactataataaaataataatatattttttcatttctcaactatttttaataatataatattaaaaattattattttaatctattattttacccaacattctacaatatttaccgacatgataaaattctagagataaattattattttattttctaaaagatagatataataagttacggtaaatgaagtattttttagatattattttttatacaaatctatctttctttttttttttgattgaagttgcctcaaagcaaacaaagagaacaaatagagaacaaaacacaagccaaaagc

SEQ ID NO: 215429 - DNA, 594 bp, Cannabis indica
ttaaatatggggatgaatattaaaaagtaaatatatatttagaattcacataataaatatctttgcacaaaaataacatataaaatggtacaaatgtcaaaatatagcacataaggtcatctctaatgtaaaatgtaaaatttatgttaagcttaacacaaaaattgagtttgtgttatatttagctctctatttacaattatgttccaatatagatataaaaaaatataataatattgatcatcacttaacattgtattaaaattatatacaaatatcattattttttattttttttattgcttaaataatggtaatataataaataaagaagataaagttatgtaaaaattaataaattatagtaattagtgctatcatagtaaataaaaaatatagaatttaatataggctaaatttgacacaacgttatatcttatgtcaaatttagcacaatttttaacatgtgtcaaatttactacacttttgaaaacactattgaagtactattttttttaagtgtactaaaatacatcaatatactacttttttagcactccatccaagatactctaaatgactaaattgagaaat

SEQ ID NO: 215430 - DNA, 965 bp, Cannabis indica
ctgggagttatattttgtagtcgctaagcgacttgtaaattgtgtattttgggatataaagtttaaaaagtttaaaaacgggatcccgacacttgtaaatattttaatatattataaagtttattaattaatataaaagttttaatttgacacgttttttaagaaaactttttgtttaacgaatcgcttttttaaaaagtatctttctcctcgaagattgcactgtaattgaaaaaagcactgtagcgtgccttggcattagggcgttacagttctcccagctgccaatccagtttacatgctcgaactaaacatatggaacttgatctatactttgttaaagaaaaagtacttaacaaggaacttgatgtgagacatgtaccagtcatagaccaactagttgattgcctaacaaaagccattttgagttctagattttctattttgatcagagttaaaaatccttcaaatttgagtttgaggggttgttaaagaatagacttttgtatcagttaaagttagttgctttcctttaactgtttgtgtttgttaggttgttacagttagttagttggtcaatataatttattagttagttaatatcagctctcttaagctcttgtatataaattgtactactcctcatttgattcaataatatagatcattttctttcgatagtatcatctttattaatttttgaatagcttacaatgtcaagaatagagtttttgatatttcagtttaccacgctcatttaaaaaaatttaaacgtatttttagcacggtaaactattcgaaaatcttcaaaaatttacaaggatgatgttgtaaatataacgaacaccatagtaaaaaaatttaaaaaaaaatatattctggtatatattttttagatacttgattaaaaaaatttaataagaggttgcattcctctatttagaatgaataaaatatattaacac

SEQ ID NO: 215431 - DNA, 1260 bp, Cannabis indica
attttagaattatatctatgaagctaataaaaaattaaaacataagaaaattaaagagaaacaaataatgctaattagagagatcttagagtgacatgtattttattttaaagtgacatgtaacaaataatatagatcttatagatctaagaaacaaacagcgtttcgcgtgcggttgtattttatttagtaataattaaattaaaaaattatattaaatcttgtatttcaaattttgattattttttttaatagtatgagtaactattctattaaacttttatttttttactcttaataagataaaaaataaaatatatattataaaatcttagttattttaattaactagaactaaataaatgttaattttttaattaattaatttattatagatatatattattatacgggaaggtttcaatggttacttttctattgtaaccatcatggttacatttttttaagccattgaattactattaaatggttgtgattattttagaaattaaataaaaataaataataaataacttgtaacctaaaagtaattgataatttatttcttataaaactttaattaagattaatatattattttgttataatttatttccaagctaggtttcatggctggaattattactctagtgaagttacggagaggaggttgttgattttgtggagaaaagtgtttgttcaagttgttgttgttgctgaaacggatcaatatatccattgttatgttaaaatggcagggtcctaaacctgagatcatcttcccaaacttaatagctttgttgaaaacttgaattgcccaagctactgtcattttttttcttaagcaagctgtcttctacaagtttatgaccagctaatttgttggcttggagctgtcccttggcctagcaggtacaatggctggacggagtggttgaacaacaaagggaaaggccttgttgctgcagtttctaacttcgttctggctgctgcagtttatgagatttagaggaacaagaacatgtgtatatttgagcacttctctcatttcagctgctagtttagttgctgaaataaaaaaataaaaaaaatctgctattgtttagatggcacagctatgttaagagaaaaatgagtactaatgatcaagtgtatttactaaaatttttagctggttgagaacacgacgcagggacggttagctttgttgtcttggtgcttgttattttgttcaagtgattaatgaaaacttctttcttc

SEQ ID NO: 215432 - DNA, 1278 bp, Cannabis indica
atttcgggtactcttccaacaaattacagctttctaatcgacatgtacatgtcgatctcacgtgtcctctgtgcaataaagcccctgaatcgatcccccatgttttatttggttgtgagtttgctcactcctgctggaatattgcagcagttgctgctgctggtgtacatgaaagtgagtttctcacttggttctgcgatattctgcagcaaggaagcaagcagatagcagaggaaactgctatgatattgtggcggatttggttggcgaggaatgacatgttgtggaataagaagtcgactacagttttagaagttgtccgttcggctaggactaatcttgacacatggaaaaatgctcaaacaagggtgtttaccccgttgttgaatgtcaatttcagcaatggaagagagcattgggtgaaaccatttttaactaagttcaagatcaatgttgacggggctctttttgatgctgaaaatcgatttggaattggtgttataatccgagatagagaagccaaaatggttgaagctttttcgaaaagcaaaattgggaaggtctctcctgaggttgctgaggtgattggtgtgaaggaggctttgagctggataaagcaaaaggaattatctgacgtggaaattgaaactgattctttagtagttgttcaggctattaatggctcagttcaaatgccatctcagtttggccttcttatacaagattgtcaaagcttgatctcagaattaaataatgtttttgtttcttttgtcaaacgatctgcaaatagggcggcccactgtattgcgaggcggtcttgttttatgtcagattgtatttatgatgagctttctgctccatctgatttactttcgattgtaagggatgatagcttttcaagttgattaataaaaatttccctttttcaaaaaaaaaaaaaaaatatatatatatatatatataatttatttagtccaagtgtattattggataaaggttctactgtatatgtaatattaattaatgagataattatggatcacacagacatggttatgggcattaattgatatatatttctattctttactcctcatgcctatttatttatttttttaaaaaaaaaataattaaaaaagaaactaaaaatccaatacaacaactccaaataaggccaaatgtaccgacatagcaagtataagtaaaaaaaaaaaaaaaaaaaactaaattagggtttttgattcacatgtactaaattatgtctactaaatattttag

SEQ ID NO: 215433 - DNA, 769 bp, Cannabis indica
attatcattgtaccatagtccaaaggatctcaatatatattaaatccaaaatataaattgcatgaaaaaaaataaatcatcttgatgattatcagggtatcctcgaaacttcttgtaagttggatccaataaatctcacaacagtagtcttccatattgatccaccacacacaagaaatagtctggactactaggataaagtgtatatgaagttcttgtataaatctcaacacacgagcaagaacaatttcttacaggtaaaaatcctttttaggctttttgaaaagttacgttaaaaacctctcctaaaattttgttatacaatatatttaaataaacccaataatttttttatttaattgattatttaaattcaaatatgtttattaaatcatatttaattatttgaataaataatataactgaaatcggttatatatatattcatatctaataactgattgagggaatctctcaaccacttgagagaatacctcaactacttttcaattcaaatatttatccaattaatttattaattaacccaaaatacaaaactaatagtgacaccctacatgtggggcgcatgcactatgtttggacacattgcatgtggtacctcctatgtcttatttaagacaaggaatgtgccttttgtcctgacaacttttgtcttaacaacttttgtctttttacctttttaattaatttgaaaaataaatactaatttgttaattcaaaataggtttttctgaacttccatatacaa

SEQ ID NO: 215434 - DNA, 877 bp, Cannabis indica
cagctctcgagagacaatctttgtacaccagttccatatcacaatgtctgtccttgaaaattaactcaccatttccacaaagtctaatactagagtttgataaacttaggaagggatatggaattagaagtaaaagtagagttattattatttattttattttctatttattataaaattcaatgtgaaatttactaaccattttgtattgcaatacagatttggaacttggcggctcattggttagcttgctctgcatgttttaatattgattgtattattaatggagacaatcaaattcttctttataatattttttgtaattaaattatttttaacacttcatacaaacgtcttctaagaataccaatataattaaagagtaaatcacactattggcactaacaggaaatacttaatttataaatgttattgcctataaataaaatccgttttcagatttagaaactttgtaattgatataaatagtattttaagagttgaaggtttaacggaaaagtgtaatataaattttactaatcatatatataaacaatggggggcaatttttttttttgattaaattgattaatcctatcaaataaagtatttagggaaaaaaacaaaaaaataacaaaaaaggaaaaaaattacaaaaatactttgggccggcccattaaacatttatacagtccacatacaaatatttacaaaaataccacatgcactaagccttcagctgtacagagcgaaccatgaagatgaaaatacgcgctcgtttcaaaactgcaaaacaaccaaaatgaaaccaaaacgagaaaaatacaactattaattcaattgatctgattcaaataaaactgatgaaaaagcacaa

SEQ ID NO: 215435 - DNA, 1149 bp, Cannabis indica
ggatgttgtttgaccaaaaaagtgcggattggatcggatgaacacccctaatagtcgttaacaatgatcgttatgtaattagtctcacgtcactattgatacttagagcaaaatttttgataatgatcaataattgtctcaaacctcttgataattgattcataaagtcattctaatcttactacccacacttcaacgaatcaataaccttttttttttttaaaaaaaaaaactaaaataaaaaataaaaataaaactcactacccacactttgaattagtgtgagtaaaaaaagtgagccttataggagaaatgctaaagggcacccgtagtgcctagcactctcctatgtgtcaatatcactattagttaaactaaatatcgggtcccatataatttaatataatagtttttagggagtatcgctagctaatcgcaacgcgacatatcgagaaagtgctaggcaccactaaagcctaatagcaatgctcttatattagggatagaagctttgttgggcgattgggatggtagaaattaattaagatttgttgcaactaattattatcattattattcgtgtcataattatcattattattaatttttattttgaaaggtcactgttattattattagttttgaaactgatcctaaaataaataaagattgttgctattattaattattttttgttgctattattaattattattttttttttgtggtaattgctaaagttatatgatgatatatattccatgttattaaagtcagttactaagctagttgtattataatttttttttgaccatgttatactccttttttaattaaaatatagcaattaagttttgtaatgttgaaagttacaattgtataatgcatgaaagttacgattatttattggagtgcagttacatagattatatatcaatataaaattatttgtttttgtaactgaataaaaataaaaatgcaccattaattgaactgtttttcactatatttttaaattaaaaaagcaaaaatgaagaacaaagtaattaaaatcaagaaatggagaaaaatgataatgtaaaaaaaagaaatgttaagagcgcacatcatcctacttaacaacaggtatatatagatactagagaacgg

SEQ ID NO: 215436 - DNA, 763 bp, Cannabis indica
gcactacagaactgagtgtagtacgatttagtgtgttttaccagtaacgaagtgcattttcagggtacaaatacagaaactggaacataaatgatcccaatcatatttcgacccccatttaccaaaccccattttcctacataaatttacaagttattttttttaaaaaaaaatgcaataaattcgaaatgtccaagcccaaagaaacaattgccaaacaaaaaacaaatacataacagttcagcagaaagatggaataactgaagtagaacgccaacacaatctaaccaagtgatttcacagaaaaatagagcaaggttttaaaaagaaattacctccttagcggagagctcggatgcataagggaggacaaagttgacagtgagcttggaaggcatggtagatggagtgggagggcgaggcttcatgaaagcaagaggagtcttgggtgggtcgatgttagggatcactttgttccagctctccacaaaggacgcgtcaacggctggagccgccgaaacttcggtcgagaaaggccgagctcgggcagagagaaagggccgggaaagaactctggtagcttggcgaaacatggtggctccggctggcggctgcaacatcatacaaatacagtactgctcaatactccattaccgaatatcatgtttttttttccaacatcgacaattctgatccctttttttgtttcttcttatttacagaataaggaaaaaccaaaaatcacaaaagtgataaagtatat

SEQ ID NO: 215437 - DNA, 708 bp, Cannabis indica
tttaaaaatttaaattaattattaatattatatagaaaagaagttaaaatgtagcaatttgatttcaaacatctttttttacgacaaaaaaacatataccttatatcaaaataattaccttaaattatagctcatataattttataacttttgaatgaaaactgatatggtctagaaagctttttaaaattatagatttaaaaagaagagagagaaagcttccctcgaaatttgtattttttcaaaactcgaatacgtgccgcctcatgttctttatgactcaaagagtcaagaatcataacgaatgtcaaaattgaacattttccattagggaataacacataatacattctaaaactgtcatgtggattaaaataccaaaaagattacaatctaacatgagaataaaaaagtttctaaaagcttataaagtttgaaacttattaatggcagctggtacgaaaaagagatatcaaagacgagaagatgagacgtatatatagagataagatcaaagatctaaaagcatgtcatgcaaaaagccaacacttagctagataaggctgctcgacagagactactacaaataagacgagagctagaaagtccctatcttaccagatgttcgaatagggacttgggggcaaatgttatcccaaattttgtccacttaacgtgacaagtccacgtaaaccaagataaaagtac

SEQ ID NO: 215438 - DNA, 766 bp, Cannabis indica
gaacttgcttcagcatcaactgacagcacattgcgcttgtgggatgtcaagaacaatttaccagtgagttgccataccatctccatggcattttcaactttgaaatccaccattttttttcttttttctttttcttgccatgtttttcaatttcttttcttttacttccacagcttcgaacttatagaggccacacaaacgaaaagaatttcgttggtttaaccgtgaatagagaataccttgcttgtggcagtgagacaaatgaaatcttcatttatcacaaggtgaatatagttatgcaaatttataatccaacattattaactgtctacaatctgacaacaatttttttggttgcaggcgatatctaaacccatggctagtcacaaattcacttcttcggagtcaaatgacaatgaagatgttgcagggtcatattttattagtgccgtctgttggaaaagcgatagccccacattgttaacagcaactagtggaggagcaattaaagtattagtgctttctccctgaataaacagaactaaactcttataaagttatctcatgaccattgccgattgccttttggtgattgataaataaataagaaaagagaagaagaagaacggggttttgtgtttgtttaatcgtgacgaacagagaactataattttcttttctaaaagtccaaaacatcctcaatatgagattgcttagtcgatagtcataacgggattgttaaaagtttttgacactaagctaaacc

SEQ ID NO: 215439 - DNA, 760 bp, Cannabis indica
actttaattaaaaaaataaaaggttaattatgatttttttttccccccaaactttgacatagtacaaaatacatgcccctgaacttttatggtcgttaaaaatgctccatgaactattgagattgttgaatttaaagacttttgtccaattttagtaaaaaaaaatttaaatatgaatgaaaattcaggggcataatttagtatatgtcaaagtttgaggggcatgatttgctagatatcaaagtttgagagcatgatttagtacaaaaacaatcactgaaatagtaaaattgaatgaaattagacagatgtttttaattctaacaatctcaataattcaggggaaatttttaacgacaaaaaaagtttaggagatataatttggtacttgttgaaatttagggacaaaaattttaattagctaaaaataaataaataatggttcctcaaaaggaaaatgaaaaaagaaaaataagaaatttttttgtatttttctcctacattaatattttttcttttttcaatttaattttcatttgtgtcttcattttaaataaaattcttgggtccacacacggtacaagtctatgataagattgcgattcttctcacttttttttttttaagtttttttgtaagtttttatgtacacctatttagtagggttgtacataaagttttgtaaacagtccaaatcgaataatccactcaaatcaaaccgacataactagataaataatgcaaactaaataacccgacg

SEQ ID NO: 215440 - DNA, 523 bp, Cannabis indica
gatacttcaacaagcaagtaaagaaacagatatttttttgtgggcgatatggtccttaggagagtatttctgaatacaaaagacagcacgactggtgtgctcggaccaaactgggaaggaccatatcaggtggtcgaagttctaaaatgaggagcatacaaacttaggcggtatgacgaaaatatataactcgttctagtgccaaggtattggaattgggaacatttaagaaagtactatcagtaaacgtaccaggtcagatgaccactttaagtacaaaatcaaagaacatttaatcttaagtaccttctgggcgaatcctgcaaaagggttcggatgaaatgaataagtactcaggtcggttgaccacctttgaaagtacaatttccttttaagtgcaattttctttgtttaaatttagctaaagatcgaactagatcgtatactggcttttatgtaagttactatggtaacaaagatattccgaccaatgaatgcgtataaagatgtctatttaaattct

SEQ ID NO: 215441 - DNA, 827 bp, Cannabis indica
tctacaaattaaaaaaaaaaatcatatctttttgaaaggattgaactcatgtcattgtacttgatatacaataatgttaccacttacaccattattatattattggttgtattgattattgtaggattaaataacttgaatattttgtacttttttagctacaattattgcgttaagtagaaaataaaattaattaaaaatttatatataaatttcaaattaaaaaaataattaattgaaaattaaaactagtcataagataaataagtaaaaaaaaaattaggtttgaagtttgttagttgaacttgtaattaataatattcaaaattaattataaataaaaaaaatattaatgatgatttagttttcaatggttaatttgagccatttgattaaatcaaaggctacaaattactatccctattaattagtaaaaattacaatacctattgtattagcctccattaagaatataatttatataataaatatattaaaaattatataaatatatattattagtgattgccttttttttggttaagtttgtagccctttctgttttttattatttatttttattatattttgttctattttattatttgacagttttattgtgttagctattttaattttttagttcgaataatctagtaaaatgatatctttatagagtataaaacttattaaataaatggtgatatttagtttttagatatttttcttcatatttttacgttaatattaaatattaagtgtgtaattggacatataattagaaatgcgatctaatccaattaaaaattagattggattagattttg

SEQ ID NO: 215442 - DNA, 647 bp, Cannabis indica
ttgtaatccgttgtgagcccaaaatgccgctcgtccaaaaagacaagccaaacttaaaaacattcgctatcttccctttaacctcttatttgaccttgtgggattctttcaaatgtcacgttcgaccatgtagtcttttaaaggttgttcgttatacccacacttttcaagcccaaacgtgaagagagtgtattagagttagtcccacattgttaatgtgtgaaaataaattgtcatatataagatgaatgatctactgtttctattacgaattagttttgagatggaacctcattcctcaaatcacaaattctaataaattgtgaaaagattaatttggggctaattattaattatatatataattttagaaatgctaaaagacactagtggtgtctagctccctcgtatgtgtcaatatcgttatttatctaattaagtatcgggtcacatatagtttaatataataatttttaaagaatatcactaaccaatcacaagacgacacgtctagaaggtactaaacactactgatacccaataacaatatttttttatttacatatttaataaatataaagtaatatgtataattttttttctacgagaactacaaccccctaactcagtgactacatccattaaag

SEQ ID NO: 215443 - DNA, 504 bp, Cannabis indica
ggagatttgagcatgttcacattatctcaattacatcatgcatcagtaaacctaaaatcaataatcgacaattttctaagaacattaaaaataaacatttcaatcacaatgtagagaaaatattacattctcagattctctatttgtgatcatcaccagcaaaataaatttattaataaatattatttaagtatgtgaaagtccaaagcgggcatttggtctagtggtatgattcttgctttgggtgcgagaggtcccgagttcgattctcggaatgcccctttcatacgttttacttcttcttttatttttttcccaataaatcaatttgcaggatagtgattatttaaatacctttatgacctccaccaagatcatttttgtagaaatggatgaggggtaattccgtcaacaagtagaaaactcagtagctatatacattttctacactcttcccacttacaccctcctaattcctctatccccttatcctatcttcttctt

SEQ ID NO: 215444 - DNA, 678 bp, Cannabis indica
tgtaatggtaagcgcactggagttaagacattccttaatgtcttcacttgaatagctctggcagaatgagtacctcttccaatcacgaagtgcgatggtgtttttcgagagtttgatgggccagaaaacagtgtattctttaacgtcagtgtcttcagaatagtctgctgtaacccaatcttttcctgaatcaaccatccagaacattccagtggatttgttctttatgcggatacaaccatcttcatagcatgagatctcatttgctgtggtattcttattgtcaatattttggtcggggacgaactgtagataatgaggtacttttgttgaatctaccacactcagatatttgttatccttccctggtagcttgaatgccaaaggggttttgggaaatatgacaagtgattcccaatctataactctaaagcgatcgctagaatcatcagtggtgcctaatactgcctccaatccatccttggtgctaagtccctcgaaattttcattcgagcgacaagcataaaacccggttgcagggtggaaaaatttaatgtactctctatctccaccatctccatcatatgccttgattggcttgaacatggtactgttgcgagcttaacatcttcaataggctctgcagcactggcttcaatataatactgctgatcactc

SEQ ID NO: 215445 - DNA, 542 bp, Cannabis indica
ttgatatattaaagtttatttaaattaaaagttacttaatttttgctaacaaaattaacataaaaaggattaattttgatgttgatcattattttcaaaaatggcaaaaaaaatatatataattctcacatgttaaaatgttcaatttaaaaaatagatggtaagggtgtaatttataaacctaaatgaatatatatattgctgcagccattcaattaatcaaactttctcaatcgaaagatatatttgaaatatatatatttgaaatagattaaactacgtattatgaattatgatgcaattaattcataattttatatatatatttgaaatattttaaaaaaaaatctccccataaatttctcataaaccaaaatatatagacacactttataaaggacactctaaaatctctttaattagctttatttgttctcttcttaattctctctttccaattttttattaaagcataaatcaataaattagtattttgctaattattattaaaataactacatgtacttaattaacattatgat

SEQ ID NO: 215446 - DNA, 555 bp, Cannabis indica
cttctaatagtctaaggtctccttttaattaccatacccatggctgcaataccaatatcaatgaatattaactttacaacaacaatgattattagtattattaccatgatgatgttcaatattttctttgcaaatgcaaatggagatcttcgatccaacgtactctgccatatgaaacagaaaagcaatctcttttgaatttcaagtgggatcttatggatgaatacatgtgggatcttctagctagatatatacaacattaatcaaatagtaaatagtggcataatattatttctacaaacatcattagatgaagatagttatttttcatacagcaagcctatttctatgatctagctgatagcgatttaaaggaggacgctatgattgtaattagaatgtaagttttatattaaatttgtttaaaattaaaaacgcaaatcttacacttgaggttagctcaagtggccatatgtgggtgtgtgagtgttggtaagtcctgggttcgagtcccaggtaaaacatgttgtaatatataaacgcttaaatcagaaa

SEQ ID NO: 215447 - DNA, 866 bp, Cannabis indica
tctaacttgggaaaagggacctttcaactccaaagtagtgtttaatatctaaatatttcaagaacagtctcatgggagctatttaattgtgaaattgagcttctttgctctcttcattgtgttattctctttataaaccttcgaaacatattttacaaagctttgttcaagttagggaaattctctcatttttcttgagatgttatgaaaaatcatgcactatatcatgcatgatgaattctatgacattatcataatcattttcaaaatcttgaagaaaattagttcactgtcaaattttgaaaactaacttgacccatttattcaaattcatgttgatagttcatcctttaaagcaaacaagagtcctacatgttcaaacttgacccatttaatcaaaatcatgcttaggattggattgtattattttagtactatattgtgtttgatgtagtataggactaaatctagtatacatagggttttatatttattggctaattaagatttttaatcctaaattttaacatgtaccaaatcatgtcttctgaatttttttggctcttaaaatatcctcttgaattattgacattgttagatttaaggacttttgtctaatttcattcaattttattatttcagtgattgtttattctaaaatcatgctctcagactttgatatctaccaaatcatgctctccgaactttcatacatggtagacttttttactaaaattaggtacaaaaagtccttaaaatctaacaaatctcaatagtttaggaggcatttttaacgtactttaaaaagtttaagggtacgatgactttttactatgttaaaagttacggggtacgaaaaaattaaa

SEQ ID NO: 215448 - DNA, 558 bp, Cannabis indica
ttacattcctctgtttaattaccattttaaaacattacaatgttataacgaaccaaaacataaccaaaaatgaaaattttattctatttcatttcattacttccaaccgaacgtagttaagttaacattttttcttatttgcagcaaacaaacactgcagacatgttggacttggctgtagagtacatcaaagaccttcaaaaacagtttaaggtaaagaagatagtaaaacaagagaacaaaccttcaatttctaatgagtaacttcttcttactctgattgcactgtttttcgcagactctcagcgataaacgggcgaattgcaagtgtttaaatatgcagaaggcaatcccaaatcaagttatttgatttagttccaaacagataaaagaatctgataatgaagtagtagtgaatagaaactacatcttattttttttctttaatgcactaaaaagtccaaagtagaaagagagttacaagagttttactaccctttttagctggtgtgaaggagaaggttaaattgtctttcaagatcacacaagctaacaagt

SEQ ID NO: 215449 - DNA, 2012 bp, Cannabis indica
agtatagtattactgtatactatagtattagactatagactacaacctaagttgcctaacatttctttctatgattttatctattattgacccctataaatatttaactatactacacccatcatatcctcttaattattcatgcctacgtggccaaaaaaccatgtatagtgaattttttcctaattttggcaaaactgctttaacccaccccctatacattactactattttattagatatatcatgaccctccattcttactactaatattagatccaacggccacaattaaacagtccattattcttactgcttaagttacaatgaggaaactccctagtgagaaaattagtgaaaaagacatcagtcccattaaatgtaaatatatcattactaattagggctattttggaagtgtaccaaattatatatagcacattttacaacctgtcaccaccaacttacagcctggcaagttctgcccactgatcgaaattttttcaaaaataatttaaaaaaaaacacaaattatattaaaaatcaatttagctaaacgacaaaaatccgacgtggcaacttttccaatagaagcagcctcgctttttttttctttctggctatatatatacgcactacttgctgtctctctcttcatattcgccaatctctctctctctctctaacgattccgattcttgactcggccgagttgagtaaaaaaaatcaagaagaaaaacctttaataaaacgaagacgaagaagaaatgggtattgcagttcgactaactcgactcacgttgcgacggcgaaacttattctacaagacggaaaattacaggagttttcttaccctgttagggtatcttacgttttgcagaagaatccggcttgtttcatctgtaactcggatgaaatggacttcgacgacgtcgtttcagccgtaaacgacgaggaagagcttcaacctggtcagctttattttgctctgcctttgggtagactaaaccaacgtttgcaaccggaggagatggccgcattggccgttaaagccagttcggcgcttatgaaaagcggcggcggtggcggcgaaaaatgtcgccggaactctgtctcgcctattgctttctctggcgatactattaaatcttcttcgcggtgtggtaatggcggttccgccggatccggcggcggtaacgggaatgggtctaggagggttaggagaaatgggggaagaaagtttacggcgatgttgagtgcgataccggagtaaaaagggtaaaaatggaaattcattttgtacggaaagtggtattcttgtaaatattgtaatgatcttgggttaaaaatcacttccagatttaattgtagagatttaatttagaggattttagcggctcttttattcttcttcatgagagttttctcttcttttcagtttttatttcttttccttggcctgtcactcattttagagtgtgttacaattttgcccttttcgacgggttgagaattgagatgaagagttttatacaaatatgatgaagaaaaagctatgaactttaaacacatactgttaacagtgtatgaatatgattcttgggtaaaacggtaattttgattttattttttttaaggaatatttttatagttacctgatacctacgaaacaaaaattgaccactattcccaactaggcacagcttatttaaaataacgcggttcctttcttctataaaaggtagccaaaaaataatagttactaaaagaaaacagctgtagcaaaactattcacggtcttgtagatgatatttttttttcctctgaaggaactggtagaatatactttattaaagaaaaaaatatagatacccaaataataggtgcatgaaagtgttttccatttcttcttaattttaatttttaaattaaagtttcgttgttgttttagatattctgccagaaatagaaattctgaataatttaagcatcaaaaataaaatttaaataat

SEQ ID NO: 215450 - DNA, 973 bp, Cannabis indica
gcgcatgatttggcgcgatcttctctttcagaggctgattgtacgtttttctggggatgctttaccttcgggtatttgcttctttgggtattgcttctttggtctcagatgatttgatttaataaaattcatcatttctctaaaaaaaaataagttcaaatttttataaaatacttaagatttaagccgaacaacgatcttaaatttaattatatcaaaaaattgattaatcaaaatggagcccatgatatcaatttgatttattttacaaaatacaaatctaaaatatcatttaacaaatacataaatcgatcaagtattaaggctaaacgtgtaaaaacaaaattaatatgttatctattttgaatatatattatctaatcatctttatttataataatattatttaaaattttctataaaattataatatttatttaccataatatactatttatttaccataatatactatttatttcccacttagatttactctgaaagttttaacaagatcattttctaaaaaaaaaaatgaaaaccaatattattaaaaaaaaaataatatataagctttaaaaaaaaaaaaaaatacaatatatatttgggtataaaagtcttaggatagttagaaaaagtcttatcatgtctatctagaaaattcaatgtagtgggaactaggatatacaaagattttcttcatttttgtttttatattcaagcaataaagacaatttttataggtaatatatataatataatatatatatatagcatttatataagctcaacctacactttaattaattagatttgattcatgttattttgtttttaattagttttgtattttttattttgtcattttcagttactttcatgatttatcataattataaaattaaaatttaaatacaactactatcaattaatttcacaatcttatttttctaatcactaaaaaatattatct

SEQ ID NO: 215451 - DNA, 513 bp, Cannabis indica
ttttcttttttggaaaagagaaaaaataaaactcatcttattaaatatgttgtgtataaaatttttaagcagaaaaaatattttgtgcataatttaatacattatttacaaaagcactcctaataattaatctactctatttttaaaataacttactaaaactttactttttaattttatctcatatatatttaatatttacaatacaccattctttctctatatttttatacttttataattaactttttatttatttataaaaatataaacaacataatctaaaaataaaaacaacataatatcaaaagaaaaataacttttataaaataaaaatagcataatctcgaaatataaacaacataacctcaaaatgaaaataacttttataaaaataaaaaatatataaaaaaataaaaaatatagtatacatggcaattccccaaacataattatatttttaaacaactttaccaactaaaatgatattaaaaaataataaaatatcaacta

SEQ ID NO: 215452 - DNA, 650 bp, Cannabis indica
tactctacttttttgaaaggtcatagtttaacgaattatcttgtatcttaagcaatgctctctcttttgtaaataattattcgtttagtttggggctgaatctaaaaagttggccttgtttcactcataggggtttgcttggttcttcagtattactatgaggatatgcatattatgcctacttgatgtaaaagttgaaagaagatggttaagttgagtttattattatttttttcctgtactttggttggattttgttacaagcaaaatggattctgaaagggttaattctttgttggaggattatcaaatttgccttcacattttgatttctttgaaatggctttacattttcattattgttacctaattccacattttctggctgcacctacataatatcatattactctttacaagttgtgtagtctggaaagatcttgtttggatttgtaccattttaaaaactaaattatatattatgtatattaataaatttgacgtgcacaccattattagttcagtactgactgggacccatgaaagcgcgagtggtggtaaaataatttaaaaattgaaaaaaatgataaaaccaatccttgcttagcctccctaggactcatcaaatcatttcggttgtctgaccccat

SEQ ID NO: 215453 - DNA, 662 bp, Cannabis indica
acaacttcaatataatacaatacaatacaatacgatctaatacgacattcccaaacgagcccatatatattagcatgcatacatatttccataaaaagtatatacatatacttataattgttcaacaaaaaataattaaaaaaacaagtggtagttaagtactgtaaaataatattatatgatcagggtaaacatctttagctatacgagtcaactaaaatattgttttaattaataattatctaactgtgtaatgaaagaattgtgcgtgtaaagattaaagaatgaaactgaagaaaaaaaattctatttattgagataagcaaaaatcttagtttatatacacaagttgaagctttaaagacagttgaacaaagtagttataattttgctttacaaaaataaacataattaacaaataacagaatgcaaaatattataacaaactaattttcttttaatgtatatatatacaaccaaactaattatttccccttaattaatattcatgttcacacatgcagttaatttctaaactctcttcaacgtataactaatattaatattaatatgtaaagaaaacattttttttaaaaaatatcaatttatatgtaaagaagttttcactgttttaaaaatcaaataaaaatgtttgaaaatcg

SEQ ID NO: 215454 - DNA, 915 bp, Cannabis indica
taggcaacaactcaactggaacattgttcaaattaaacaggtgatcagggtgagatatccctcgcaaaggaatgagccgctacatttgttgatcgttttacaaaatgaaaagaaacattacgcaaagcacttaacaaattcctacaatcactaacaactttgccaaataaagaaatcataaccatagcactacggacagcttgaacaactgaaaggcaatccgtttctaaagtcacatgaagccatgaatgatccttgatccaactcaatgcctcccggactccaattgcttcggccaccacaggagaaatcgagccatgaaacaactttgtaccgccttcaacaaagaaaccgctagaatctctcgccacaaaaccaactccataggtagaggaatcattaaacacagccgcattgacattcaccttaatactattaacacttggagcactccattgctcagccccatccctcggaatgaacccagtgaacagcagctcattgtttgaattctgagcaacacgccattgattaaggtagtttgttgcagatgcaacgatgccttcgatccccataactttatcttgccaaactttatcattcctagcattccagattgcccagcacaaggccaccagcaagtttgcattatccaaatcaagtatttcaaaatgatacatgcaccaacccaaaaaagagaactactgctgcaatatcgtgccaatacccacccgatcccacacagctgctgcaactggacaaaataaaagagcatgttcaatggtttccgaagccatattgcagaccggacaagtggaattcacatgtactcttttcaattgcagctgagtcattgttgggagacaacttttcgctgcacgcaataacagattttttattttcggtggggttttt

SEQ ID NO: 215455 - DNA, 510 bp, Cannabis indica
tttttcgctttcacagcttcctccaaaacttgtcttcgactgaaacatccaacccaaactcaccactaagttgttggagaagcttatatgcactctccactgattacaacccagaaagatcaagcgaccagtttaaggtatttattgttggtcgagacagaacaagaatagactgcaccgacaatctatcatgaggcaacaataaatcactaagaataactaaaaaagtgaatcttaagtggtgtaaatttggattattaacggcaaactacaccaaattttaaaagaagaaaatcaatcaattagtatattaggctttgtttgtttgtacaagaaaaagaaaatttaggttaaggtagtaaaagtaaagaaaacgacacctattaactattataggcttcttcaatataattattattatttttgctaagatcttcttcacaattcaaaccaattttcaggcatagacaatggaatgcccctctagactgacttttttttttttttttt

SEQ ID NO: 215456 - DNA, 560 bp, Cannabis indica
tccaattcatattcttaaaaaaaatatacctattaaataaaaataaattatattttaaatattataacaaaaaaattaaaataaaaaaaaatatacatgagttagaaaaaattatgaaaataaaagtcaatactttgagttagaaaaaaatatgaaaataaaattaaaataagtattgaaattaacataaaatagtatgagaaattttttttaaaaaaaaaattaattaagagtaatttttaaaaaattaatttaagtttatattttttctaataattgagtgtatttattattttatagtgtgtaaatagaactcccctatttttagcagaaaagtttctcatttattttattattatattatatggtactttcagttccattaaaattaattgtaatgattttattagttgctcagtttctttgttttttattgccatttggtgcatttggaggaagtataataagtaattgttaacttaggaatggaagatggagattatcagtaattcaaatatattgtttgacatattagtaacgttggatagttttcctttcaa

SEQ ID NO: 215457 - DNA, 797 bp, Cannabis indica
aggtgacctttttttttgtagtgcgtcttgtgattggttaacgatatctcataaaaattattatattaaattatatgaaatctgatacttaattatgccaataacggtataacacttttaatatttttctataaaatttgtaaaatattattgtgactaaaattaaattagtgataccttgtatttaaatactatgttttagttacaagttattttttttattatgactaaaactcacatttaattacaaaaaatttatgttataactaaaaagttataactatagtgcgtcttataattaattaacaatatttcatacaaattattatattaaattatataaattccaatacttgccaataaggatataacattcttttaacatttatctataaaaattgcaaaatattgatgatgatgatgatgaatgagtgagctattgttagtttgtgtgccacaaattatgaattccccaaattcccaaaacttgaagtcacgtgccccatctttgactcgaccatgcatataataatattaatctcactctatattttattgatttaattaccaaaactgcaccttcaaaaagtcacccactttgtttctttcttttgttttttttttcaacttttatgtttcttaccaatcaaaaagaataaaaaaaaaaaaaaaatactaattagaggaacattcttttaatcacaatataaatattttgtgattaattataataaaaaattatttgtgaaaatataaattattattaatttagttttaatcacaataattattgtgac

SEQ ID NO: 215458 - DNA, 697 bp, Cannabis indica
gttgacttccgaccacgatgacttttccagcgaatttttcgacaacttttccagcgatcgtgatttcatatcttaaattagtaatcaatttcatgggttactgaaaagtattttttaaaaaaatattaaaattatcaactttttcatatgaatttttgtgaaatttaaagtttggttacttatctcttaataaagtataaaagaaactagaatgttactttttatttatatcattttgacatattagaatcatagattttttgaccaaacaaaatttttggaatcaaatttcttttatattttttttcttaataaaaaaaaaagaagtaactcataaattaaacaaattgtttttacctgttaactaatctcaaaggtgactataaattgtttgtaattttacatgtaaaagttaccatatgatatgtattctatacaaacttattttattgtatctcattaaattttatatatctttaaaaataataaataatgtaaaaattgttataaaaataaataaactaaaatgtaacataattgtatcttactcaacaatatacacgttcaaaatgaaattatagttttaaaagttaaccatctaaaataagtaacaaaaatatatatgagataatatttttcacaaaccaaatagtattttagtgtcctatttttgaagtaacatctcataattttaaat

SEQ ID NO: 215459 - DNA, 619 bp, Cannabis indica
acatcaataaagatttcttattatttttacgttttcaaatttttatttacaaaaatatttctttcgtaaaaataataaattttttagttgttttataatttatttataattgttatgagtttacttttctagttatttttagttgttttatagtttatttatatttgatttgtaattattgcaaatttgatttttttttgttatatttaattattttcttaatttttgttgaaaataaaacgtatttttataatttaaaactttattatcttatttttgtaaataaaaattttaggccataaaattacaaataaaacataaaaattattatttatgaaaatttcctaaacaaataaaaaatatgtgtgtaatatttgggtatgcatcaagactcatcaaataaccaatctcaatggtggaaacaaagaataattgtaatatggtggaaacaaagaatatcttacacaatggttcttgtactcttgctagcagtggagagtctattgatatctggtcttaccatggatcccgtggcttagtttcaatgatttcaagaatctaatggagagaatcaaagagactaatgaacacctgaagtcagtagctgatatctccaacg

SEQ ID NO: 215460 - DNA, 1177 bp, Cannabis indica
acttatctttttcatgtattttttaaagtttctagttaaaatattcatctcatcattttcttcattatctgaactttcttttccaataacattaaaaacaatacatttacctttaccaactatggacttgggtttgtccttttgcttaatttgttgatttagctcaaaggtacgcaatgaccccatcaactcctccactttcatcttgttgaaatcttttgcttcttccgtagccaatagcttagcatcgaatctattacgaagacctctcacaatttttctaactatcactgattcattaagtttttctcccaaagcaaaacattcgaaggcaatatcagaaaatatttcataaaattcagataaagattcattatcagacattctaagattattaaacttggtttgaagctgtaaataaagtttttatttgtccaataaaaaattagtatattactaatttaacattctttaaaatgtaatttttttaataatatatgtagcgtaagaatttttaagaccacgtaacgcgcggtttttatttcctagttaagtatatcatgagcatgttgagaattaaggttcatcacatcccctgctactcatcacagaggagttctgcccatttgtctgcagtcagcatcgtgcattagggaattagaatattccttctcttatttgcttttcttgtgtaatcattgaattgtactagagtatcttttcggttatgcattctcctattgtatattgccacttgtcttcatcacagtgactcaatgattgtatccctaagtatatatattgaatgcaaacccctcagcctccttgagctgagttttcccatttagtaaatgaccatcttttctatcttggtatcagagcaagcctaggcaaatgccatgtcgactggcctccctcagactcccacagcagccaataacgctgcaaacaacagccctgcccctggttcgagccaagcgggtatcaccctccaatactgcacaagctcagtcgagctatgttgcaaacttcacacaaccctttagcacactaaaccagccctttcctcttaaactcgaccgaaacaattactccctctggaaaacaatggtctcgaccataattaggagacattgccttgacggatttgttcagggtactcgagcgtggcctctgg

SEQ ID NO: 215461 - DNA, 591 bp, Cannabis indica
agtgaaccaaagtcctctatttatagtgtttaagattacatattttgaaattcaaactcataacccccatgaatgttatgtaactcatgcataactcctatagcattaagaatttcaaattaaaatgtgtacgtaacacctttttacacacttaatattggtgataattgtggaggttacaaaatgtaagtaactccacctcttatgttacaatttatgtgaatattagatgtatctaactctcaatcacattatatacattaatctcatattaatatataatatgtctcattttaatattttaatctatcttatattataacaatataatataacaataataacatataattgaaatattagtattaattataagtggatttttgtattttttttttatttttaaatttagcaagcctaaagcataaaaattcaaatttccttagcaacttgtgaatatgattatattataccgaacttatcaaaaattcaaattcaaaccacttgaggctagctcaagtagccatagggggtgcgtgtgtattggaagtcctggggttagtgtcccagttatgctgatgtaatatataa

SEQ ID NO: 215462 - DNA, 1148 bp, Cannabis indica
tttgaaatttaagcctatggtgttttgctagcacacaaaattcacaaaaatccactttagttaccttgttcttaccaagcagcttttgttcactcatcagttgcaatccactttcactaatgtgtcccaatctcatgtgccatataacaaccttagtgtcttctgtgacatgttctttggtgttgtggcagcaagctacaaggcttcattgcaagtagtataggccaccatttttctgtcctttaatgattgtcatagaacccttagccaatttgaatgtacctgcctcaatcttgctaacaatacccatatcatcaagtacactaatagatattaaatttttagataaatcaggttcatatcttatattagttaaggttctaataataccatcaaacattttaaaatttatagatactgaaccttcaatgttgcatgtctagtcattcccaagaatgactttgccccctctagatttcctgtaatcaaacaaataagacttattgttagtcatatgaaatgtacaacttgaatcaatgatccaatcatctttaaaagatgatgcagaaatatagacatccccaaaaattataaccatcacttaagtttgcattctgatagtcattcttagtcatattctgcttgtttgattcttcttgatgatctgtgcttgactttccattacttctcttgtagaagtagtattctctcttgaaatgccctagctttccacagtgataacacccattaggatttttagtgccttttgaatttgatctccctttgctatggtgattgtttctcttatgagaacctctactagtgcttctgcccctatttttccaaagtttcttttatgtaggccttctactgcttaggtttacatccccattagaatgtccaagtttttcaacctttagctccaaatctttggatatcagagctgagattacttcttcaagagtaatttcaattcttccatatttaatggttgttttgactttcctgtaggattctagcagtgaattgagaattataattgcttgattctcatcacttaaggcttcattctcccctgagtttgctaactcaatatggaatctcaagaactcatccaagttctgctccagagttttagattgactcat

SEQ ID NO: 215463 - DNA, 518 bp, Cannabis indica
ctaaagttgcattaaaattcaagtgatgaatttgctttaagagaccaaagtatgaaacatcattgggcatgtgacagacttcaacaaaaccttgtctttcgagtaggagggttgaagacgtttcatacccccgaagatctttaagccaaaaaaaaactacgtgcatgtgagagtcatgttgactttttaagtggcagactttaacttccgtgaggaaaagctaaagtggcataaaaattcaagcaatgacttcactttaaaaaaccaaaggctgaaacatcactgggcgtgtgacagactccaagctgtccttctcttctaggaaggagggttgaagacgtatattatccacagtgatctttcacgcacgaaaacataacgtgcatgcgagagtcaggttgaattttcatgtagtaaacttcgccttaagtcaggaaattcaaagtttcatatatttcaagcgatgacttctttaaaagacaaaggtgaaacagtcaagtaggcacgtgacagactcc

SEQ ID NO: 215464 - DNA, 574 bp, Cannabis indica
atttaatacttataatatttttcaaaataaaatataaagtgattctacaatgcactcccttaaaagggttgtactgatgcactctctacttgtttcggcatccaaaaaaattttttagtctaattttttttttcatattcatgtacgttatgactatttaagatatcttacaaaattttgaaaaattcagaataatttactatatagaaaacaatgttcaaacagtctattttacacgcgtataaaataaaatagtcaagcgtgcaacacaatgcttgaacgcaattttcggcgtgtcaaaactttttcgaattttttaaaattttgcaggatgtcttaaataactataatttacatgaccatgagaaaaatttggactaaaaaattattccggatactaaaacagatagagatgtatcgatgtgtccctttaaagatggtgcattatagaatttcccgaaaaattatattatatcctcttaaatttaattaaatactataaattatgtataataaatgtgacgtagtatataattagtgtaaatttttaataatattaatagagtaaatatta

SEQ ID NO: 215465 - DNA, 770 bp, Cannabis indica
aaaaaagaaaaaaattaaaattatgaatcccaattgcaattttccatgtcttcctaaatcccaccccataataataaataaataaataaaaattgataagaccaaagagagcatgaaaatgaaaggaaataaaaaggaaagaaggaggtgggttccttgcacccaacgcatctaccttaggtttttggttcggaacttggttcggttgtggactttctaaggataagaacgacctctctctctctcaactctctctctcttaacgccatcatctaccactccctacaagaacccataatttccctcaccgcctccattcttcttctcaaacctaaaccacttaaacacaccccactctctttcttcattcaaaaagcttcaatctttctcattcccaattcaaagaagctgtctttctctggtttagtcaagctggcgatcgaaaaccaagactccactgttcgtgaaatcaagcccaaaagcagaagaatcatggtatatatacatttttagttctggggttttgttaaaagtttgatctttttgtttgattgttgtgatgattttggtatgtggggttttgtgtatttttttagggtgctggaggtcctgatgatgaggacaacagatggccaccatggttgaaacctctgttaagagagagtttctttgttcaatgcaagtcacatgctgattcacacaagagtgaatgtaatatgtactgtttggattgtatgaacggagctctctgttctctctgtttagcttac

SEQ ID NO: 215466 - DNA, 588 bp, Cannabis indica
tgaacacatcaaatggactccatcctctgaggattctatgactgtgagtgtaaagattatttggaaattgaaagatgggaataattctacattcccaaaatacaatatttatgcaaagaaagcagaatcagcaagtgagttccttggagtggcgcgagttcaagcgttttatgttggtgactatgcagttccctctggtagttctggtgtcaaatttttcattcaagtgtgtgatgttgatgggagcagccagacactagatgattctccttctctcctattggaaccaaccacctaaagatcactctcattattatgtgttactagttcttttattaaatcttcaataagcagcattatctaaaataacaataaaaatgctttaataataaggactttaataaaaaatatgatggttcacaaaacccatcaatttaaattgtatctttcccacgcttgtgaaaataaaaaattgtatctttctttcttcattattgtgttattagtattactaatttcccatcttaaggaggttgctatggttgttttactttcggacacatatagagaagaggcacatggtgaaaa

SEQ ID NO: 215467 - DNA, 645 bp, Cannabis indica
taataaaaagtgcataatcagctttaattccttttaatatcttgttgtttgaatgtactataggaatcagcatttagtccaattttaactgaatgagattgcttacggttaaggtaagaaaggaagaatgtgaacatcaaattgaagaggagtgtataaccaagcaaagcaccaacaccaatccaataccagtagctctcagaaaacaaactgcgagcttttagcaatgcctctcctaatgtagaagagctggtagcatttccaactacctacatatatatgagaacaaagagccataattaagttaggactatgcggaaaatgcaactagtgcctccatatatacacatattactttaaagaaatgaagaatgagtaactaattgcttgtgttactaagtttactttcaaaaatgtatgaacaatatcatttcaaagttttaccttatcccaggaatgtccaaggaattcattcacagaagctgcattttgtgcatacatcaaaggagaaaaccagaaaccccatatccaccaacttggaacacgatctgtgttcagaaattaaatcaactcatgaacatcaagaaaagttattgagatcgaggctttgtcccctgaattgatttagttttattacctcttgag

SEQ ID NO: 215468 - DNA, 532 bp, Cannabis indica
aaaactatattagttctcacaatggatagcatatacaatctttaattttcagcctaataataaaagagcattgttattagtatcagtagtgcttagcactttcttagtgtcgtcttgtgattggctagcgatacccccaatgacaaagaaaaggagacatgtgggatcatttgcccccctcaatttttattcatataaatttgtatataaattttaagtatttatattttgctcataaaaataatttttctatttttgttcttacatatttttataatttttttttgataacatacatttttttaatatttatccccataaaatttatattttttttttgcttttattcttacatatatttatttctattcttatagaatttttattttttcaataaaaattaaattttttattaatggtttagaaaatttttttttgcccccactaaaatgttggactggctctaccactcatactccttaaaaattattatattggctaattagaatttttgtcccccgaactttgacat

SEQ ID NO: 215469 - DNA, 538 bp, Cannabis indica
attttttttttattttaattacagaaaatatatacggcctttttatgttgtactcttgttaattggtggtgaattttttattatctgtatgttattttttgttattgttttgatgttattttcatgttacctttatgtagttttcatgagaacttgtaaaaatatatatataaaaaaatttaaacgtaaaaatataaatttttattttacaaaaaatagtattttatgtaattatttctatttttaatagcattttaattattcagcttcgatatatattgacggtaaaattacatgaattatataattttacactttttttttacgtacggttgctacgtaaattgcgatgtggattgtaaattgagttagatcgttgcgtgagctgtaattatgtcatttattgctaagtacgaaattttactaattttaccgtataaataaaaataaagtactttcaaatgtaaaaatgaacaagcccaaaaaattatgggagagatattttgagaaaattgaaattaaaagaataaaataaaat

SEQ ID NO: 215470 - DNA, 626 bp, Cannabis indica
aaaaaaaataaataattattcgcggttaaatcctttcaactattattttattagtacttaaccatttaaactcaaattttagtagatttaaggtgacatctattttttacagttaacttttaacatggactacttatgtgtacacttatatacacgtgacacgtgtatattggtacacctaatattattatttaaaaattataaaataatatttcaaaatttataatgttttgtatttttttaatattctatcttttattttataattttatttaattttaaaatgaattttgaaataataatattaggtggactaatataaatgtgtcatgtgtacaagagtgtacacataagtagttcatggcggcagttagccgaataacacctaaaatttgctaacagttttgtagtttggaagattttaccatcaaaatttgagtttagaaaattaagtgcaagtgaagcaataattaaaaaagtttagctgccaaaactaaaaaaaaaattgataaataagattgaaaaaagaaactattacgtatactagctaattaaaatattaatgaaaatttccaaccacaaattcaattatgcagtcaccaggaattattattattattaatatt

SEQ ID NO: 215471 - DNA, 799 bp, Cannabis indica
caaaaacaaaaagttagaatctagtaactattagtaaaatacgaggaataaaaatagtatttaccctttataatttataagtaaaacttttatttgataatacacttagaatcaaattaattataatttaattaaaggattataaactaaataaagatacattaaataaaaacaatacaaaacaactaaaaataacaaaaaaaaattctctatagattatttaaattttttttaaaaaaaaaaaaacctatatgcttaacacattaattttttttttcatggaattgaaataaatataatataaacatgatatatgtactagttattaataacatacaatgtatatttatttaaagttgtattagagttgctaacccaattattaatttaaataataataatataaataaattaaatataattcttatattttttgaaaatatatatagttttaaatttatttataaaaaaaatatatctaactaattttattaaaaaataaaataaacaaataaataaatttaaatataatatatgattaattaattgaattggcgtttaatttaaatttaaattaaagttacaagaatattcttcacaaactttacagagattatgagaagaaatttatctctagtttagactctctctctcaaccatacactatcatgattttcactcaaacaaatctagtctgatttacacacaggttataaagatttacagctatatataaattttcattgttaccaaaaatctttattaagtaattttaatttatcaaaattaaattgaatgt

SEQ ID NO: 215472 - DNA, 572 bp, Cannabis indica
gcacctatttaaaagaaatgtactgctgtaccctctacttttttcaacattcagaacagttttttagtctatttttttcatattcatgtacgttatagctatttaagatattctacaaacttttaagaaattaagaataatttacattatagaaaacaatgttcaaacaatttattttatatgcgtataaaataaaatagtcacgcgtgcaacacactacttgaatgtaattttcggcgtgttaaacttttccgaatttcttaaaattttgcaggatgtcttaaataagtatcatttacatgaacatgagaaaaaaattgactaaaaaattatttctgatactaaaacagagaaagatgtataaatatattccttttaaggaggtgcatttatagaattttcctaaaattatatttagcatgtttcctttatttttgtaaaagatatgtaaaataagttaactcgtttgacagaaatttaattttgtaattttttaataggtattttagcttttggatcttgtacttaatattgtaataaaagatacttttttttctaatatatataaatat

SEQ ID NO: 215473 - DNA, 742 bp, Cannabis indica
gtaacagatgacttatatggataaatttagattgtgattagtttaagtttttttaaaagaaaaaaaatagtatgggtctctcttatattgattattaattattaaatttagcacaagagagtttatatatctcaatatttttttttagagtttttaattttttacaaataaataaattattaaatcattcattagtaagatattaaaatagtgtcttttcaattttgataactctcaccctaaataactacctataaataataaaataccatcaaataaataactacctataaataataaaataccatcaaatcattcataaatataattaatatagtgactttttatttttataactcacaacctaaatagttctctataaatagtgataataatatcttatgtatttcatataatatttttttgagatattatctttttcatattcatccttctctatatacaatatagattaatattgttttttaaaaaactgataatagaatgagctctaagattttgggtactttaatcttttatttagtattgtttgtctcatatgctccgaggtagtagtaaaaaatctttcaaagataattgtgaaaaaaaaaatcatgagtttatagattaatatatgtttgtaaatacatattctaaattaaacatactaattttaaataagattatttttatttgtgttatgtattgcatatatatagagtagtgtaacattagatagttt

SEQ ID NO: 215474 - DNA, 538 bp, Cannabis indica
gaaaccaaatgggcaaccggttatgggtccaaacaaaaggtttcaaggtaactagggttttcattgaggcagaaacgaagcttggtagtcttaccccgaaggtccaaagtgcaagaaatgccacttgggcaaatgttagtctaaggccttcttttaatgtggagtattaggaaatttaagaaataactgcccacagttattgaatcctaagaccaagaaaaagagccctatgggtcctgcaaggatatttgctttgacccaagcagatgccgaggccagtccttcaactgttaaaattgagatatctattagttgtattatgtttactatttttatttattcgtgtgccacatattcatataattctagtagaatcattgaaaatttagtagaccatgtgatatcatgtccagtggatttggtaccttgttacctactgcggaagtggtcatctatagcaggtgggaagttctctcccggtgttagtagaaggagaagaattgtcagtggatttgaatggattagatttaggagattt

SEQ ID NO: 215475 - DNA, 751 bp, Cannabis indica
attttttgttgtaaatgatttttttacattattaatttgtggcacctaatagtgctcaataccataccactgtgatacataataattggttagcagtttcttatattatttattaaattaaaattttttgagaactgatattgaaatacaccagtaaaggtatactaccatttgtcgtgcttggtacaccttaatgtgcctcttaatattttcgctattaacaagtatatactcttttttttttttgaatgaaacatgtatatattcttattagcttcaattgtggttttcttttttttattttttatgaatggcctttgtacattttttgtaaataattatttatactattattgatatgtggcaccttaaggtgttttatgtcacatcaatatagcactcaagaattggttagtaattttctaaataatttattaaattaaaaattatgggagctgatattaaaatatactaataacgttatgttacttttgtggtgctcgataccttaatttgtcccttaacattgttgttgtttttatgtacaaatctttattaactttgattatatttttttttaattatacataaatttgcaagaacatctctaacggaaaatataaaattagactatatttgacaaattttctcttttttttaaatgaaaaaaagatctcaattatttgtatatattattctcaatcattttttaatcttaattttttcaaaaaaaaaaaaaaactatatgaat

SEQ ID NO: 215476 - DNA, 628 bp, Cannabis indica
cttctcttggaatttacttgagggcatagctcttgaactgtgcgagaagatcatgtattttacttaaataggctatcatcttttcttctcgagcttcgtactccccaaatacatgatttaccactaactatgagtcactgcagatctcaatgtgttcggcatgaagttcctgagaaagttttaggccagtaataagggcttcatattctgctttattgttggatactctaaacccaaatttgactgctccgtgtagatgtttccccccaggtgtgacaagggcaatccctgcaccggacagttgatctatagccgacccatctacatgtaacttctaggtgggtttgtcttcgctgttgctcgactcaagttcttgtactggctccaggttgttttttgaagtgatttcttctttgcccgtatagtcaactacaaaatctgctaaggccttccctttaatcgttgttcggggttgaaacatgatttcgtactggcctaactccactgcccattggagtaaccatctagaggcatcaggtttttgtaatacttggcgtaatggttggtcaatgtatacccaaacaggatgatcttgaaagtaaggcctttgctttcttgttgctaagat

SEQ ID NO: 215477 - DNA, 509 bp, Cannabis indica
ctaaatggcacactctccgaaactgtctacatggagcaacctgccggttacattagcacttcacatcccaatcatgtctgcaagttgcagaaagctttgtatggccttcgtcaagcaccacgggcctggtttgatcgtttgcagcaagttctctcctccattggcttttgcagctttgtttcagatccttccctcttcttttacaaacaaggcgatgctgaattatatctcctagtttatgttgacgatattctgctcacaggtaacaacactcttactgttcgcggtatcattgcaaaacttcagcacttcttctctcttaaaacacttggctcagtaaattacttccttggtttcgaaatcactcgaggggcctatggtattcatctttcacaaagcaagtacacgattgatttgctcaacaaaactcacaagctgcactctaagccaagtcccactcctatttctcaaagtgacaaactcagcataaatgacagcaaggctttcga

SEQ ID NO: 215478 - DNA, 914 bp, Cannabis indica
aacgttcaatctatgtgtatgttcatggaaccatacataagatgcatgtacccaattatttctttggacaaattttatagattgcttagttaattttctctatctcttgctaattttgtgagaattcatttgttaagtttattattaattagatgtgtttgccttcttaagacgaatcaaacattcatttacagttcttcacttatgtttttacacactgattttggtcttttcagatgttcctttgagtgctagaaatattttggaaaatcccgagctgaaaactgctgtaaaagccttcaggtaaaagtatgctcattttcagtttaattgtggtacttaatcgataatttgaagattgaatgaatgttttttttcccttctctttcttaaaaagtctgccacttctaatgaatcattaaatttaatctaatttagtggcgcagggctacaaattcatttctatcatcatatttacttactttcatcacattatatcactggaatggattttttttttttcgaaactagaatcctggcctaacctatggaaaacataactataacaattgctatgtaggtatctaagagaaacttgaacctcatacttgcgggagcaaactacgtggctaaccatttgagctacccttcttgggtacagtaatggatgtttatatttgtcctttgatatatacatccacaatttataaaattgcttagaataagattagtgtctgggcagtagtcaattccatcactagggtggaccctaggtgggaaattgatgactactcctctttttgtattagagtcatgtcttcttttgctagttgtctattttgtaatatttcgtttatctacaaccggtttggtcgactttctacctccgctattcctaagaacatattatgtaa

SEQ ID NO: 215479 - DNA, 1443 bp, Cannabis indica
atattaagagattttttttacttttttggtacgaaagataacttttaatgcaaattaatttcctttctctgaaagaactaataatttatgatcaaattcataaagacaaaatcaaacccaatattcaaaacgataatcaccacaaaattaaaattattttgtaagcaagtgtaccatattcaatgttatttaataatatacaccagtcaaatttgtacctgtgttaaataaatgtgtacataggtttttaattttgccaaaaagttaattaataattcctatctttaaccatatatattatatattatatatatattatattgcaataaatttcattctcaaaattccctattattttctctataataaaattagaaaaattatctaatatactatttttattttttttttctaaatttatgttttgagtttttccaataatttctttgataatttttatgtgagttactatacaaattttagttatgatttagattattgttatataaatttttatttaaaattttgtaaaaatataaaaaattatttttaaagtgtaaaataaaaattaatgttatgatgacaagctatatacctatataggtatacgtgtaactctccaataaaaaaaagagacatttgaatttaattattatattcaaaccttcaattattattttattattgatcaatttgaaaaaaggatattattattattaattcacaaaaatgaaaaactttcttcatgtctattatctagctagctagaagagagagaaaaaagacaaaaataatgtgtctaatgacatatcatgtccattgagaaaatattgtaaaaaggtatttatatatgattgaaaatctgagaagattaatgttatatatttatataaattaatttattttttgtcttttttagagacatgttaatccttttatgcgtgtgtgacaaatatatattaatttaatttgttcaattaataaaaataaaaacagtagtaaccctaattaatgtttggactaaatattgaggtcaaattacatatttgtgaaaaacaaacataaattaaaagtgaaaaaaatataaaaatcatatacttaatgatataattagggatgtatattttttttcatggagggtttcataggacccgtcttaatgagacaaaaatttaccgtttaaataagaaaaggcaaggatgagaaactgcttagggcccgtttggcacagcatttggaaaagctaaaagctgcttttcaaaaaaactgtgacaaaaaggtatttggtaagcagttacaaaacagcttattgaagaaattatggaaaagctacagctaaaagctaaagctggtacaacccaacttttagaaaaagctgttttgattaaaagactttataatgaattatttttactaaaaatttatttaattatttattatata

SEQ ID NO: 215480 - DNA, 408 bp, Cannabis indica
gattttaaaaaacaaaaacaaaaacaaacaaacatgaaggcccaaaagcaatcgtttaaaaagaataaatctgaaaaaaaaaaaagaaaaaaaaaactacaccaaaagcctatattattgcatttacattaagttactatactttttcaattatcttgttcttcaaatcgctaacaaattgacacaaattcctttcagatgatccgttttcggccaaggcattcttcgatatttgtctcaattttatcatctctttcctcaatttatcatctaattttgtactcatcaacacattaaccttctccgcaacttcaaaccttgtcaacggtttcttatcacaaaggttgacaccaattcgccaatcatcaactaataattttctaatagttaactgatctgcttttagag

SEQ ID NO: 215481 - DNA, 601 bp, Cannabis indica
ctctctctctctctctcttgtaactgttagtagtagtggatccaaagctaacaataccattaataattaaactaaaaattgtaccattaataattaaactaaaaattgtattgttcactctaaaaaaattgctacttttagtaataatcttttagtcacaacattaatcttttgtaactaaatataactttttgtcacaacaaaaaattacttgtgactaaaatatagtatttagatacaagttgtcactaatttagttttagtcacaacaagtatattgtgactaaaaatacatttagtcacaataaattgtaatttttgtaattaatacttttagttacggaccttttagtcacaacacaataatgataatttataattagctacaatttttttttttatttttagtcactagttttgttatataactaaaagtaagattttttgtagtgattgtttttactataaaaaaatttatttttaaatcacaataaaatttgtgattaaaagtaaaagaattgtaattagttatataaatcgtcattcttatgttgtgactaaaaatttatgattaagaatattagctataaaaattataatt

SEQ ID NO: 215482 - DNA, 576 bp, Cannabis indica
ctaaaaaaaaaaaaaaagacaattttccctgaaacgcctttatgttttaatttttatacacttaatcatcttatttttttttgtgctaaaacccccttaagtttacttttctttgcaaatttaaagatttagttagatattaccgttaaatattaactgaattactattgtatcaattttgagattttactgttacatatacgcaggtgtatatagagtggtcatccagttaatatttaacgataatatttaattgccttgtcaaaattgcatagaaaaataaacatagggattttgccacaaaaaaaaattgaagttaagtgtataaagattaaaacataagatgattttgccgccaaagaaaagataaggaggttaaatgtataaaaattaaaatataaggggattttgccaaaaaaaaaaaataagagagttaagtgtataaaaattaaaacataaatgaatttcgccgcaaattactcaaaaaaaaaaattagagaaaatatttaagttttttagtctaaaatttagagatagcttattgttggcttagaaaacaataaaaataaaataaat

SEQ ID NO: 215483 - DNA, 1295 bp, Cannabis indica
aaattttttgaagaaaaaataaacttattgatatttataaactcataccaaataaagaaaaataattaaaaattcaataaaaatataaaattatttttttaaaaaaaaaagttataaattaaactaagaaaatattatgtttacttaaacaaatctacatttttttgataaaaatgaaatatattcaagtttgttcctataaaatttagtttttgatatatttttacaaattaaattttaatatatttttttttaatatttaaatgaattttctaattaataaaaaataaatgattttttatatcgcgtaattagttttaaaattttaatttattttttaatttttttaattattcaaaataatttttcttaagatctaaattaattttttaaaatttactaaaaaaatattgaatctttctcgtttttattttgagggggtacgattcgatagttatcaaagtttagggggcaaagttgcgaattgataaagacacatcatcatttaaacagaataataggatggaacctaacaaaaggactaaatttcagtaaatgtaatagtttagggggattcttaacaagtcatatattttaggggctaaaatcaatattatcaaaagttcaggagggaaaattactaattatctttcttttttcgtttttcctcaactggagtaaagattcttttgtgagtaatttttaaaatttactctccgtgcttttttattttcttacatttattttaggttaatttctataatttattttaaatcagtttggaagcaaacacacttatttcattgatttccattgtacttcttgcaacaactatggataaggcttatgttaaactcctaatttgccttatgtggagcatttgaaatgacaaaaataaagtatttcatggtgggacaaaacgtgttgcctttgctcttgcaacacaagctataagttatttggataaatatcgataagtaaattaaagatgcaagaagaaccacaatcctcatttgtcacaccagcaacgcacgcgcagcacctgcaacattgcaccagcagcaatcatcatgacatgtgatgcaccagcaagatcacccacgacatgctgtgtcaattgaacaaggctcaccacaccagtaaggcagtccctgcaacattgcaccagcagcacccattaggatatgtgttggatcagtaagttcacccacctatgtcaatcgaacaaggcttaccacaacatgctactactggttacaacataaggccaatgaatggtataccgtgaagtctcg

SEQ ID NO: 215484 - DNA, 604 bp, Cannabis indica
atacgactgaggagagagttaggtgattctaataggcgccaggcttgtttagctaaaaggacttgattgaaatggatgaagtttctaaagcctaaacccccatgaatcttagccttacaaagagaattccaatttttccaatgaattgcattgccagatgatggatccccaccataaattagccatcatactctcaatttggttacacaaagtgacaggtaaccgaaagcagctcatcgcatatattgggatcgcttgaaccacagctttcaaaagaacttcctttccaccagcagaaaacaattgctctttccaactactaagaagcttccaaattttatccgtaatcccactaaaaagcttagtcttatctctaccagcaaaagatggaagaccaagatattcctcatggcaaggctgtatcggcatgttgagaagctgttgaaagtagtgttggttggattgcctcgtgtttggtgagaaagaaaggacacatttatccgggttaattgcttgaccactagcttgatgataaatgtgtagcactttctgaatagacctggctaattgtggagacgcctgacaaaagagcacactatcatca

SEQ ID NO: 215485 - DNA, 1100 bp, Cannabis indica
gatgtaaaacgagaatttgagactaattagagagagatagagaagggggcagaataaaaataccttctttagggttgataagggagaagagcggcggatgtgggtgtggtggtggtggtgccgccgtggtgtggtggtgtgtaggccgccgtttgagagaattttagagagaaagggataagagaacgatagtgattagagcatctcctattctaatagctgaaaaaaataaaaataaataaaaaaaaaagattattaaaaaaaaataaagaaaaaaactttttaattattagacttcaaaaccgtttttttttttattaaaaaaaatctacataaaaactttattgtaattaactaacggaataacctaaattataataaaaaaatattatagcaatccacataaacaactttagaaacccagactgtaaatttgaaataaaaaaattaaaaaaaaataaatatatgaaataattttctaaatttaaaagttctctatttatttttttaattatttattttgtacttaattatttactcccattagctcatgtttattatattatattactttttaattgttttctttaactttaattaatataaatattttatttaaatgagtaaagtaaaataaaaataaataaagttgaccccaaaaatgattaagtgtaattttttgtcattaatattatatccaaaaatttactaagtataaaatttcaaaatacactaaaagcatattgacaagaaagcgaaagtcgatccacgtaaagggacaagtcgacacgtcaagactcggtttgagctccctgcacgaggagctccccgctgccgctccaccatctccgcgcgtccaagggagatccccgctcccagcactccccacatgcaccaagggagctccgactctcatcactccccacatgcatcaagggagctccataccctcttgatctctctatctctcctcaagttcctttgctccctcttccaatacttagctaaactcaaagtgttgctccctttctaacacttagccaaattaattataaagtattggctctctcatttataagagcatctccaaggagctcatc

SEQ ID NO: 215486 - DNA, 1125 bp, Cannabis indica
gcgcctatctttttaaaaaaacgagcaggggcccaagggaattcaaacgattcccacgcctgagcaacaaccaggttacttctctcatcccgagtccaagcctcttcagatttgagactcctcttgaacttagcagcagtccctccaaaatataggcagaggggcatgtgatcagagttgttggtatggaaagatcagagagcgggtctggggaaaagaaagttccatttctcattaacaaggcccctgtcgagagccgatttaacatgggcgacgcagaacgatggttatcccaagttaatttatctccatggattggtaaattcatgagacctcgagagttaaccaagttcgaaataatggggataaaggggtccttcccttttgagccctccctctctaattcattgagcacaaaatttgtatcccccaagattagccaagggccgccaaatttatctcccatattttctatcattatatattccataaattataaagcattgcattacacattatattcattcacctctcttagttatttttctctaaagctctccacatatatgattccacatagtatagtaatctatataggggacttttattttcactccataaaattataaatacaccccattattaaaaaataatataaatttatataatttttaaaagttactcttaatatttttttttaaattttttcatcacattatttaatgttaatttcaatacttattttgatttcattttttataattttttttaactcgtgtatatatatatttttttttttctaagaaaattttcataaaattttttatttaaatttttttgttcataatttaaaatataatctaatttaatttgataggtatattttttaaaaatataaattgaaagaaaaaagttaaaaaaaatagtacaagtaaagatataaatttatattaattaaaattattaaaatagtggtgcctttataaaatttctatatatattactaaaattgacagttcttgatttaagtttggtttcattttcggttaacttaattgatttttttttttaattaactatgttttttttcctaatgtcatgcataatttttgtacttaattgtaa

SEQ ID NO: 215487 - DNA, 647 bp, Cannabis indica
attttaaaataaaaatggggtaagggagaatgagacttttttatgggtggttggcgagaggtatggggctgatatggctggctattcttcgtgttcaacaagttgtgaaatgagtaagacgatactgtaggggtctgatatatataaccctattgcgttggttatttggtattaaccgacgccataggtgtcacgtgtcgaattacagctgcacctatgacgtcggttaataccaaataaccgacgacatagggttaataaaaaattcttaattttaccccaacccccaaccgacggcatatatataattaaattctatacctacgattttaactaaaaaactgcctctaaatgtcaattttaaactaggcgggtatttcacaccctttagcttcccttttcataaaataggtgaaaaaaactgcctctaaagcccataattgtagtattgttagtgagtttttaagaaaaaatcccacaaggtttaaaaaccattatgagtgttatatcataaactatatatagataattattttctcttttttaatttatcccaaaattagtattacattattttttatgggtgattaaaaaatttaatcttgccaaattaatttttttaatagaatgtaacatatatttttttt

SEQ ID NO: 215488 - DNA, 556 bp, Cannabis indica
acatttattgacaacagccatagggaatacattttatttactgttatataaaattattatgtatttaagtatttttttttattatatatttactgttatataaaattattttaaaatttaaaaatacaggtaggaaaaattgtatgcaaatttgtaattttctttaccttacatttatatttcgttttataactaacgcaataggtaaaaaaaatatttgagcaacttatgtgtcatttaaaaactgacagtataagtttttagtgacagtttttaaatggcacaaatgattttgcgtcatttttaaactgacgcagaacatcaaaaagaacattgtacattttgtgtcagttttaaaataaagagaattgttatttgcgtcacttaaaaaacgcgcaaataaaatctatttgcgagtatggcatatacgtcagttttatagagttgacgcaaaaactatatatgtctcttagaaaccgacaaaaattactttttttttttgtagtagtgtctatgtagaaatatgtagtatcgttacttttaaatgttcttttaa

SEQ ID NO: 215489 - DNA, 669 bp, Cannabis indica
attgctgtaccctttttcttcttcagtcctttgtttttagtttttgaaattttaatcttttgagtcgtgtggttggttttgaacagttttcttagaagttgcgtgttgatcggttattttattttgtttgaaacccattttttctctaatttttttcctcctaatcgttttccattttttcctataaattttcattttatttttctttagcatgtttgtcactcgatctatgttttcatcccctatatataaaaattctcaaaacactcataaatctaagttaccccaatcttcaatgtggaaacaaaaatttaaagatcatcctctaagtcctacttcccctgctccttccaaatgtaagttagatgttcattctccttctaagagagtttctaaacatcatcgacctatggaggaggagtctgattccaattttaaatttgacgacgagttcattcaattagctaaagttgccaaggtcggtcgtttgtttttgtatttttttagggttgtgttttattttaaatttttatgttattgtgttttaattttttttcatttataattttaatagtatttttattttaaatttattattttgtatgttttgttattttaagttgatttataccttctataacagttgtattcttcttttttttttttttt

SEQ ID NO: 215490 - DNA, 719 bp, Cannabis indica
tttatacatatgaccctctaatttttttagcaacacctttttatatttttactatttgtaaatttaaagcgtcagttaaattttaccgtttattgccatttacgttatgtatatctacatatatgtggcatatttttattgaatttctttagtgtcttgtgtaagcaaatatttcaagtgacaacatttataaaatataactaacacttcagatttgagataaattaaaaatgattttttttttattatacattaattaaatataattttatttaataaatacttttttttataattaaaatattaaatataactttatataacttatcaaattagaatttctaattgactcacctaataaaaataaaaagtagatataaagtataggaaaaacccccttaaaatagatatattgatgcacccctatctgttttagcatccgaaataattttttagtcaaattttttctcatagtcatgtaagttatacttatttaagacatcctgcaaaattttaagaaatttagaaaagtttaacatgctgaaactatgttcaaacagtatattgcacgtgtgactattttattttatacgcgtgtaaaatcgactattgaacattgttttctaaattgtaaattattccgaatttctcaaaattttataggatatcttaaatagctataatgttcatgaatataaaaaaaattagcctaatttttt

SEQ ID NO: 215491 - DNA, 688 bp, Cannabis indica
tattcatctctcattattctatcaaaacctttctagctcaaaaatcaattaacaaaacaatcaataaaacatgaggagttctttaactttagttatcataatcaaggtatcatactatactatgtatattaatttcttcttaattatactcattatcatcaaggtatttattaatttttttgttcttaattttactcatcatcatcaaggtgcatattaattttttttttcttaattttactcatcatcatcaagatatagattaattttttcttaattttactcattagcatcaacatatgatactatatatattgattattatttgttctttttgttaatagttggtctaattaattaaatatatatatatatatgtatgtgtggatgtagttctaagaattctcacacataggaattaaatgtttcaaatcaagaggtggctttgatgatatttttgataaataagtatcattgtattactcaatcaatcaataccacacttttcaaaattttatttattatttttgataaacaggtcatataaagaaatatattgttaaaatgatctttctaattattttaaaccacacattgcaatctaacatattattcatcgtgatgggtagaagaaattatatatattcacataattatgtgaatgactatggatgatttatatgtttgc

SEQ ID NO: 215492 - DNA, 989 bp, Cannabis indica
attggcattctaacttaatcatatcaataacgttgtcgacacacatcgctaaatgttgttacagcaggtccaaatagttaataactaatacaagcaacttaaaaattagttcataagactataatactaacaaaaataatgaaaatactaaaataatgctcaaacccaggccttcatgaagctctgttgtggccttcaccgccacaatttgaacaatggcaatattccacaactttatcactattagatggatatcggtactccgtcttcttcctgcattgctcttcctgggatgacctatgagtttcttctccactagtaccccgactctcatgttttacatgtgttttggaagcacctaattgttctcctcaccgacaacattaatttttgcatcgtacgtattctttcacgtctctttcgtgtaatagggggagctaagagcatacatgctcacattctaagtaattgctgcaacacatgcatgggcataaggaattttcaacaattggaacatgccgcatgtgcatattttctcaactaagttcacatcaccacctctccgaccctcagaacctctacaaatgttaaacaaatgtgcaccattatgttggacacttttgaacctaccatccttgtgctgcgctaccaaattttcctcaaaagttattgccaaaagggtagcgcacttacttgccttttcaagacgatcaacgaaccaattttgtagtgtgaaccttatgaactcaactggagtacttattggataattctagaattcttttgtcacgttgttgaggcttttagtagcgttgcttgtcattatgttgtacctatcgtctggacaataaggacgagcctacttttccaatcctgtactctcaacataagcagtaatggcagggtccattcgttgaagtacttgaaaatgtctgtcacattccctctttgaccatatgtaagcaaccaactatatttgcatgtgacat

SEQ ID NO: 215493 - DNA, 709 bp, Cannabis indica
gattatagagtgcaaacacttggactacatttgatgactctgtatctgctacaaaagaaattaataaaacaattaaaatgaataacatcaaataattatgcatcggaatcaaaaaaataaagatttttttaaaaaataataataaaaaaatattaatattctcccaagataagtttgttagatagatatatggctaagatgatttttttaatttaaaaagagattattaatatttaaaagattgtttaattttttgggtttaattattgggtttatttattaacgggagatcaaacctaatcgttaaatgttaaacaagaaatgccgttagataggcacttttaatatataaagatatagataatagatatttttatattttttatataattaaaaattaaaaaaaaaatatatatatatatatatataaagagatatgagaaaaataactctaaagtaaattaagtgacgtgtgactcttatttctcaactttatatatataaaaaaaaatatagatatattgatttgttgtaaacaagaaacaccgaagggagaagaaatagtgtagatttaggttttatgctataactagtaaacaactcgcgcttcgtggcggatgtttaaaaaactttaacattactaattttcatataatttttatttgaataatatgagaagttgggtttacaaacgggtcagcttgacatg

SEQ ID NO: 215494 - DNA, 741 bp, Cannabis indica
ataattatagttataacttacttgattgaagtgtataacatattatacaatgtcatgagttttaatcccataatactctttttgaatttttgctaatcctccaactctcacaatatattttggtcatatatagacataattattttgcataaaatttaggggaaaggcttacaaatgctattagtactagctagattattataattattttacataaaaattatctagtatatttcttttttcttaaaacaaaatttttttaatgttggaaaaaacccgtaatgctacatgaaatgacattttggataacactgtttgaaagatgaagataaagatatccattattacataaatagtgggtcccagtcccacccaaaagatagtacaacattattgaatattatgtccagttaatatttacatgttttattactttattcaatatgtttgaaaagtgtgaatgccttatataagatatgctttattttgtttagtttctaagtctaaaaaagattcatttagaaatgattggtaaaggtgttcataaattggatcactgcacaaatacaatctaatttttttggttctaatttggttgtggcttgtgagtaaatgccactatatatcatatgcttggcaatttgctattcagtacctgttcaaaaatacttaatgcaatcaaatgattcatataacttactataatttatatatatagaatatttgaattgaaattcgaca

SEQ ID NO: 215495 - DNA, 941 bp, Cannabis indica
gaaaaaaataaacactatgcctttcttcatactatattacaatttattttctctctctctcaaacattttcacttctcttattatatatatatatatattttatatttatatagacaacgtttatatattctcaagtgacattaataaacctattatattacgtataattctaattcataatgagttataggtaagtaatatcataatttgttaataatattgttgaaaaaggaaacttataatttagttaatacattattaaattatagatagaaaacccatataaaatggaatcactgaattcaaatagttacataataattgttaagcaaaaaaaacattataattattttttattttatatactagctaattaatactaacttaaaagaaataaaagactaatgacctatagtattctaaaataccatttatatgataattaattttaaaaacgtaacattcacactaatactaaattaattataaaaaatataacatacacataatttaatatatgtattaattctcttcaatataaatatgtaggaagaatatgtttgatgtgttatgtggaagtgtactattagtaaaattttgtaagaatagtttctttacaatttaaagaattcttcaaagaaatccaaaattatttttgaagtccatagaaaagaagtctcgatctatcatattcatgggaaagctaaatacttcttattcaaagtaagtttatttcattttgacaactaaaaggtaaattacctttaatatactattttatatttaatgaatttttggttttgtaggaacaattttttttgtagcttttttttttgtttcaaggatgaaaaatgacaaacacaaatatgataccaagaaatgagcattcttcacattgaggaggaggtcagcggtgtggtagaaatattaataaatacta

SEQ ID NO: 215496 - DNA, 530 bp, Cannabis indica
cgttatagttatttaaggcatctatgtacacatatacaaacactttcctgatacacaagtataataattttactataggactggattcataaattataaggttaggttgagtagagacttacatatacacgaaacacttgtttctcttcttcaaattcaagtccgctgtttaaggcaccattattctctaggtaatctacatacgaatcaagaatatctgtgtaatatgaagctctacgcggcctcagtgattcttcagaaagacagattcttgtgacacacttttgtttataatctgaacgctgccacctaaaaaaacaatcctttctcagttatcatattatggttgggttgtgtcttttttttcttttctttgtaacaaattaaggacttttcatggcaatcagacaacttattaagttatcatatgtttaaaagtttttatccaatttcattcaattaaactatttcggtaattatttatgtactaaatcatgttcccgccactatatagggattttttcaataat

SEQ ID NO: 215497 - DNA, 379 bp, Cannabis indica
gaattgtagtcttgtaactttgatgaggacatattctccatctcatttcgagaatgggttatggaacactgggggtagttgtaacagaacaagtccgtcgagtgaagtgaagatcgatttggacaggtttgagtgggaaataggaaatcccaattggaagagatggaaagagcaagagaaattggagttaagaaaggaaataaatgtaagtttggagttgtggatgtgactagagctatgaagatgaggagagatgggcatcctgggtctcattgggataacaaatggatgaaaggttacaatgattgtacacattggtgcatgcctgggcctgtggattattggaaccatttttttgatggcagctatgagaaagatg

SEQ ID NO: 215498 - DNA, 855 bp, Cannabis indica
caatcatgcccttaagtcataaacttaattccaaatagactacataaattttaacttattttatttgatgacccaacacacattttattatacaattgtgaacccaataaacttctaacaacttatatatagtattatttttctacacattaacaatgtgagactaatgtacatttcatcttgaaagggagatagttgaattaataattacttttagttatattaattttagcttaattagtattttttcttttatttgacatgtaccaaattgtacattctgaattttttaaaccgttaaaaatttactccaaaactattaaaattgttgaattcaaagactttcatctaattcagttcaattttaacttatctttcttttaaataaattacagtataaataccatatgttttcagttttatacacctaaatatcataattttttttcgacagattaaatattaaaaattgtattttacttctttacaacattactattatgttagttataaaaaaaaaaagttttacactactattgaaatttttaacttttttatttgtttatagtagggcggaattttttttaaaaaatactgtataagtttatactatatactgtattaagttttcacggttgttttttagttgttccactattgttttaattgctctattttgttgttttacgattgttttatgaaaagacaatatttttgtaaaaaaattcatgagacaataaaattgtaaatttttacccaaaatccaatatttttgtacaagctcataaaatttaaaaaaaaaaacaattttatagatattcagtacttatacggttaaaaacattattgaatata

SEQ ID NO: 215499 - DNA, 693 bp, Cannabis indica
gaatcatattgataaagtacattatttactgcataacacataaataaaatatgattgagaagataaatttttagtgcaaaattaaatcatgcatcaatcaaatttacagtaattacctcaggtccaacaatatttagttattcgcatctcctttcaacgagagttctaatagccaaatcaagagcaatgaaaacaaattaaatataaattctaatagccaagctgagttgagcaaatcaagaagacctaaatataaattctcaattatcatcaaaagtcaattaaaaaaacaattaaatatatatttattgagattagaccctcaatatctctgtcgtcaagaactgaataataacagagtaaattcacttgatagatcaaaattcaaaaaaaaaaggagtctaggaacttatatcatggtactgcattttcaattagggcaatcatcatgcaattaaatataaaatactaaccatccaatctaaactgagatgttgagtaaacaacaccttccatggtattttgaagtataaaatgatctcttgcactaacgtgatgatcaacatagttactgcaagacgtcacttgtcagtaattaaggttgtttcgcatgagtgtaatgagctaaactgacactttattatcaatttcagataagaaagaactaacccccctgaaattcattatctggga

SEQ ID NO: 215500 - DNA, 919 bp, Cannabis indica
ggagaagaataacctgatctgagaaacaagaccagaaagggcagagtagcttgccaatcaccgttaactttagaaactaaatttaaacaatctgagaagatgaatgctggctgcaactgagagtcaatacaccaagatataccctccaacaaggcttgaccctcagcaaaatgggagtggaagcacctagcaagagacgattttcggaagccacaatctcatgatgaccaatcttgaaggtgaaaccaatccctgttaaaccgttgttatggtctaaagctgcgtcaacataaagagctggggagtcctcctgaaagtagtcgactgaaaacaattggggatataattatatccccaatttgctaaacactttttgaatataattatatgcacactagtagttaatataatgtcttataattaattagtagttttttatattatttattaaattaaaatatgtagaactttatattaaaatgtacgaataaggatatgacacctcttgtggtgtttagcaccttaatttttttttttttttttagaaatagcatttctcatcttgatttcattaatcatgtttaaataaataatatatgttcatttcttgaagctgagcctatataattttttttttattattatttattaataagtaaagcttttttaaaaaaaaaaacaaataactaataaaaatttatttatataaaagaataataatacaaaagtgattaataatatataaacggtcgtataatcttttgggctatttttttattaataagtaaataaataaaaaaaaaattaataaaaaatgagcaaacaaaaatacaagagaacaaagagttacaaaaattacacaaactaaaagaaaaagataactttttaaaaaaagtaagaaaaaattaaaaaagaaaga

SEQ ID NO: 215501 - DNA, 643 bp, Cannabis indica
cctgtttcttatttatgtctccattcctgacctgcttaattagattccggataggagaaaggtaagaagatttattgggtattaattaagattaaaacaataacaataagaaaaaaagaatgtaatataattcaaaataaaaataaaaaccaaaatattggctgtaaaataaataaatatttacctattaaaaattacactgtaaaattaaagaagattaataaaaaggtaaagtttgaaaattatatatttgagtcaaatatgaaacagatagtatcactcctaaacttgtacctgtgggtccctatcccaattagacactctaattttaataccccatgagaattagggtttattaataaaaaaaaatcattttctcgtgtattatttagttaaaaaacattggtactttatagtaatataccacatagtaccataagcaatgtcgaacattttgcagttttgtatttttgcccatatttagataatgctaaaaccaattttgtaaaaagaatgggagccattggtaaatttggacaaaaccaatatttggataatgctaaaatcaattacattggtgagatgtacttctttcccttttctcccttaaatcaatttagatatattggttaatttgtataaa

SEQ ID NO: 215502 - DNA, 843 bp, Cannabis indica
atagattaaactaaaaaatgttatgtttacttaatcaatctacattttttgataaaagtaaatatattcaagtttcttcccgaaagatttagtatttattatatttttacagattacaatttttaatatatatttttaatatctaaatgaattttctaataaatataaataacttttatgtcgcgtaattagtttaaatttaatttattttaaatttctaatcattcaaaataattttcttaagatctaaattaatttttaaaatttactaaagaaaatattgaatctttcttatttttattttaaggttgtacgatttgatagttgtcaaagtttaggggacaaaaattgctaattgacaaagtcacgttattatttaaacggaataataagacggagcctaatagaaggactaaatttatgtaaatgtaatagtttagggggattcttagcaagccttatattttaagggccaaaattaatattgtcgaatgtttagaagaaaaaattgctaattattctatattttttatactcatttatgtgaggagttaaaaacttatgagaaaagtttgtgaaatttggagagccaaaacacaaaagctgaaaaaatagtactaaaggtactaagtgctaggcgatacatcgcttagtgtgtgggggcttatattgtttaccctgactctgccacaatatcatttaagacttctacaaagtcttttcctcggttccaattgcatggtagctcttacatcttcaatcatctttaatcattttaaaactaaactaatgctctatgacaatcatgtagtgtgtagagtttgaatttcaatttttttttta

SEQ ID NO: 215503 - DNA, 627 bp, Cannabis indica
ttcaactccctgtagtagtcttatcaactcagttaaggtatggtcatccgtggtagctcttcttccccccgttgagcgtgtggctgccccgcctcgcccatactcaccattactgcccctcgggtgtttctttcgttggccgagcggttgtcagtcctattatgaggctgtacagctggtgtccggttctttgattcgaaaagaaaagtatctcccaacgacgaggtttcgcgcgacactttctcactgtgtcatttttcttctacttccaaggccacgtatactttttccatagatagagcccttgtgagggacaggccaggttccactactatcgccttctttaattgtgaaccatgtatcaacccttgcattaacgctttcgttgccactgaatcggtgcatttcgagatacagacgtattctttgctaaatctgtggataaaattttccagaggttcgtcgaggcgctggtgtattagcattaggtccgtatccactttagcagtccgcacacttatcgcaaagtttgtctagaatctcaagatgagatcctggtacgaatttattgtgccggatgcttggttgtggagctaacgtacagcgggtcctctcaacccttgcgtg

SEQ ID NO: 215504 - DNA, 516 bp, Cannabis indica
cattttagaaactgttaagatagtccatgcaattaaaagtattgacatttaattacattttttacatgtcattaaataacatattataacattattttggtattatatattataaatagttaatattaatttagtgttatggttcattatgttattacatttattaataacattttcaaaatgtaaccatatagattttaattacatttttattatgctatctatgagaaaatattacatttttatgttgttgtaagtacttaataataactattttttaatgttatcatttctcttatgttatattcatttattaataacatttttaaaatgtaatcttataattataattacattattattatattatatattaagaaatattacattttaatattactataatttctataataacactttgttaatattatttttattctttgctcaaataatgtaattacaatttaatagaatttaatatattttgtacattatcaaaatatccaatacatg

SEQ ID NO: 215505 - DNA, 520 bp, Cannabis indica
aattttgagctttataatttgtgatttaactccctattgtagttgtttaattttgtaagaggttatggtagtcggatcgtttgaacatcagcgggacaatggatgcaatgaaggaactctgaattatcaaacaatcaaggtgttaacaaagtgtcgtcgtcggagtgttcctaacacgaagggtcctcccagggaggaatccccgatggggagatccttgcaggtcccttctcatagggttctccttccaaggaccttctagcagagggtctccacaagtccctccttgcagggggccttctcgcggtttttgaactccgccttcctccgacttcaagtggagaacctttctcgcgcagattctcttgataacatcttcaaataagatgagagggaatctattatcataaatattcttttctttcaatcatgaatttcatcaacaatataacctctaaaaactgtcgtatgctatttttattcaatattcaatttttttcatatttattatttttctata

SEQ ID NO: 215506 - DNA, 663 bp, Cannabis indica
ttccaaaaagcctcatagtaataaggataatgtctatccttatatacccatgattctttctatttctagccaacatagaattttggttgaacacccaacatattttatcattgtgaaaatatttttctctatttgtttctgagttaaatctgcagtccaaacaatacttgaaacctaaacagtaaagctacttcaaaacaatgtcccaatagttttgttcaacatatacaattcttacacctttatacaaccccatgaaccaataaaatgaagccatcatattaataagcttagcaaatctagtaactaacttcatttactagtaagttacaagcaagaggcagcaatatttattggatggcctattattttaacttattttggatttgtttgctatttattcattttaagaagtttaacttacaggtattacttctaatgagagtccatcacagaaacttgactagtctcattggatattgcattgaagacaattgcatggcacttatctacgagtacatgtccaatggaaacttgaagcaacatctctcaggttcataatttttcattcagctaaattaacaataaagttgagtttatttcaagtccgtaattataaataaaaacaacaggaaatgattttttttttaaatattttccaat

SEQ ID NO: 215507 - DNA, 609 bp, Cannabis indica
ataatatatataaagtacttaatcaaaataaaataaacatatataaggaaaaaaaaaattaggtaaattgagatttttgctcttaatttttcaagttgttaaaaaattcttcttgaactattgagattgtttgattcaatgacttttatcaaattccgttcaattttactaacatgacgaatttttcatttttgttcatatatattttatttcttttcaataaaaaatatatttttcattcatagtatacttttcaaaaaaaaaaaaaaaaactagtcccagcccactaacaaatgtggctaacatgtgtcaagcatccattagtaaaatttgactaaagaccttcaatccacgcaatcttaataatttgaagaaaattttgaatgacctaaaaattaggaacaagaattttaatatcattagccaaaaaattatgtagatttattttaatattattaagtgatacaatattaatacacatttagtttaaccatgtaattaatgatttcctaagtaatataaattacaaatctttaaccctaacacaacccattaggagtatcagtatccataattaccactatcacaagaattggtaaccaatagaaa

SEQ ID NO: 215508 - DNA, 950 bp, Cannabis indica
ttttagaaagttgttgatgacttaagtaggtgcttttttatccttctaagtcttggttgcgcatgggttgggttggccgggtagagactattttaatgggccaatccaataaaatcggtttattaaattctaacccattcattttaaattttatgtataacccaaccctaaccacgcctatgcccaaggctggacctagatgcgagtttgatcaaaaggacagtgcaccctcgtgttgtttgtttagtctcatgtaccaagcggttcttatttagtgatgtgtttatgtctagatcattttgtttgatttttttgttttttgctaaatgatcattttctctagttgtttgaggtttcctcattgtttaaaagttgggtatatatatttttttcggagttctccgttttagttgtaaaaatagcgattatatagttttttttttgaaaacaagcgtaggattatattataataagaaagctagacctcatggtcgttacataaaatgtttgcaggtacagaattgatcgggatcgatccataaacttggtgggtaaaagcccacttagcgacattatgagccgcaaaattactgttcctactaatattagaaaaggtacaacacatgaaagaaggagaagacttagtacaaaaggagacataattctcaaggccccaatgggacgccttcccattgagcgcattgattactatgctcgagtcactctccacaataacataattaaactttaaatctagagctactgacaccgctaagcaacaggccgccgcttctccgtacagagcttccgagaaatccaatcgggacgtgtgtatagaaatccaaccgggacgtgtgtatatatagcaccttatattttgttatgttggctttatatgtcctttttttttttgttaggtttccctttattgttatcattgttaatttggt

SEQ ID NO: 215509 - DNA, 1006 bp, Cannabis indica
atatatctatatatatatatgcatgagtttttatgtttttgaataaatttattaagaatttaattagttaatattacataatgcacatgctagttagaataataaataattttggttttacacataaattatggagcattattgttatttgtcgggctagagcgcatattgttattaggtattttaagatttttaatagacgtattttttatattattattattcaaaaaaaaaaaataattgtaagactcaatttagaattggaccaaaaaaaagtagtatttgaaatcttactttttaacatttttctatttttgttaatattacaaatttattgagattaatttaatatgtgttaaattagtttaaaatatttcaaattaaataagtaatattaaaatgaaaaactatgataattagtagtatatttcattgccacttattatattcatgtgttcatatgttattttaaagataagatgatatatataatttaatattaaattttatatattttaatttactaaataatataaaaaactattaaatagttattataaattgaggaaagtactaaattatattgtcaaatagtattgatttgaacacaaggtcttttaatttagaacctaaaattggtatgttatagggagatcaagcatcaataattggtggagccatagagttcgtaagagaattagagcaacttcttcaatgtttggaatcacaaaagcgaagaagactagtaggagatcaacctccgccacctagacagcaactcggatcagctgatcagggtggcggtggtagtactggtggagtccctatagttccaggggctgcaccagggttttttcctctagccaataacgatcaaatgatgatgatgaatagtaataataagtttgtggccggagacttcgaaatcaaccccgccaacagtggtggcgggcttcgagaagagatggccgaaaacaaatcttgcttggcggatgttgaagtgaag

SEQ ID NO: 215510 - DNA, 815 bp, Cannabis indica
tctctctctctctctctcgacatggccatgacgagctgcactcgttcgacaaaaggcctatatggaagccatggctgacctccacgagcctcgaaaaccataaggcatgcggtcctcgaactttctcgtccttcatcgtattcgggatggaataactcgctagggccgagatatctcaaattatatttgagcaactcagtatatcgttattagtgtataacaccctcctaggggttataccactattagtatcagttaactaattgtaaggtgtcacctttaggtggtattagacactactagtgtccaataacaatactctattttttaagaccatgcttgaaagttcgattccggtgagtaaattaaaaaaaaaataagtaaaatatagaaaaagaaaaagtgtaagtgcaaaaatgtgactataatggtaaatattaaaagaacttataactaataaagtgtgaactactcaatggttatattaaaaatgtaactatgatggttatatttcttataacctgctataatgagttgataacaggtaagtattttatatttaaattaatttttttaattaaaataaataagactctttcaataattaatatgtatataataattttatttattatatttaagtctctattataatttttttactaaaaaatcatttatttaattataatatttacgataaaaattgttattttcccatagaagttaaatttatactctttgtaaataaatttgttaaataattaattatttttaaaattaaatttaaactaagttaaaaacaacacaaaaaaagt

SEQ ID NO: 215511 - DNA, 590 bp, Cannabis indica
cgtgtcaaagcaatctccattaacaccataataaaaagtactagctactcataatcattaaaaatatctgataacaatttaaagcataagaaaaacagaggattaggaagaactcttcaaaaaataaatattcaaagtctttagagctgcttctcgctatatagctaaaaaagataaaaaaaaaaaacctaatttttcgtagtttataataggcgggccgcgacactatcttgtagtaccgtggcgtgtcacgggctcaccttgtcaggtagcataacacccgtgcggtaccttgacttctctatgtcaaggtcagcctttcaaccatctcagtaataatgggctcatttttcacgcgaccgtgtgcctcgtgcacactttcgtctctcgaacaactcctgtcgagtcatgctcacaagcatccatgagtccatccatgcatcgaggctctctagccagaatactcacattgtctataggttcccactatgataagataaatccaaacaccgtcgctcacctaatcacttgtgaccaaggtagcatgtgtggcaatatcccaacactaaactgacgtgccaacacttcta

SEQ ID NO: 215512 - DNA, 624 bp, Cannabis indica
gacctagagttttctgtgtggaattcgttaaacgtgtaaaaaaaaactgttttgaagtgtaaaaataaaaaactttttattttattaattgataaattagattatgtattttttaaaataatacaaaataatattttgtgctgatttttatcacaataaaagttaataataactcgatctatagttattatgataaaattaagtacattttctacatctgttcgtgttaaaaaatatcttcaagttggttatattaaaaaaattgaactcagagtactattttgtaccatagaaaatacagggtcaatttatcattttacaaaatagaaggtttaaaattaataacttttgcaaaatacatgattgagggctcgtttgatacgtcgtattgtgttgtattctattaatactatgtttagtattgacttatattaatagattatataaagttataatatatttcaatacactcgatcctaacaccgactatgggtcaagtcccgaatttgggtttgggtcccaagttcgggtttaagttcaggttcaggtctaggtccgagtctgggtccaggtccaggattgggtttgggattgaggtgcgggtctcgggtctgggactagtcc

SEQ ID NO: 215513 - DNA, 564 bp, Cannabis indica
gtttgttggaatcccgacagaagccaattgggataaggattaccaccccgtttgtcatcatgacttagaacattgtggaggtcacctataatacaccaggtcaaagcagattcagaggacaaatctctaagtaaatcccaagtttaacgtctgagatgccgattaggttcaccatacatccccgtcaaccgccaagagggagtatcagaaacaatgattttcaaatcaatatgcgagtttgaaaatcccattaaactagcttcatctccaaatctccatagagaagccaaaccaccactatgaccttgcacatcaaccacaaataagccttcaaagcccaacaaaatacgaactctctccatgtaatctcttttactaagagtatcacgtaataatataaaattggatctcttgtggattactaaatccttaaggaattgaaaagcgcatgggttcccaagcccatggcaattccaactaagtaagctcataattcttggtgggcctagaaactagagcccacctgaaaaattgttttttgtccctcaacaatatcattattta

SEQ ID NO: 215514 - DNA, 504 bp, Cannabis indica
ttagttgtctcccagaagtgttcccggaaggctaacttgtccatccggtagtagtctcgtagaatgataattatcatttggaagggctttcccgaatttctattatgtccaattggatagaattttctccggttgactacctttttccatcgaggaagagagtcccagatagtcaactccagatggctcttttccgatccaagaagtcccttcagcatacacttcgatcctctttccgagaagcgtatgtctcattcagaagcacccttgtcttatgttggcatggagactctgttttgagaagattgttatgtcgtaactaacttaataacttagcatgtacagccaccgactttaggatccatattctagatctataaataacacccacacttatcattttaggtatgctaaattgacgagtttcacgaggagctttgagtttgagagagaaagagattgagaagtagaaagataggttcagagaaaagagagagagagaga

SEQ ID NO: 215515 - DNA, 515 bp, Cannabis indica
ataaaattatgtgggactcaatacgattctattagtgatataatatcttaaaagtgctagataatataagtgccttttaacatttctcataatatatttttctattctagtcttggcaattgtccaccctaaaatttaagatctttatgtatgtatttataagaaatttctaaggtgaggcattaaaaaaaatcccatctgtagggcatttaatgtaaacttttagttcattaattgcttttgtttttggataaaaaaaaaaaaaaaacgactttagttgaagattagattgagtctattttaatatatactatagtaatattaatttttaaattactgaatatatattttctttctttggaaatcatcaagattggttaatgtttaatgtcaataaacactcactataatatcaatataagacctaagtgttctcacacaatatcaatataaaactttactaaccgctgcatgtacaatattctttgtccttatacatgtataagtaacgtcgt

SEQ ID NO: 215516 - DNA, 517 bp, Cannabis indica
atgcaatctatgacagcattttcaatggtcccattgattatggaataatctttcacaatttaagtttaactgggatgtatattatcaataagttaaattatattgttcctcctaattgtttattcaaccctcttaaatgataaaggacattaatgacaaacacgaaaattgataattcttcctctaatctcaatttttgcttagtatgttgtggaggcttgaactccccaacaagaaccaacacaacaccaagaataacacacaatgatcaagaacacattcaacataaaaccagcaacataaaccagaacttaaaaccagtaaaacaacttaaagaaagtagtaaaagacaaatagaacttacgtggttgggctacacaatcaatgtgatcatgagcttaatccacgggagaaagcaaccttaatcatggctgtggtgatgagttttattgatctgaacatatgtacaaaacagggataaaacctttgaaacaaaatggagtcttgctccttacaa

SEQ ID NO: 215517 - DNA, 1248 bp, Cannabis indica
gaaagctaaacctgccaaggacttggccatatttgcagaaaactacttgcatgattttcgatcggcacaagcaaaatacaactctaaaaccaacgctccaacctagccactttcttcagctgctaaaccagtcccgtggtcacctccaatgcttggaaacctcaagttaaatgctgatgcaacagtcgattcaacaaaaaaagtaattggcgtgggggctgttattcgtgactccttcggcaatgtaaaagctgccctttcaaaattggtcgttggtaactttgtagctcacgaaatggaggccttggcgatgtttcatagcttaaattgggcacttcaactccatttgccaattgctcaagtggaaacggatgctcttctagtctccaatgctctatgcaaaccttcatctgctttgtccaagatttaattgtcgttagtcttctatccttttgcctaatgtgaaagttactcatgtcaaacgtacaactaatatagctgctcacgagttggcaaaatttactttaggggtggatgaagcttgctttcgatcagattgtattcccccgtataaactttgttgttgtaaaatgatgtactatcttaatttataatagcaaattttattacttaaaaaaaaaaaaaaatccttcctatatgtatggcttcacctttgatattataaagcatgaaaaaatgggcatgtgggaaagagttgtgcttgtaataagttataacaacatattaatccaaaaaattcgccttgataaagcttaattttaccacaacaaaaataacagaaaacaaaaacacatccaatactatcacacaaattaagatagctaattcatgacataataatcaagcaaaaggtaattaataatttaatgcttcaattattatgatatatatgcatatgactacatgatagaacaaccatgagggttttcatcactaaaagccgcaccagtttggtggccaaagatagcagtagtggaggcagatccgcgggcaggattatagtagtgagtgcggtcatgatgattatcgtagccatgtttgtagtagttgtaagaagaaggctgcggtgcgtagtgtgggactgggccagtgatttggtgttggttgataatactgtaatcatcagggtggtacggcagctgccacagctcggctcgctttcccgtcttcctcaccgcctttagaatcttcttctgatcggcgtaaccagtcaccgtcaccttctgc

SEQ ID NO: 215518 - DNA, 1070 bp, Cannabis indica
tttatttttttataaaaaatttagtttcttttgtgagctaattttgaattgatatatcatccaaaagtaatagagatctcagaaaatagtcatcttataatagtaaacagaatatgtaatcttcgaatcagccaaactcctttaagaaattcctaatttcttttattttcatttataattaaccttacatattatagtacattatgacaatcctatcatatttctcataatgtaatatttacggtatgtttgggtgtaactgtatgattattagggagtgtaattatttgatggtaattacacaatttagtaattacgctatatttttaaatacaaagtgtttttacatatgagatggtaattacatataaatttataatatcttatttgataaaataattaactattatacatgaaaataatattttttaatagttaatatttaaaattgatttttttttaataattacacagtataagtatagttacacttaatttttatggaaattatgagaattagaaagtataattgtaactatcaattacctcaaatcatacttatagtgtaattacagtcaaataaacatacaaaatttaattacttttaattatacacaaatctaattacacgtatgaacttcactcacttaacaaaattgtttttaatttttaaatatattcatctatcagtaaatatgatttatccaaagtaataaagttttacatttatctccatctataatactttccacttacattcgaacacacgttattgtcaatcttatcaccatatctaaatcttaatatttaaaatctaaaaaaacttacacaaaaataaaataaattaaaaattactaatctaatctaaaaaaaaataagttcatttagatgagtaatcatattccaataccaaacacacagtggtgattggtccacccacttttttttagtcaaaaactagtttattcaataaaaacaattctagcttcaacaacagatataagttcaagaggaacatttcgctcactaaaaataacaatctgaagataaacaagaacgctcgtgcaaca

SEQ ID NO: 215519 - DNA, 781 bp, Cannabis indica
tcctgagagggagctggtctgtcacttgatccctatttgagtgtcggggtcttcatttgctcaggtgttgacttggcttttcttttagtgagctgagcttccatgtggcactcgttctgtccacgtaggcatgccacatcatgaggaaagaaattaagttaacatttgccccaagtccctgtgtcgacatctgtatggatagggactttaccagctatattgatgttgtcgggactgttgttgcctttgctgaataaaagttgatatgtttgttgaagcactctgtcttgactgtctaatctcattgcaatagagaaataactgctttaattgcctttatgatgtgttggtgaggtaagtgagaaaaaaggggcccaaatgtaatacataagagacattggggagaagacattttttcccttctcattttttacttttattttctctcacaagaaattttctcaaggaagagcttctccttctctctaggttgccaaaaccacaagcttcattatcctagggatttttgtgctatttcaactatccaagcttcccaccttcatcttcatcaaaatcttgtagtgggtaagctttctatccctactccttcacttggtttgattgatttttccatgaatgcatgaacattgtttcttgtttttgaacatgctttgattcttacgttatattgtagtccattaggtatttcgatctttatgatggccttatgatagacaatatgtgatttctagatgaaaaagaactgaacctgacttttgtt

SEQ ID NO: 215520 - DNA, 563 bp, Cannabis indica
gtattgtacaccttaagaccttaaggttaagtgatatatatataagtaaggtgatatatatatattgagagaatatgtatatatatttaatacaacttgaaatacggattgatgatgtacacattcttaactagtaatgtatttgaaaagtcaagccatgaaaagtagaaaaaaggaaacaaatgggtaattatactagttacaaacacataatatatatattaagatcagagcttgatgatattagaagaaaaatactatatggtattaatggtgtgtagtaccatttaacgtgaacatatctctattgaatgtaataactttaataaaatatatttaaccactattaagctatcactaacacttaaaagcaattttcatatataaaaaaatatatatttatactgctgcatgtacacatgcatatatgtcaaccatgcacattgcatgcatatctcctataatagtgcatgtgaccagtagtggaaactatagtatgaacgaatgagatgagaatatatatatatatatatatatatatatatatatatagtgacgagacg

SEQ ID NO: 215521 - DNA, 627 bp, Cannabis indica
gtctatgttgaggaagtacaccgtagatctgtcacatgtcattgagtatgaggctatcccttttcaggaagatgtgacttatgaagaacaacctgtaaaaatctgggccagagagctaaaagtgttaaggaatagagagattctagtagtcaaggtcttatggaaatcacaaagaagacgaggctacttgagagatagtgtctgagatgtatatgaagtaccctcacttgtttaattttcaacttgaggttgtactttgaaatatttggacaaaatttctttaagaagaggagaatgtaaagactgaccgagtcaaaaagagaaagataaatatatatatatatgcataatcaataaataaatatatatgtataaaaaataaaatagaaccccctgcttcgtcatctctctctctctctagaccacacaagaagccataaccaccaccactttccagtgacgttttgtagctccgcccctttccggtgatatcgtgtactattttgacaaacggttgggatgggtgtgatctactagtcgaggtagtcgttttaatatataatacccctatttttggtgatgttttcggtataccattttctaccgtcactgatagttaatgtgcac

SEQ ID NO: 215522 - DNA, 542 bp, Cannabis indica
ggtattatctttccacatattatcaatgtgcgtgcgactctctaacatttcttttcaatatggaagttattttttgctcaccaattttggatggctcgttcacagcaagcggcacttttttcgctcttttttaaattagcgatacttttggctcacatcggttcttttgactcgtctttttggacccattattagtaaggctgagcatgagttgggttggccagattgaaggtaatttaataacccaatccaatggcatcgatctagacattttcaacccattcacatcctcaattttttctaacccaatccattttttttctttgtgagttgggttgggttataactcttatatcatataacaaaaactattcatgttttaatataattgaattttgaaaaaaaaaatgatcaaaagttcaaacataaacatataatccatcaaatgttaaacaatattacaatcaaccgaaattaataatattaaaatattaaaattattcataacaaacttgccagtaagaattagaatagttattatt

SEQ ID NO: 215523 - DNA, 501 bp, Cannabis indica
atattttctaaaaattattatatgctgaagaacatgtaaagcaccacattgttacttcggctactttagtagcatatgtctaaattacaacatttgtcaataataataattaatagtataaaagtacaaaaatatttatgaagatctcttattataaaaatgttgttagtactacggtgattttatgtttatttgtttattatcatgtgtatatatatagatttggaaaaaaggtggacaggctagaatagttagcaattatatttagaagaagaaaaagaaacatcactttgtttgatttttctattaacccaccattcaatttatttggccatttaatttataattttatactttcttaataatattctaaattattagtggaatctacttattaaactactgagtttaagaacataaaaaataaaaaaatgacaaaaagaaaaaagaaaatgcaattaaagaatttttttgctatgttttaattgattcctactaaaa

SEQ ID NO: 215524 - DNA, 586 bp, Cannabis indica
acaccccgaatcaaatttttgttttctcccaaattttgcaatgagtactttataaaatacaaccgttagcacatgcttctagggcacaataacacgtatttaggcattaaatgcatcaaatatttgaaaaaagatttaaaatgacaacctatattttcatgattagctaactaggaagtttctgtgtagatttggaggataaatgttatcttgaattttgtttggatgatgtggcacatttctttggatgacacgcatcatcacatcaagccttgggtagagaaaagagcctcatggagtgtctgcctaagacatatactcaattggatgtaataacagacgagcaaggtaaagctcactgcatggacggaatgtaagctgacttggtcggatagaagtaattagaaacttgtttgatctgaccagagagaaaatgcacgacaggatgcattaaagatagtttctcattttaaatgtagtcaaatcctgatttaaagggattttcatatatatttcttataatttaagaatgtcatttattcactatttttgtggattgatagtgtgatacccggaattaagaaaa

SEQ ID NO: 215525 - DNA, 512 bp, Cannabis indica
taactgattttgagcttcctaatcgggatatctagatcgattttccagtcttctagttcttatacttggcccaacattttcgtatttttcccccaagtcggggatccatgtccttatccccgccttgggtaacttcctattgggtgatactttttcccttgtctgaactctggtcagaggtactttccttcgtgaccttagatagagcaagattatagcattctcgtgcagttctttgttttcctttaagacagcccaccccacttttagtcgagaacttgatgcgcagatgaaaagctaatgtgacagcttttaaatcatatagggctggtccgcctaccaagacatttaaagctgatgggtcatcaattaccaggaattgtgccattacagttatgctcctttgaacttgtctaatagtaagtggtaggcagaaatgtccaaggggtgcaatactctagctggagaactcgtatatgagctgagtgtaagggattaagtctttaagttgg

SEQ ID NO: 215526 - DNA, 710 bp, Cannabis indica
cacaagtttatacaaaaattttaaaaaatagacacacttttatattaatactcataataccctctcccttctcttctctcctaacttcaccattcatacttccccattcttatccatattgatgggtgttcgatggtggctcgatgcttacttattttttttttttatgtttttaataataaaaaaaaatagtagcatcagcctaccatcagaccatattctaaatttataaatgttaagctctattcatcaaactcgccaagaagacatcaagccaccatcagaccactaacaaactaccatcaaaccatatcctacatttataggtaggatcgggtcaccactggactttcgtcttcaacctttactcattttaacaatagaaagacatcagactaccatcagacctggcaaagacactagttttttgctcaaaactcagtttcgaccattttttaccctaaatctaacatcaactcacagataatagacattaattatacaatttattattttgacaacattatcaatggagaagtcgtggttgatggagaagttgttgacaacattatcaatggagaagtcgtggttgtgggtcgagttcttggggtgatgtattcagagagcgagagagaagagagaaagagagaggattaggagtttgaaataggagaagtaaaattaagtttttatgaagtattaacctcttc

SEQ ID NO: 215527 - DNA, 830 bp, Cannabis indica
ggataagtattataaattttttggggaattaattatcctatatattattttttatttttttttaatttacggtttgggtttctaaagtggtcgtagtaggggtttctgtactattttttgttacaatttaggttgtagcgctagttgcaataggggtttccatgcctaattccgtaaaaatacaaaaaaaaaaaaaaaattattttggagtgtaaaaatgaaaaagtccctaaatttttttacttttttaattattgtgagtaaaaataaaaaaaaattgtaattaattataaatcatcattattaatgtggtgaattaaaggttcgtagctaaatgtattaatcacaaaaatacaatttattgtgactaaatgtatttttaatcacaatatacttgttgtgactaaaagtaaattagtgacaacttatatctaaataatatattttagtttggtagttgttcaacactttttttttttttatgaattcaaaacaacctctgttttgattgattctggtcgtcttctcaggtgaagtcgccagaattaatgacatttatctttctagttgaattttcgtttcggttgcgttaggttgctgcgtagttgcgcgatggttgcacgatagttgcccaggaagcatggatcctgggttgaaggtgtgtgtaagtggtatttgtgtaatttttttttatttaggttgtatatttgtttatttggccagctagaagtatttttgtaatattgttatattttttggttaaaactgaaaaagaaaccctaaaactaaagcagattaaaacaactaagaaaaaatattttcattttact

SEQ ID NO: 215528 - DNA, 517 bp, Cannabis indica
aggtgacatgggaggtgacatggaagaggtcttgattgatatttttgataaatttgtaactttctcttctctattttagagtaagacagactaagtttagactttatagcatttataaagaaagtttttgcttagactatttttgtttagtaaacatgaaagaagataagaggaggaaatgattttattttgtttagtgagaaggaaaccgctaaggattgccaatttcttatgcccactacaaacaattcggaacaaagaatatccaattctctctaatggaagacctatttcattaatgttcactaagctaaaaaaaaatactcgtaatatatatagaaaaataaattaaaaaacaaaagaaactcaacaatgggattaatgtactctttaagattgtaaaagagaaccagaacagaaaatatattggttggtatatgtataaaaccaaaacaagaatgggtaggttttttgcttttctctcactcaataatatccaagaccactacagcttgaa

SEQ ID NO: 215529 - DNA, 783 bp, Cannabis indica
aaaggaaataattaagtattaatttatttcaatatgtttatgactctctttaatattttcgttgtgatatttgattttagatggtattattattaggccatcattttccggctggagcgtgttactccttgctttctggattcatattagctgtcagcaacgtgggttactgacacgtgccccctcttttcatctattgctaggcttcgtattatatttcaatcccgtttattttattagagcgagttcacggcgtttctccatcctccacaatccacgtgtgtcgtaatatattgatgagaaatgactaatttgccactggaaaggtgattatcttttgtccactacataactatgcgcctttgtaatgagagggtatgttagtacttttagctattttgcttaattgattagtgatatatttgtagtatgtacggataacacattatagtttattttccctttcaaaacagttgggtcaaatattattaaaacaattaatgaaaaacaatgctgagaaaatttatgaggaataggatagatatgagtagtagcattcaataaaagctgggatcaataatagagtctggtgtttgcggaaatatgggagcattaattcattaaaaagttttcttcgatttaatataattttcaagataagtttttcatattaaaattataaataaatataaggatatcaataaatattatttgcacataaatattaaatgaaaacaaagtgcaaagatatacttattttattttttttaaaaaaatattaat

SEQ ID NO: 215530 - DNA, 633 bp, Cannabis indica
aaaccaaacacaataattctgatacaatattcattctaactacaaaccaaacattataattaattcttaccattcttattccattacattactattactattatcattacaccaaaccaaacactactttacattctcataccaaattaaatacgatataattttgattataatatttatttcaactacaaactaaacattataatcaattcctactatttttattccattacattaccattatcattttattataccatactaaacatcactttagggtttctctttcaatactggttaaatgagtgactttattaaggcatacgaacttttaaatatggcaatagttaagccacgtacacatgcatgatagatgagataagacaatttaattcatttatttgggttatataatatgatgaagaaattggtacatatgtacaaatatatattatgtaacatatttcatagacctctccctattacaacgacctagagtctggaccatttgaaatcaattaatatttatttatagagcatgcaatgcatggcttcgattggcctcaacaaatgaggacatttcgtttactcaaataaaaaaaaatgatttcaaaaaaaattaaaagaaaaaaa

SEQ ID NO: 215531 - DNA, 547 bp, Cannabis indica
atgatcaattaacaaacaaaatgtgcagagtagagtagagtagaaaattaacttacaagtttaaagctcgataataattcaatcctccagtgaagcccttttgtttgaacttttcaacaaaataatcgaggtcctgttgtgagagccaaaagggtaattctggagctttaaggcctttgaatcctatttctctaggcacacatggtggacttggattcctaccaccataaaatttctttaggatatttgctatgtcatcacctgcaaagtcttcttccgcctcacccggttcctaaatcacaaatacaattcaacccaatagaatacaaatatgttcttatgattatcatttcattttaaataatatatgcaccaataatagtacatagctttttaaggacaccaagtattattattatttttttgttgaaggatataacttaaaacaacttgtccacatgcatcttatatatgtatgatactatctttctacacattaacaataactttattatcgagatttcaatgtcccttaaaacatagttct

SEQ ID NO: 215532 - DNA, 927 bp, Cannabis indica
tgtgattattattttattcatatgttctttctattatttttttatcatttaccaattattaaatgcgtctaccaattatcctacaggaaaatcttatatatgcatgcaaaaataagaagaaaaaaaattagtttctaagttcaagaagctattgagtgaaggttcttggaaaagtatcaggtagtgacgtgacaatctataataactttattcttctctaataattttctcttttttcacattaaatattaattaattcaacaactaataaaaagctcttttttaaaaaaaaaaacaaacaacaaccttctacatatatattctattttttgaaaattaaatatttaattttgctcccttgattttttcttttttcttttttaaaaaaataaaataaaataaaataaatgatatttttgaatgaatatcacgttttgttttgctccatatattttttttttaaatttgaaatcaatgatattttttaataaatatctcattttacttggtataccattttgcttggtatctcattttgataaatagttggtttgccttatcattttataaaaataataataataataatatatttttgactttttggtttttttaatttatttactaaactttctttctctctctctctatatataaatatcctaaactatttcttttaaattcataattcactttactacttaccttctctctcattatgaaatattattttcttgccgacttgagtattcttttcttaccgacttaaatactgatacatatagttagagcataaagattagagtttgtagaatgtgagagtctcttagggtcagtttgacacagctgtgctgtgggaaaaagtagctgtaactgtgctgtgagaaaaagcagctgtggaaaaaagctgagctgagtgtttggtaa

SEQ ID NO: 215533 - DNA, 701 bp, Cannabis indica
ttcaattatttttatttatttttcacaaaactcttagttttttttaattgattctttattttttgataaagctaacacgaattgttatctattgtttcatattaaaaagaatcaagaaacatttacattaaaactttttatggaaatatcacatttaaaaataaaaagaaaattgaaattttgattattgaaattaatgtgaagaaaagaaagaatgggccatagatatgtaagtactgggcctgatagaaggggctgtgaaaatgaaagttttggggaatgtggcattattaggtatatggatctttctccctattctccctctacaatcttattatttcaataaataataaataataataataataataataataataataataataaaagtgattgacagttgagttgaaattgtaaaattatacaccaaattaatatgtaacaatttagtcaatattgaacggcacaatttaagtcttcaccccatataaacaagtcttctctctcaaaatatatttttccttagaaagttttagatttcatcttatgataatttagactttatattttaaaatagtacaaaataataattttaacttaatttaagttaaaataaaacttaataataatataaatttaaaatattattatatttttttaaaatgtattcatgttataaattgacttttaagttaatt

SEQ ID NO: 215534 - DNA, 557 bp, Cannabis indica
aaaaaaataacaaaatattatagagaaattaacctcacagacataaataaactaactaaaataaactataaaacaacaaaaaaacatttaaaaaaataatctcgcgacaaatataaataaattataaaataaaaaaaaatagcttattatttatactgaatattttttaaaaaaaaaaatttaaagtgtaaaaatataaatatttctatactgacatatttttgtaattttttttaattttttaatttattatgtaaacttttctttatatttatttgaaacaacaacaaccaatctttatagtataagaaactagcaaatatggacctttttgacatggtatgaaacaagaatgagctcaaaaggcacataaatgatcaagtatgaaaaattatatacttggacatgacaagagacgatgttacaaattggtaggacacgagacgaaaaatacaagtttgagcatgacacgacatgaaaatataagcttatgtatgacacgatatgacacgacaagcctaaaaaatatgactcgtaagtacggataatttatctaa

SEQ ID NO: 215535 - DNA, 881 bp, Cannabis indica
agcccccatgtgcttcttcagaaatgcaagattggagttctcacccccatccagtatttgtaaataaggaaatacttcccaaagcgcttggagggttccaagcatccctgcttgcatgagaaaaattgaaactccctttcgtttaacctgatgtacagggcaagggtcatgatgcaaccaatatacttctagaaacatgaacatttagaagttgagaattagcaatactaaaaacttacatattcaaactcagctttcccttcccatgcttcaaactcaagtgtatgttctcgagctcggaagtagtaatcccaagttacgacgatatggagttgcaaagacatatatatccatgcatgtccaactatgagctttgctcatctgcacaaaaaaaaaattaaatcaaagactactccctttgataaaatataacaaagtaactattgaagtaatggaaatcaaaagcttgaaaatgatacagaatgttcattctttattcaataaataaatacagtggtttatgctaatgagtttaagattttaagtattacaactagttggataacttgttaagtattcccaattaatcactaaagagatgaatagttcgaatctttgaatcagactaggggaaaagtcacgaccatagacgttgtacaatagaactgcttttacaaaattcaaaacagaattaaactgaaaagaagacaaaacactaaaaactggtatgtattcaaatatgacaaaccttgaaagacctcatcaatacaaataacaaaaacgaccaaaaaatattgagttcagggaaaagaaagttccaaaagtactccatattagaaaggggaaaataaaatataaaggactggaatagttataactaa

SEQ ID NO: 215536 - DNA, 1246 bp, Cannabis indica
gtaattttcttccagattttcaaaaatcataaaaaaaaaaatagtaaaaatatatgtaaatcaaccaaacaacaacaaataattatcaaaataattaagcaaacacattaaacaacatcaatttttttattaaaaaaaattagatttgttttttttgagtgaaaacccaaaatgtgtgggtatgaaaatccaaggagatcttcctcaatcgttgatattcaatgatttcactagatctcctcctcgattgttgatcctttctcgtcggcttcatggagatctacccacggtgatccgactgccatggtagaaaatcgaaaaaaatttctcgccgacgttaatggagatcagcccaaagttcctaatgggcattcatggatatcacaaaaaacttttacatctttggtggctgttaattttagatctccatcacttgattatttggtggagtgttgtctccaatggagaacaactcactttattttgctctatcaagaaggagaagctttttggggaagaagactcccgtattttgaaaaaagaaaaaactttagttttctaattaatttatttcacttatagtaataaaaatgtgaaattttatcctaataaggctatatatgaaaaaaccattttttttttaatttataatacttccattcagagttattctttttaatagtttcattagtttaggaatgaagaaggaatataaaatatggaaagaaaaaaaaaatgactgccatgtcatcaggtaataggttaaaataaaaaatattaattttttaaaattaattaataattgtaaatatcaaccatagatttaatgtaatggccaataataaaatacccatttataggtaatacccatttagagcatacacatctaataatatatttaattcaataattaaaaaataattaattaatttaatttaaattatttttataataaaataatcaaacaaaattaacatgggctttaatatgtcaccctacacgtgtgggccatattttacggtccaaaattaatttatcaattttactacaaataaatttttttatttattttgccaataaataattattaattaattctcattaatctcttattttacaaggattaaaataaatattattttcactaaaataatatatttttttccttaagaataatattacatttaacgaattaatatacttttatcaaataaaattagatagtaaatactatttaattatacaa

SEQ ID NO: 215537 - DNA, 642 bp, Cannabis indica
atatcgatattacatgttgtttacttatgtgttaggtaggttaaggatgtaactagtgtctattaaattttctttataccaatttattaaattaggtgttgccaacgaaactaaaagatgtaatttagaatgattttgttttgttttgtttttttttttaactatgttttattataattcactacaaacaaattttacttttagtcacaacaaaacttatgactaaaagtaaaaaaattgtgactaattataaattatcattcctatgttgtggctaaaaagtccgctaaaggtattagtcacaaaaattacaatttgttgtgactaaatgtatttttaatcacaatacttgttgtgactaaaactaaattagtgacaacttgtaactaaagactatattttagtcacaagtaatattttgttgtgactaaaaatcacatttagtcacaaaaaaattatgttgtgactaaaaagttgtcactaaaagtagcagttttttgtagtgattgtgtggttatagacatagtctagtttaatagtagtttattttagaaagaataaaaaatattaagagattatttagatcttctagatggagggtgctatagagattgtacatatttacttggagtaatgaaattc

SEQ ID NO: 215538 - DNA, 529 bp, Cannabis indica
gtactaagttgttggggaaactcagcctcccctctggttaatgcaaatactcgagctgagacaagtttgtcatccttgagttgatcacccttttgcggacagttcttcttatagtggtctggttgtctgcacttgtaactagtcttgcctttcagtcaacattctcctggatgcttacgactacatgttgggcatagggggtactccacatatggcttcttccctttatagatattggaccctatcttgtttcctgtcggcttcgttgtgttggttacttagaggtttccttttgttatcattacctccattaccggccttttggcctcccatctaaccgtattgtctttttgtatacaactttcacacaactcggcttctagggtttccagtacctcagcatacgtggttgcccttacccctgacatcgccatgtcccgacttattcgagagtcaagcccttcagtaaagcgatgaattctcataaactcagtaggaacaatatctgcaacaaactttgctaatctgt

SEQ ID NO: 215539 - DNA, 1232 bp, Cannabis indica
ttataaatattgacaaaaaaataggaagcttcaagagagcatcttttttctattatagaaagctattttttgtatggacggaactctttttttaagtctaactttttattatagctgaagagcgtgttcagagagcatggttgaaaatactacgtaaaaaatataatgaacgactaaagattgctttagtgagttccattttggtgaacttggtagattgcactcgacaagggtgtgagcaggacaaccatacatattttgcacataggcatgttgttagaagaacctctatttgtctttattaccaaaaaaaaaaaagaaaaaaaaacctctaccaattttcgtttgttaagagtagcccgcaaagtccttctacaggtgttgttaacgagatttgtaggtcgtttcgaattgattacaatgttaagaaaattttatttaacataaatcaatgttgctatgctttgtcatcattaacatataaagataactttatattacaaagtattataagatcttatggtttttatgccagcccattgcgcaagaaatttaatctttcttattttcttcttatgtatattgcccccattagagactcattattcctcttaaaagagattatacttgtaattttatcatgtgtcgtgtcatgtatgagaaaatatagtgatgtttctgtgagtgtttgagagataaaggagatgtgagatgtctgtaaacacctcaagctccatcttgctttctttttatttttcaattgtggagtaatgttgttcataaagatttctaacatttactaatattgaagtactttccaagtaaattttgttggtttatttgaatatataataagtcttaggaatatttttatttgatgctcaataattataacaaaaataagatcaagatgttgcagcaataaatttaagtcgcaattcaattcttaagagcgggccaacttttttttaaatagcaggcaaatttttatttatattcaaatatatgaataataaaataataatattcatatatcaaaattgttacacatttctatataaatattaatgatattcatatttatatagggcttttttcataaatgtacaacaaaaacaaaataattacaaaaaatgtgcaaaaaaaaattattttaaaaatttatacattttgaaaacttattacatgaaaccatacatttttaatatgtttattaaacctcaaaataaaca

SEQ ID NO: 215540 - DNA, 885 bp, Cannabis indica
tagtccacgagtcaatcttatttgatttctgatattattttagggcttttctcttatgatttttcgtcccccttttttagtctaacttgcctctatttataattacataatcaagcagttaaattacagagttgactgaaatctttacaataattatcccctgaaatcgtggggtttaattacatatgacgtatgataaatgcagttaatattcgaatatcacaaagctatgattagtccgcttttactgggtctaagaaaatcctgtattaaacacgttataaatcataacgttctgggatgtctcgatagaacccaggagctttcccatatcttttcgaggttgacaatataaattccgtcgctcctgcactgaagacataacgcttcatctgaaaatcacagttcttcggggacagggtgaacttcaatagtctacatcatttgaatgtcagcttctatttgagagaactgactcgacagagctgtgaatctcattgaaagatgcttggcgttgattagtgaaagtaccaagagtgtgccttcctatagcaagatagacacctcgctattggttgcttgggttcattcgactgttatactcagtttgaatattgtatattatacactaagtgtttttactgtcattatatcttgcttacatctactcatgcgtaacgaggttgacgtctcaccttccgcatccaatgtcgtatggtttcttgtcaatacatgaggcaacaatttgtatatctttatctcgcataagaccatatagtaagcaatttatacatatactctgttactttcgcatttaatgagttactccattaaatatgattaccattacacgcattgattaatatttttcccaatttgacacgt

SEQ ID NO: 215541 - DNA, 708 bp, Cannabis indica
tattattaagttaaattaattagactaaattaaaaataaaaaaaaaaaaacagttacacaataaaaaagttataattgccgtgtaacagtacaaaagaaataaaatgaagaaaaatcagtatagggtgtaaattttccttttttcaaagataagcaaaaagttgaaaaaaatatgtagtttagtgttaaagagagtcttacattgctagtacctactcttttttttatttgagagaaatatataatttattaagataaattcgctgttaccgaagaatttaaaaatcatggacaagcatctgtccaaatataatcccctaaactagtaataaaggttgtcagtatgtgggcaacaccattcgccaaatgcaaaatggcgctgcaagaattaccaccaacaacaactaataaagaatagatatataataaaatagactcaaaaataaaatttatttggagcttattaattcaactaattgtcttagtagaatcactattaataatggagataatcaaactaagttgaggcgcaagagtcaagcccagacgagtggcaagcagctctgccacattagcagaaaaatcacttaccacaactgatgaccaggctaaccaaaccacaccagctgcatcccgtatcactccccttaaccggacaaagcccttccccggaactaggacctgccctaggcatagcaggctaggccc

SEQ ID NO: 215542 - DNA, 723 bp, Cannabis indica
gaaactactatggcacaagaaatgaaatgaatttctctctcgcatatggagtatacacacactttcattaaatgctaaattttatttcattgtatagttaaattctactaaggagggattaacccaaagaattttttttgtagattttttttttgtttttcgttgaaggggattaaaataaagaagttgatttatgtatacatgttatctcaaataataaataactaataagtatcttttccaaaaaaaaaaacgacaaatgaatcaagaggtatgaactaatccaattcatgatttaggcacaatttaaattgctcttcaattcaattcttccattacaagaaataagaacaagcaataacttaataaaatactttttgaaggatatataataatcttacttttgtattagatgattgctccattgataaaatttctaaactctctctttcattgatgaatgattttagggttaaaacctttctaatttgaatagttttttttttttttttttgtaagattttaacattcagttattgttttagtggtgggtgcacttattaaaataaaacaattttattataaatatcatttggtaattttagacaagttaaatatgtaattatattttgggtgtaattataatttatgggtgtaatatacatccttcacttattctactgattctggattgtcattgtgtttttaggcagtatctctttc

SEQ ID NO: 215543 - DNA, 543 bp, Cannabis indica
tggttccaccaattttttttaaagaaaatttatgttcggttagcgcatatgataaccattttaaaatgtggaaactgcttttttgtggagagaattttatttttttaattcaatatttattttaggctaattgaactttgacatgtatcaatttcaatttttactattttcaatgatggtttatgtagtaaatcatgctttccgaactttcgatatctatcaaatcataccaaatcaaacccctcgaacttttacatgtactaaatcatgcccctgaacatgttagactttcaacaatctcaatagttcaaggttattttttaacgtaccttaaaagttacagcaacatgatttggtacatgtcaaagttcaggggcaaaaatcctaattagcctttattctatatttattcaacagaatttttggtttgatgatatttttttggttttttatgttaattttaactgaatatcttattacttaaccgaatattttattaattttataatattattatatatatttaaaaataaaattatatag

SEQ ID NO: 215544 - DNA, 576 bp, Cannabis indica
actgtccaccccatggggacatatatcgaatcaggcacaagttcgataggtttataatggcgtcccaagccagtcaagtgttttacatgagcgatccattagatgcacgatagtcagttgtcttgatgatgcaaccaaaagattatgataatcaagagtctaatggtgatgatctcatgcttagtaaccaaattcatcactccaccacctgttgatgtcaccgttgtggatgatatcatatcatctcgtgatgatggtgaaagattataattgaacgattctatcaatatatgagtcatatatcaaacacgcattggtatttgatatatttacatttagctattaatttgcatatttttgtatattctaatgtataattttaaatttgtgtgggattttatatcatggaaccaggtagggacgatgagtggagtgcttggttagattatgatggtgatgatggtccgtgccagaaggatctaatgttgatcctgaacaaccatccatggaagaagaaggtagtggtgatcctaaacagccaacacagaaaaatactcgcgggagaagcaaacgaaa

SEQ ID NO: 215545 - DNA, 996 bp, Cannabis indica
aacacgaagtgtaataacagtttggagaccatgacattaaggaaggtgaagttggaggtgacctattagacgaacaagaggaatacgacgacgtattactagtattgatcatattgttgttggtagagccagagggattaagaatcgtgagtggcaccatatcttgaagcaacccttggttggtcctttcttcatgggaagattcttgatggtagcccatagaagcaatggttgtatccaagcccaatgggtccaactcttgggcccattcttgagtttgttgggcttcattgtcttggacatggaaggtgctcttcttgggctttttagttgctgctggattggagacttgtgattgacccgatacgaaaaatgggtaagtaaaatgcaggtggagcccttcatatgtgatgatgagtgtgtctgggtcttccattgacctctccacttgcttctttgcattacaccttgggtttgtgcatctgtaatagctcctgttttttcaataatagactcatcaataatcaagacttgataatattgggccttcttttgtaaactaaaaaaaattgttggtattctagaaaaaatattctgattattcttgcatttacattatattattttattttagttttagtctactccttagttttataaaattatattgtaataatttaaactaataatataatttggttgttgagtgagaagttgccatttggaatggcaaacaatttgtaataataataattatgcaagtgggatagctcaggtctctaataataattaattttaacctattgtgacccacacacacgtatcaaattttaaagaaaaaagagatcttgtttttttttttccttactggagatgagaaggctgctacaatatgcttcttgtaaaatataacacatttcatattttatttataaatatattatttaaatgatgtaaataaattaatataaagagactcatggggtgtttatataa

SEQ ID NO: 215546 - DNA, 1038 bp, Cannabis indica
cccaggccattgagcaaatgaagaatgagatcaagatcagtaatggagtgaccaacaatagctaaagaaccacaaattgacttcctcttgtcaacatagtcagagatgttaaggttacctttatgaatgttggataactgtccttttgagctaaaataacctagctttggattgacttgaaaacttttgcgcaagagccgtccaaacaacatgggaggagttgtagttggagacagttccaagaatcgcttaagtcatcgaggatcgaagccaagaaagtaacaaatgatctttcttttgctattgaagatacataggattgggatcaccactgatgagtttctgtggaggactgatactgctgaacaatatctcatcgaggtcatgtctaatgatcgtggaacaacttgggatttccaagcaagaaaattgactcgattgagcttgattgtaagggaagaagtcaaagaattcgagaaaggattccattaaggagcaacaacatggggtggcgcctgaggtcgagcattagtgacaccaattggaaacgagttgtcgcccatggatgtgagtcagaggtgctctgataccatgaaatagaaactcaaaaacagagtatggtaaaatgaaaaactgagagagatgaaagaaaagcctctgaactaagaatgcttgcttggcattctaaggaggaaacattttattttataaggatttgtacagtcaaaatacagttaagagagggaatgccaaggaatggtctgttgtttctccttattactcttccaaaaataactcaattccatcttttttcttttctgaaatgcacaaatattacattaataatttaataataagaggtactatgatataaatctctatactagaaaaagtacctttagtcaaaaatgtcaaaataataaattactttgtattaaaatacctactcggaaagtttatagtacatcatttaaatgggaatttggtagacattctttcggcatttatgagagttttttagttttttttttattttta

SEQ ID NO: 215547 - DNA, 1193 bp, Cannabis indica
ggtataggtacgggtcgaattcgtgcgcccggggccaaatttgtggccactatactcaaattgtgtggagaaagactaggaaaattggatgtgcaagggtggattgctttggtggtaagggagttttcatgatttgcaattatgaccctcctggcaattattatggcgaaagaccatattaataatactaataataaatattattattattattagagtaatttgtgaaaataaataatttttttagtgttattttacaaaatattattgttttgataattatttgtaaaatagctcttgaattcagatatagtgttatgtggagaatgtcattttgcaaaataattatttttaaagaatatatattattttgtggagtgatattaaagaatgataattttgcaaatgctctaataaattattattaatttaataaattagtgaatattgatttataagaaattattgtaaagaaacgtgtggtttggtgtggtgtttttgtggctattgacacactttatatactacttgataacacctctgagtttatatatatatgtatactctgatttctaatttaatgtttaccaaaaaaaaaaatatatttatatatatatatttcattctttactattgtgcttctattgtcctagtttgtatatactttatgtggatcgaagttaattttttttttttggatttttattggatatatatggaaatgttgttaatggaatgggtagtaattgaatttttatgtttaaaattataattaataatttttttttcaatattattgtgttttgtattttataaataacacttcaattaaatattttttaataaaaaatatattgtttattgaataatatttaagaaaaaaaaactaattatacaattaaaaatatataatcaaaataaaaataaaaaatataaataaatatacgtgcaattcgtaatatttcgacacttccttactgtccagcaattagaaaaatgttgtaatatcattaatagtaaaccatgcctatatgtgtattataagatacattgtatgttttttagcgactttaaggtgcccaaaattaatattgatgtggtgcgttgtaagtagtaataatttttatattatttattaaatcaaaatatatgagatctagctaatctaaatcgtaccaatatatagcagtatg

SEQ ID NO: 215548 - DNA, 743 bp, Cannabis indica
ggtatattttgaactgtgatcaagctacagtgatagagaaatattgctcttgtttgaattttttttaacaaaaggcaacaataatgataagaatatacaagaaaaataattttacaattaggctcatttctaacaaaaagtatccctctagtcattatcatatttttaaatttcaaaaattttaattttaccaactcaaaagatcaatatatgttcaaatagtcattttctcaattctcacttctcacaaaaataaaagttttttacttaagatttttctcaattaaatgcgttaaaagcaatcatatcatttgtttggtttatgtagtttttacttgaattactatctaagtaactaaatatagtataaactagcttagcacaatatttatttattcacataattaccagcaaaatttgacttaaaattttcaaaaaagtatgaaatttatcaaacttaacgcaagaatatagtaccccccccaactaaaatgagatagtgttctaaatgtctaaatatgtatatgagaagaatatgggatgagaactggaaaaaataagagaatatgcatagtgatagaccataatttaataataaaaacaaaatgacaacaaataaattaaaataactgaaaataaagaaaacaattgaagatatgacctaatagtgaaagaattcactaaccttagtaaatcagatcatgacggagtgttttctctactttaggtggtgttaattctaa

SEQ ID NO: 215549 - DNA, 935 bp, Cannabis indica
aatttgttataaaatttatttttatttattgtaatttgtattattttttttttggtgcattgaggaaagtaaaaatgagggcttttataacaacaaactttaaaaatttacaaaaaaaaatttattgcttagaagagattcatcttctttcctccctattttgatgtacccttaggtggcgtttaggttggagaaaatgaaatggaatggaatagaaaggaagtaattttattccattcctttacttggttacattttaaagtagtggaatgacattctaatagaatgttctttctactattttggtgaaatgactattccatcttaaaaaggaaagaaagaccattacaatataataagagaaaaaatttaataattttcttattaattttttgtatgcatatttttatttctatttttatatattttcattctttccaattaaatgccactttaatttttcaataatcttttaatagtggatctatacccaaaaaaaaaaaagaaacgatatttgtccatgtgcaacaagttgtaacgaagttggcaaccaattcatgtttcatgcaaaccaaggcactgagaaacatgtgatatgactccaatatcttttgatttatcacctcagccattaatgaattaataacatgcatttttgggtaacttggcctaggcatagatcatatacgtgtttaatatttactaggtataacaagttagtgggattttttcttctcttttggtagagatatattataaattttaatttttattggagcaaacaaactaatagataagtctccccacgataagaatgttgtgttatttcatttttcttttctaaaagaaataaataagtaaataagaatatcagttaagaaaataataataataataagaatatcatgatgttattatctaatcagagatgcaca

SEQ ID NO: 215550 - DNA, 602 bp, Cannabis indica
attttttttttaaatttagaaaattttaattaatatgtaaaaataggatttaaataatcttttgtattcgtcactcttttattttatatacatgtgaaatagtttgtttgaacattactttttatattgtaaattattttaaattttttaaaattgtacttaatatatcttaaataattattacctgcataatagttacaataggtacaaaacagatagaaatacatcaatttatttttttttgtataattaataataactcatatgtataattaataagataaaacaatgatagtttgaataatactatagtgtatctactccacatgcatacttcactagtttaacaagtaatgttgactactatttttggcaactaaaaatttatgaaaataggaaagagaataaataagtgtagaaagaaaaattatttacttgtttatgtgattcagacttccaaatgatcttaattagtccacaagtcacttttattcattttgaattcttaaaatgagtgcgtgatcacattgaccaccaagaaattgagttctataaaccagtcaacttgcaagtcattcgaggggaaatgtaacgatcaccac

SEQ ID NO: 215551 - DNA, 600 bp, Cannabis indica
aaaataatttatttatttatttacaactattttatctaaaataatataacaagtctttaagtaataatgcttattgatggcataattaaaaatcttctttctctagaactttctagtgggttgtatcccgttacagttcttctggttccccttccagcttgatctctccctcgtggtgttttcctgttttagattaatcttttctcttttgtaattgttttctcttccttcatttattgtgatttaacttcttctttaagtgtttttgtccattagccctctaattaattactctgcagtcctcctttcacatcccttcttctctcttctttactttccaatgaaaatcttcagggaatcatactccaggggtttctcttcttggattttctactctctctctctctcttcgcatatcccatctccattaatagaagccgtcattttggctctttcaaggaggagcacgatgattgcacctaaggatcttggatttggtctaggatttctgtaggataggatgattatcactgaagttttctctcctctaagacttcaacatgcaggtatttctctcattctagctattaagggtgtggg

SEQ ID NO: 215552 - DNA, 608 bp, Cannabis indica
acacaacagtaaaaattattacagtaggttcattcaccctcgtagcttgagtactcaactattgtgtaaggtacgtaactgcactactagcaaccccttcaatcttagagaacttgttattcctaaccactagcagtgatttgatggcaagccatcgaagaacaaagaagaacctacaacaaaacaaaataaaataaaaccatgtcacacaaacaagactaaaatactcaaaactatgtcatagagacaatactaaaactctcaaaactatgtcacaaagacaactagcaaaacatgaccccaaccaaactgcacctaaacccaaggaagaccatcaggcctagcaagagaaaaaggacaacctccagcacttataaatttaggaacaagaaactctaattttttccagtatttttttaatatgttattagtatatttattaaataatccattgtttattttgaataaattatgcaattttattaataacaattcttgacctcgcttttagccaacgacagtgagtcaaataataaagcgattaataatataattaaaagagaacaaaaacgataaagtaaaaagaacaccgaattttaaagagattt

SEQ ID NO: 215553 - DNA, 507 bp, Cannabis indica
aaaaaaaaaaaaaagaagcaaagtaatatatagtgtttatttcaccatgtgaatcatgaatcgtgaacatagacttgtcattaaaaagttgaagctttatgacaattttaaagtctttgaatagtcatatttagtacttttcttcaaacgctgtttttatagatttgagtttcaagtatctcaattcgtcttcaaaaaaatagatatttcaataaattgtggtatttgtctatattcaaaatgtgaaaagtagcacccaattggtcttgttcttgttatagccacaagctttagtatatgggaactatacacaacaatacgagttaaattttaaggcatctcattagaataactaaatcaaattttatttacaaaaattactttctctttaaaaaaacaaaatttgaaaatataaatataaaattttgggaaaactatatggtgcacccaaaaattaaagtgtaccaatacatccttttcatattttcactatctaaataattttta

SEQ ID NO: 215554 - DNA, 812 bp, Cannabis indica
cttcatgcacgcgcggaatcaaacgctcacgcatctggctcagacaaaaatccccattttagacacacatgtccgagttttctcggacaacatgctgtctgaacgagcccctgcgctccaaatgaggctgcaagtagcctaattcctcagcacgtcccccctcaagcgcgcgtggacattatgcaatgcactgtttgatttccacctattttttcaattttttcaaattttgtctattttttcatggtaattaaaattttgattttttgtagtattttgtgttagatttttattttaaaatttcaaaactaattatcagataaattaattatttttaatttaattaattttagatattaaaagactttaatttgaaaattaataatcttctacaaatttgcttttatggattttttaaatttaattatttattattctatttaaattataaggttagatattttatatttttatttatttatttatttaattatataaaatggacttatttgacattaaaatataaatataatttgaaaaataatctagatatttttgaaatctaatcatatatttatcaattttttaaaattttgattattttaatatattttattaaattaaattatgagattagaaaaatagtagttatttaccattttatcttgttagatatttattttattaaatatttttttaaaataacataaattttgaatagtttgttgaattttttttaaaagatatttagggttgtaacttattttagcaagatctagatttaacatatatgttgattatataactataat

SEQ ID NO: 215555 - DNA, 582 bp, Cannabis indica
attgtttttttttaaagcatcattataatgaaccgaaattatgctacaacatcaaaattaattaacaaaaatctattttatctagtaaaaaataaaatcgccaaaaactaatagttatttttaataaattttttaatatttaaattaataataaataaaaatttataataaccaactaattaaacaatgatcctaataaaaacgtagtaaccaaataaaacacagagaaaataatatatagataatgtttaatatagaatattaacgtgtaacctaatttctttttaccttttaatttttctatcttcaccataatcaataacctgaataaaaacacacctataaattctattgattggaatgtttactatttttttcttttaattttagtctctttattgaagctgtagtcaaaaataaaattttatagtcatttaaaaataatctatactcaatctaaaccctgttgttgcaacaatcttttaattttgtacacaaaatctttacacaataggttctaaaatatgtaaattatatgatacactagtataacataattgacaaataaaaaaaacagaaaaa

SEQ ID NO: 215556 - DNA, 806 bp, Cannabis indica
ttgtcacttaagggtattttggttatttataaatcctcgaataatctcgacattcttaatgtttaactatattgcccatctattactaaaatactataatgtgattctattggccaaacgtcgcgttctaatgttgtcgggcataaaacatgagagacatagaatttcatataaagcataaataacacacctataatttaaataaatctccataaattcataaatcatatatagaaatctaattttgtaattaagttttaggttattttgagtactaattttagattaagtttagtatatttttaatttagttttactcgtgtttggagcaattttacgcttgttatcttttatttttgaagatttaaaatagaagaagatttgaaaaatatcatcgaaaaagatgagaataaaaaataaaagatcgcagaaaaatatcaatgtgaaatatcggagttctgaatagaaaaaaaaaagattattcgcgttgaaaaacatgggcattggagcacacaggccgtggcccaggaatgggtgtgccacgacccgcctatttaaaaatcaaagttcacacgtgaaagccacacacggcccgcgacccaacaaggagggcgccgcggcccgcccctatccagcagtaaaatcctatcttttctcaacgtaggcttggtggcttcctaattcaaagctgaataggattttcagcttgtgcgttcttttatctttttagtccctcaatagctatataagaagtgaacttcagttgatttcggcaagaaattcaggaggaaataaacagcagaaga

SEQ ID NO: 215557 - DNA, 546 bp, Cannabis indica
ttttttttttttacttttatttcaaaaatatgtggtgaagtattctatttggtaaaaaaaatttcgaatacatgtagtaaattaaaatagggttttttcattagtgtaaaatcaaaataattttattacaaaaaatgtataaaaaaaattaattttaaaaatatacacatttgaaaacatatttaaataaaatcatacaaattcttaatttaattataatagatgtattaatgagtcaacttaccataattagatttgtgtaactatttttatgactaattgtatattaatagttacaaaacataatcattataatgatactactaataaacaataaaatttgtattaatcatacaaatcacgtccatgatcgatgtatggaatatttttaaaaatcaatacatatataatcatgatttttttgattaactatgttgaatatctgtagatttttaaacatcaacatttccactactctatgtatttacactaggaatagcaaaaaggtaccatatttagagccattttaataactatatcattata

SEQ ID NO: 215558 - DNA, 557 bp, Cannabis indica
aaaactaactaaccttttgctgagctgtctgagaggggactaaagtgactctcaaggggtgaaagtaacaacaatctcttatttacgaggccatctaccaaaataaggagaatagtgcaataccaataaatctccaaatctctcgaaggatcatatagtatagtagtcttttttttttattattattttatttgagtaatttgtagcataaatacttaagtttaatgtttgacggtaataatacataagttatatttttggaacttccataagtacttggccattaagtataaagtcaatgaccacatgccaatctttaattgttcaaagtcattaaatttaattgattgtaaattataatgttttactaattcttttccttttaaagaagatattaatcgtaggaaaaatagaatttccacaacgactgcaaatctctataatatcatttgagaaaaaaattattgtaagtaaaaattagattttgatctgaattattagcagaaataatcaaatgattctattgatacatttgagaaattaaacgttttacaatt

SEQ ID NO: 215559 - DNA, 770 bp, Cannabis indica
ttgcaagtaattgttaacaaattaaaagtgctcaatattgaacttcccaacgcatttcatgttgatgcaaaaattgtcaccatcttggaagaattatatgtagagaatccttcataaaaatgagaattactctttggaagaaatctaaaaacatattcaaattgaagaggaatcgatttgtagggataaacttgtggaggggtctaatgaagagacttccaaagcaaatgcaacttctaaagatccttataagaataagggtaagaccaaaaagagtaataacttgggtctaaagtctaatccaaaccaattcaaaggtggaaaaggttcatgttttatgtgtgataaacttagacactatgctgaggattgtaagcatagaaaatactttaagggacacaaagtgaatgctatcaaggaggatatcattgctactcttagtgaggtaaatttcgtgcaagggaaagtgaagagatggtggtatgatacatgtgccaccattcatgtcacatatgacaaatcattgttcaaggcctttgaagagtcaaagggtaaccatgagatctaaatgggcaatgaggtcgaatctaaggtactaggcaaaggtaccattgatttatttttgacctctgataagaaagtcacattagcgaatgtgctttatgtgcccgacatgaataaaactttattagtggtgacttacttagaaaactcggtgttaaggccatttattagtccggtaagctcatagtgttgggttgtctgcccta

SEQ ID NO: 215560 - DNA, 623 bp, Cannabis indica
ggatctctggctcttgcttttgacgacacttcttctggttagtcccttatttcctcatacatgttctaatcgttgggtatactactggcagttgaatgcaatagaatattattcaattctaaattgcaattgtattactacctgttgctattgtcataattgttgctctggatgtatatgcacattcctccatttgttgaagccaacataccttcatagtcagggtggttctcattaggagtttgctattaaataaaataaactgagattagtcatcactgttatattaaaatatctgagttgaatgattaagttaaaccaaaaatacatgaatgggtggctgatgtctagcaagaactttcataatatatattaaatgaaacagaatattctactgagggtttgatgacaaacatgctcatacaacatcatgactaacttgaaaattttctgatcaaacattataataggtactcgtaaaaatcaagatgagagaaaagtttcaagaagacctgaagattttgatttaaactacattgacaggaacaacattgcatccacatctctggaaaatcatgaattaattgcaccaccttttcaaaaaagagctccactgaatatca

SEQ ID NO: 215561 - DNA, 1056 bp, Cannabis indica
catactaaatatttttatctaaacaacataatagcatttcaattctgataatatatagggcatattggacatattttaataaaaaaatcataattatatatgtattgattttgaaaaatatgccatacaattattatgtgaatcatggatgtgatttgtattgattttaaaaatctactaatattggacattataaataaaaaaaaatagccataaaaatagttacacaaatctaattatggtaagtttaactcattaatacatctaatataataaaattaagagtttatatgattttatgtaaaaatattttcaaatgtatacatctttaaaattaattttttttcacattttttgtaattaattaaaataatgtatacatttatgtaaaatgcccaatttttaattatgatccgttctctttcaaaataaaagaaaaaagcattgtgaaaataagttgtagatcattctttgagtttttcaaaacatcttgaatcgtcttattccaagcaatatcaaaagagttatgatcaaaatattatcggtcatcgcatgaggaagcttgttgcccaaaaattagctacccgggctgcgacattcaaagggctatatcacggcccactacacaatttctaagttttttaaaacctaatttcgaaaattaataggggcttttcattaggcaactttgagagaaaatgaggatttttcttgtacaaccattgttcttcattagttcttttcatctatcatttatttgatgtttctaatttgttatttgcaattgtttagagtgatgataatgagcttagctcatagtcatgagacttctacaaagaccgaagaacaattaggagatatttttacaaagactttgaatggcatgaggattgattatctttgtaacaagttgggcatgattaagatccatgctccaacttgagggggagtgatagaattttagttgtaaatattagggtaaattgtatttactagtctcctatctgtatttagtagcttcccatagtctcctaacattgtatatatatatatata

SEQ ID NO: 215562 - DNA, 627 bp, Cannabis indica
ttgtgtttactcagtgtggaaaacaaagaatatgtgtctttggtatcatgaagtgcccattgtgttaaattttgtcaaaatagttaaaaagatggttgtaaatagaatatatagcccatgatattgaaaaggtgggggatatatatatcgaaatcggtttgagaatatttgtaaaggagagtaatttgttattagtgagcaatataaaagactaatttactcaaaattaaaaaaaaaaatagaattaatttctggacttttatttctaaactaattttttaaaaattaatttttaaatttttgttttaatactctcttatctcattctcattcataatatttaataaaaatgttagtttaaaatattcaatatatatatatatactaggtgattgttacgtgccaagccacgtagtgttagttttatttaatattttagttttttatttgaattaataattaaaatagtataattatttgaacgatttgttttataaaaataaaatatgtgtcagtatatttagtaagtaaaatatagttgtgttataataatgtatgttattaatagtaaaatgtacattaatcttctaattgaaaaaagttctattatctcatttcatatctaat

SEQ ID NO: 215563 - DNA, 677 bp, Cannabis indica
attagaatataaaaaaataattgctaagaatattttatttaataattataattaatttattaaataaaattattcttaattatcattttataaagaaacaaaatatataaataaatgagaagatattaaatttttttttaaaaaaaaaaaaatcgtgcaattttattaatagtctacaacctaatcaaaacatctcccttattagaaacacaagtaagataaaaataaaaaaatgagctaattaattgattgtctgattcccgaatcatttgacaaaagaaattaaataaagtcaaatgaaaaatattagagcatcacaattaaccttaagaatacctatatttagttttatctactgctcaaaagatacaacagtagatctgttgtagcatgtccattcaacccttagtttgagcactcaattattatgcaaggtacataactacactactaacaactttttcagttgtaaagaacttgttattctcaatcactaacaacaatctgactgggaggcatcgaagaacaaagaagacaaaactaacaatgaaaatgaaataaaacaaaatcaatatcacatagataagactaatcgtagtaacctaaacaaaaaacactacaaattagtgtcacaagacaaactaaatcgcagtagctaaaacctaactacgcgatag

SEQ ID NO: 215564 - DNA, 511 bp, Cannabis indica
gaagaagggtgtccctattagaactcgtgtatttcaaataattgagctaatacatgaggtagagacacacaggactattatcaacaaaaggaatcaagtgagcatgatcctcaagtcactatctccttgcttcaaagctttcaccactaactatgtgatgaacaagttagagttcaacatgattcaattgttgaacgacttggccttgtttgaaaatcttaacaaggataagtccaaggaaggtgaatcaaacatagtagaagcaaaatctagctctccttcttttgataataaaaggaaatgggacattaaggacaacaacagtggcaagcccaaaccaaaaggcaagaaggcacctaaacccaagaagaacaaagccaaccctaagtccaaggacaagaaagcgaaaggctagtgtttccattgttgcataatgggacactagaagaaaaattataacaagtatcatttcgagcttaagatatattaatacaatttatttgttcttgaa

SEQ ID NO: 215565 - DNA, 668 bp, Cannabis indica
attcttgattagtgataataaatgttaatgaattctatcatattaaattatttttatttttctatttacatattgtgaattcttgataggtgtacaactaattaaggttttgcattcttctattatcatcttagaattacttctcacctaataatttaggattctaagtagagtaataatttgaaattaatagtaatgtcaaaggtattattgattgtgatgaaaaatagaacttaggttaaataaattatatgcttcattgatttgttacctagattaacttatctcaatagaaattattacttttccaaggttaaataattgcatacttcatatggtaaagattacatttcctgagtcataccctggtgacgtggacatcaatttttgtacatgcggcaagaaagaaaaataattccaaagttgagtagtctagagccattgaatggacttgggattggattagccttgtgcccaggttgactttgggaacttcgaaatgggtgtttggatcctccaagttatttccaactcaccttctttcagtatctataccatgaagatatgaagcaatctaagtccaaggctcgagagctgaaaataacacgaaataagaaccacgaaaaaactcaaacctcgtgaaacccgtaggtttaccgtacctacgt

SEQ ID NO: 215566 - DNA, 519 bp, Cannabis indica
accctaattgttctctcaaaaagtcatgtgcttttttctttaatatattatatatataatgttacaaataaactcttttatttaatcctataaaataaaagatagtattcattttcaattgaaattcaaatataaaatattatataactgattaacagaaatcaattataacttttatttaatattatctttttaattttaaatatattatctaataatatatttaatataataattaaaaatataattgttaatttaatttaatttattttaataataaaataatcaaaaaaaatatcatggatccttatatgtcaccctacatgtgtaggttaagccctacacgtgtggccatattctaagattcaaaattaatttctcatttttaccacaaataataattgattagttatcattattatcgcgtttctgaaaggtatgacacgtggcattcaatgaggaacattgatttaatccttccttaattaaagtcattgatactactctatcacgaaaggc

SEQ ID NO: 215567 - DNA, 842 bp, Cannabis indica
actttaaaactaataattaagtatataactttatatcattatatatttaatcatttatgttatatataataaaaactaaaaagttttaaaaaaaaaataaaggtgcaaaatcgagttggtcggtttaattgggcaggttggacctattttcaacccgcccaattaacagattgggcggtttgtaattttttcgggttatttcggtttgtaatttttatcggttttttcggttcgatttgggcggtttacaaatttttttgtacaaccctaggtgaaaccctctgaactactgagctatttatgtgtacactcttgtacacatgacacatttatattgttacacctaatattattatttaaaaaattaattttcaaaattaaataaaattataaaataaaaatgaaatatttaaaaaataaaaaatattataaattttaatataatatttatatttttttttaaataataatactaggtgtactaatataaatttgacacatgtaccaaagtgtacacataagtattctatattagtaattaactatgaaaaatagatagcaccttaaatttgagcttagagagttaagtgcaagtagaatgatagttaagagggtttgaccgtaaaatttttttatatatttgattcatattaaagatgactcatactgcataaattttgttatgatcaactattaaggacaaaaaattctatatacaatatttaatttatttggattatattgagaggaatgctaccgtcaatcttttattataatttcttagttaatctctatgcccgaaaacatatactgtaatatttttttatagcgatgttcgttat

SEQ ID NO: 215568 - DNA, 502 bp, Cannabis indica
aaacaatcagcaaacacattaaatctcctactaataaaagcaaacttacaactaacaaaagacttacccaaatctaagacttgcaaagataaactcctgaatctccaatcaggaggacagcttagagtgttaaatgcattaactactacttaagcatccgataaaatagtaacattgtctaggccaatttccttagcccaaatcagagcattaaaaatcgcttgagtttcagcctccattgccgaatatgcctctttcttgcttaatctcacttcccaagtctccctgcctcgatcgacaaaaaccactgctaaaccagctatattgttctcccaagaagcatctgtgagaaagagtgtgtcgccaggaagctccagggaccccacgggcactccattccccacatttgtatctctctgattagaacctgtgtcctgccaactcaattgttcctgaagcatcttctgaattctcatcagaaggcactgaacagagaccattt

SEQ ID NO: 215569 - DNA, 591 bp, Cannabis indica
caaaatttggtaatgtttggatttgtataggatgagttataggatttccaaactcagacaggaggttttaggccaaccgatttaggcagttttagaacggccatttagttgattttttttgagaatttcattaatgtttccgtataaaaaatgttcattgtgatgtttttagataccctgcaaaattttgtaaggtttttcttagaattgcaagagttatgaaagttttaaaatgggatagtggagttttgggccatctgatttaggcagaatttggggtccattttatgattttgcccaggatcccaattacgtgttttctcaatacatagggtactaccatgttatacataagtaggaaaagttttagttgtcaatttaagtccccgaaagtgttagggcaacaattattggtttttttgaaaatgtgacttagggccttcgattaccagaaggtatttccactaaggttgatcggcacaccttaaatcaaaattgagataagactagtataatacacatacatatgtacatgtttatttttatgttttgccagatgtatgacatatctgttaaaatataggttgtgct

SEQ ID NO: 215570 - DNA, 556 bp, Cannabis indica
taacacttaaaaatggatggaaatgggtaactgctaaaaaaacttaggtttagaaagttttaccaccaaaattttaaaattgaaggttagttacaaaaacctaatcacttaaagaggttatgccgcaaataacttttaaaaaaaaataaccaattaatgagagggaaaggtgactcacttgctagatatgaaaatgagaccagattttcaaagttgaaggtacccaaattaatcagtccgcgcgtgacgtctcgctcttgccaatttacgtaccccatgacattgcatgatgtttacgtaatcctaaccattactttgtatttgattaattactattaaaatctgaatcaataattatttatctataattatatgcttaattcttccgttctacattatgtatttacttttttttttcctttccatctttgaagtcactatggacgtttctagtagtatcgtaataactttcaatttttttgataaaaaataacagccacaataataatacttatatatatataatatatatatatgcttatattgggtattactt

SEQ ID NO: 215571 - DNA, 536 bp, Cannabis indica
aggaaaaagattcatttgagaccatttccaggggttgaaataggtggttcagcccaagaacagaaatctccaccaacaaaggcagctccaccatgattatcaccattctcaaactgccacgtgttaccaattcctctaagtgcactaccaccattgccattaccaacaccaacaccagctccaacaccatctcctacaccaggaaaaggccaaatacctctcccaataccaaagcccaaatcatcaagcccaccaccaagcccaagcccaaatccaccaagagcaagaaaacctgggctttgagtgtttaaaagagaagtaaaactcccaccacaaagcccaccaatgttgggcttaacatcaccaaaatgcaaccccgacccaccaccaccaccgccgccttgatgattcgccgagagaggaagcaaaaccggcgtagcagataaagcgtggtgatgaaggtggtggtgatcggagagaccaggagaggagttaatagcagtggtacgagagcgcttagcatttttacgactacc

SEQ ID NO: 215572 - DNA, 822 bp, Cannabis indica
gtaagcccttgcatattccatcatggtcggccataaatatccttgccatagtattttctttgataggctttgcccgattgcgtggttgccacgtaatccatcatgtacttcagaccgaagtcatgcaaattcttcgtatgtaacacgtttaaccttccttctcatttttcgagctttatttctatcatttggaagttctccagtgtataggtaggtttctattggtgtcatttagttcagagctgtgtcaatcatttcaatttcttccacacaggtgatgctaggctcttctaggaagcgaattgggactaaattagccttatcagctatgtttctgctcgcaagtcgggctaaggcatcaacagttgtgttttcttctcttggaattttcctgagagtgttactcttaaattgtgcgagcagatcatgtattttgcttaaataggctatcatttttccctcagccctcgtactctctgggcatatgatttactacaaactgtgaatcactacagatctcgatgtgttcagcgtgcaaatcccaagcaagttttaggccagcaatgagggcttcgtactctgcttcattcttggaagatttgaatcctaatttgactgccccgtgcaggtgttgcccctaggtgtgacaagggaaattcctacaccagatagttgatttggtgttgaccagtccacgtgtaatttccaagtaggtctgtcttcattatatttttctggaattcttgtactggctctcggttgtcctttggactcttttttatttgcctgtgcactcaactcaaagtttgccaaagcctatcc

SEQ ID NO: 215573 - DNA, 779 bp, Cannabis indica
  modified_base (105)..(105): a, c, t, g, unknown or other
cagcctcagaaaaatgcttagttcaagatgatcactaaagagtttcatctatacttccatcctgatagcaaccatgaatatttcagaatattaggacactcaaanattagtggcaagcaaaagcaaaaggcttacccttcgatccttaaaaatcaaaatatcatgctagaaaaatagttttgaaacttaccatacacttggaggggatgaatgagtaagagcttcttttgaatgaggaagtgcagttaggtccaatccagtgtcactcccgccattcctcacaaaagaattgaaagctgcatccatcactggagtggaagagcatgttgaataacctgaagctggagtccttggtacaatatcccattcatcacaacttccttctgcatccttttgttctgaggagttgacagtcctccttcagaaccatctagggaagaaatatcgctcaccatcctcccaattttcatattatttgctgatcttaccctgcgataaggatcttgaacttgacttgtgaatgttgcttgataactctgtcccagattaacagactgagatctcaagttgttgttggattgtcctgtctcagtgattggttgcactggtaaagatgttacctcaatatcagttccacctaaattacttctcctgtgttgtagtgttaacagcattagtactcaggatatcaaaatctgtgaaaatctgaacttgtcacaaaggtctccctagcaacaattcactgtacaatttgatagtaagaatttgaaacaaattat

SEQ ID NO: 215574 - DNA, 426 bp, Cannabis indica
aaaaaaatatataaaaaaaaactattttaaagtgtaaaatagatatggatatatagtactagctagtgactagtatatatatggggtgcgcatggtgcattttgattgttgaatcattcaccccattgcatctttttagccttctgctcttatatatgacatattgggttcctgctaaaaccaactaacctaataaagttttgataactaggaaaaccactcatcatatataccattttacatcaatttatatattatattgtatactctcactctaattaataaaaaaaaaaattggtattttgatagatttggcaattaaaaaaagtttttagtgtgtttttttttcataatcatgtagtaactatttagaatcatcttgtaattttttttggaaaattctgactagtttactgtgttgaaaat

SEQ ID NO: 215575 - DNA, 1176 bp, Cannabis indica
gaagcctcaagctagtcaatcgataacaagtgtagccattttttttctaaaaaattcttcaacttatttcactttttactttttaaatatttaaataaaaaaaattaaataattaagtgtacaattataataaaatttaaattatgaaattatacgtgtataattttaaattataaaaagttttgctataaaattttaaatattataatttaagtgcaaaaaataaattgctaaaagatccttatatagtaataaattacaaaaaattaattaataattataattaatttaattttaaaatataattaatcttaattaaagttttataaggaaataaattattaggttactttcaggttacaagttatttattatttatttttatttaatttccaaattaatcacaaccatttaatagtaatccaatggcttaaaaaatgtaaccatgatggttacaataaaaatgtaaccattgaaacctcttccatatatatatagttatattattattaataatttttattttattttgtttaaaaaaatcgtgtcaaatttgtgttaaacaaatcatgtcgtgtttgattcgttttttatttcgagtccagttgtgttgatccgcgtctaattttttttgactctaactcgtaaaatttgtgtagtgttcgtgtgttgtgtcaaaacttattttgcctacccttacttataataatacaccgtattaatatagtattgaacaccttaaaatatctaatagcaatattgtttaaaaagtgaaattattgatcatatttttgttaataacatcacacattttgtaagacaattttgtctttcatgacttcgaccacatggaattgaggcgtttaatccttaacatatgcgaaagaactcaacaccatgctttaatcatctcaactaaccatctctcatccacctaagtgaagtagtttaaagagtaaatactattttggatcttctgttttgcgaaaattattaattagatcttctatgttgttaaatgacaaaatgaatcttgtattttttaaaattgtacaaataagatctgaattgattttttgtcaaatgagtctattatataattaccctagtgtttgcttcattgcaatgtaattggaatgatataagaatagtaaaaaaaatataatataagtagta

SEQ ID NO: 215576 - DNA, 999 bp, Cannabis indica
tgtgactaccgaaccgaaaccacacattgaagcacagactccaccacttctcagcaaaacccattcttctcaacatatccttacaaaaaacgccactccactctgtcgtaagctttgctcatatcaagtttgagcgccatataaccttgcttaccacttagttttcctttttaagtagtgcatgaacctcaaaggaaaccatgatgttgtctgatattagtcttcctggaataaacgcgctttgaaagtttttttttttttagtaagaaaattgaaaattgatgaagatatatgtaaatgttggtagtgaggaattaaagtttgtgtttgtaataattaatgaaaacatgtgtgtttgtgtgaaatagtttaaaagctaaactgtgaagttacttaatatgtaacctgtttgtgcaatgatgtgacaaatagtacactttcttttagtaatatttacattaaattaaattaaccagtactgcctttattattagctcactatttttctcttccttttaacaaccaacttaaattcctcccacattattctagtcagactcagaaccaagttaacatatatatatatatatgagcatggttatataaaagtattcatagtgcttagcagaggtataatcttataattaattaataattttttataatatttattaaaataaaatatataagtaagattcgatattgagctgcacaccactagtttctagaattctcttatgtgttaatattgctattggtccaactaagtatcaagtctcatatagtttaatgtaataatttttaagtagtatcactaatcaatcgcaaattgatatatctacaagtgttaggcaccaccgatacccaataataatactcataagagtattacatctcataataatactacacttcataccccttaatatttttatatatatataccaactttcttcatttaattatatatatttatatactagagccaaaataataacc

SEQ ID NO: 215577 - DNA, 543 bp, Cannabis indica
aataataattttctgttcaattatacgtacatgttaatcaaagtccaaaatagtttaaatctatataattttttacataataataataacaataatttggtttttggtgccaagaataaaaagattggaatcaaataataataaattaataagtaatatggaatctttctaaatcattgcactgaatatagtttaagaatatatatatatatatatgtatatatattatattatatatatttgaattgggacgatttttatagaatcttgattagtatagagtgttgttttcatatttataataatggtaaggtagggttagttagacatgcaagcatgaagaaaataatagcttaattagcatattaattaatatagaaaaatacatatcataacaaggtaaaattatataaattgatttattattcatttctctcaaaagataataattgtctactaaaaataagtggtattgttgttcatgtccttttaatttttgtagatttaatttttagttataatttttccaccatcgaaagatat

SEQ ID NO: 215578 - DNA, 638 bp, Cannabis indica
caaatcacctccccacggccctgacgctaaagccggcttctgacccaaacccgaatctgaacctgaacctatacccgacttaaataaaataaaaaataaaaatgaaaatgaattttacataacacacttttgttttctgttttaaaaatgaaaaaacaaaagtggttatagaacgcatttttgtttgtcaaaaataaaatttttaaaaacaaaaattttacttttattttgtgattaaaaaattaaaaacaaaagtgttaccaaacggcaccttaattttaaaatataattaatcttcaataaagttttacaaggaaataaattattaggtgactattaggttataagttaattattatttatttttatttaatttctaaatcaatcacaatcattcaatagtaatctaatggctaaaaaaattgtaaccatgatagttacatatttaatgtaaccattgaaacctccttcatatatatatatatatatatataaatatactttatcatatatattcatctcaaatttagtaggttgtacctagttgttgtatcaataaaattttaagagggttcattgctatttttacttaatgtatatatagttctaacaaattatataaatatgtatttttataa

SEQ ID NO: 215579 - DNA, 427 bp, Cannabis indica
tcctcctaagattgtgttgattcgatctttcagaggcaggggcattgaggctttttgcctatgttcaactagtggtggcactaagtgtatcaagatgatataaaacaatgtctttgtgtaccttttagttgtattaatgaagatgtagtgagcaatttctcaaaaatcaatcaaaagagaattaataataattaaaaaaaccatacatcatttttattaatcaataaaaaacaattgcagattttttattggaaaacacaaagtaaaaaaattaaaaaaaaaatactatagtaatgttcttgtttcgattaattttgcttagcagagcttctacgacgtaatttgagataaccaaacttgccagcacctggtgatgaaccctcaaaaataaagggcaaatagcccgtggcagctttgtatctctgct

SEQ ID NO: 215580 - DNA, 1120 bp, Cannabis indica
ttgtgatgaaagcatttgaacttgcaaccaacttacttttcttcttctcgctgaactcattttattaacacaagtctctgaaagccatattttaaatgttcaatgtttgctgaggaggttatagcatagttctttggtcccgtttgcttactactttatgattagtaaatttaacttaccccaatggtacaaggcaagacttaacttatgagtcaaataagtattatctgagacacaatttatcaacacattaatttttttttttttttgagttttttggcagctaaaccatcccaactatcatttatttgcatttaaccatccaatctcaaaatttggaggtaaaaccctccaaactactgatttgttaacaaatttaaagtgtcagccatttagtacagttaagtgccaacatggattgcttatgtgtaaacttttatacatgtgtcacgtttatattggtccagataatattattatttaaaaattattccaaaattcattttaaattaaaaaaaaccattcaaaaattaaattaaattaaaccaaaaatcataaaactcataacctaaaaaaccctctcatcttccttgaactcaccaccaccgaaaccaccatcactacaaaccaccaccaccacaacctatttttcgtattcaaatcacatcagaagaaaataaaagcaaaaatcacaacaataccatatctaaaacaagaacttagatctaaaatcttccaaacattttagataaaaaaaaaaacccaaaataacaacaaaatccacaatcaatctcaatcttaaattcaaacacaaaaataaataaatgggtagatcgagagagatagacttagccatgaatgagctctccattcttcctcccttgtatgttcttccctctgcttcggtttcaaacagtgcaacaccgacaaagatcaggattgagagagagctgggcagattaggaagagagagagagagagagagagagagagcaaagcagatatggagagaaagagatttgggtagatcgggacatggaacttcaacgagaagaagaagaagaggcggttgatgtgttactcaattactgttaatggtggcgagaagagggaatacgaa

SEQ ID NO: 215581 - DNA, 1208 bp, Cannabis indica
tctcttactttaacagggaggatggaagttgggatttaagtaagcttataactcattttttttactgatgatgtggttaattctgtgcttaaagtccctattgacccgactaagaaggattatctcatctggggacatcatccttttggtattcttaccgttgttcagcttatcacctggaaaactctcttcaattttctcctagttctttcaatccaaacctccttaaaccttgatggacagctgtttggtcattgaaaattcccccaaagatcaagcattttttttggaaggcctttaatcaccttcttccttcaagtcacaatcatttctataagaaggtgcttgataatccctattgctctctttgtgctcataagattgactctaactctcattcactccttgagtgttccagagctggtaagtgtttaaaagaacactaggttttttagcttttacaataagaataaacgttgtcacaccaaggaatttcttttaagaaggtttgaattgttaaataaggatgatttgcctgtattttttcggtattatgtggaccattaatttggaattaccgcaacaaatctctctttacagctcaaaagcccttttcagaaaaatagaatcctatgttacttcttacctgcaggattatattgaagctcaagtcaagatcatctctaattctgattccaatcaaggtgaaggatccaatgcttcatcaaacctagataccttattgccttctcctggaaagtataagtgtggatgcttctgtcagagattaaagttgtaggcatggctacgaagctgtgattcaagactatcaaggtgcaattattgcaggatgttactcttcaaccatcactaatctcccccttagagctattaattatagcttggcagtgcaatttcctcttgatatcattgtctctgactgtcaagttttaattaaaaagattacaagcaaatggagagacaaatattcttgttcagagatctggttcagaagatagagtcctctttgttttatcctattgtttccattcaatttgttcttagaaactcatttgttttggttcataattttgcccagttagcattacgaatttataaagaggttatctagaataatgtatttcaaattcttgttagatctttgtaacctatactacattgttttatctattgttacagatcttatt

SEQ ID NO: 215582 - DNA, 643 bp, Cannabis indica
taatcaagagtacaattctgaatgtataatcgagttaggaggaattaataagacagaacatttactcgggaaattctagaactactcattcagagtttgattatatgcccatatggtccccacactacttgaaataatgttgtcttgtagacttaattaattaatttatttaattagttagaattctaaataatgacaatgtcttatttatgagtttcacaaaacaagaaaaattttaagaagaaaaagaatttttagaatttatatattaattaagagattatgaaaaatctaattaataaataaattaaatattattaattaattatacttattaaatagataaaattaacatttataaagttagaatataaaatggtacacttatgaaaagaaatataagttttaataaaatagtaaaattagaaactcattaaggccacatgaggagttcagccaacatggtttaaataaaagcatttttatcttttttattagttttttattcctattttaaattctaaatctaatcctaaagttacaatataaataatatttctaacagttgccccattagagaatggagatgctcatgttagactttgtcatgtgtacacaatggattaacacaatatacacttta

SEQ ID NO: 215583 - DNA, 586 bp, Cannabis indica
ggtaagagcactatatctcagttcttaactgagctggggagtttgtagtagacaatgcccatgtttccacaaagattaaattctccatgactcagatcagattgattgtgctcacacaaaaggtgggctttgtttagaatccctaatgatacttccaacagcttgtgttttagatagagatagtcaatgtcaatataaagaagagccatactacagtagcctaagtgtgcatgtagatttgtaagtgtatatattgtttagtcaatttattttacagtgttctacattttcaaggttgtttgcctccttgtacggatatatatttttggtggaaataaaatgatttgatgtttgagctgaatggtagattgttttatatcatgaattagatacttataattattgtcatgttcaataacacttgtttaaatgatttttgtttatttaattaaaaataaggttagtatttttgcctcccaaattataatatggcatatgcattattgttattgtatactttgaattagaagaattttccaattcgttataaatagtttttgaactattctaaattagttattttgtc

SEQ ID NO: 215584 - DNA, 777 bp, Cannabis indica
catattagaccctaaatttatggaaaaaaatttaccatggacgtcttcatcttcatggtgggtcgactggatggtgggtgcagtgggtcttcgtcctcagatggtgggtcaagtggtgctcagatggtgggtttggtggctcttttccttcgtggtggtgggttcggtgggttcaacagagatcgagagaaagagagaaaggagaggaagagagagggtcaatttttagaatgagaggggtaaaatgggttttagtaaaacttaacctattttacaagttttgaataattttaaattagtggacaaattttagtccaattaatgcataaaaaatcaaattttccttatttagcaaaaaattaaaaaaaaacaattaaaaaataacataaaattaaccccacgataattataaatcaactataaaataacaacaaaaaatctcatgacaactataataaaactaaattacaattataaataaactattaaacaactaaaaaaataccaaaaaaaataactaaaaaaataattcattaatttcaccgaagaggtatttttgcgaataaaaaagttcaaagagtaaaaataattttttttccgtattaatgtatttttataaaaaaattcagattttgatttattatgtaaaaattttttagaaggtatttcatatgagaatttaggcgtatgattaatatagcacccaattaaaaatagtttaataattttttctcccaaaaatacacttacatttcaaaagtatctctctctctctct

SEQ ID NO: 215585 - DNA, 516 bp, Cannabis indica
tatttattttaattaaatcatttatgaaaattacttgttcaagttgatttaaaattaattaacaaattaattttgaactcaatttaattttcaaaattgaaaatttcaaaatatcaacattttaaataataaatgcaattcaaaattaggtgggaaattattcttaaaataaaataaaatataaactaaaaattattcttagttaagttgatctgaaattgaaaaaatttccaacatgaatgtaattttctatttaattaaattcattaaaatagaaataattaagtatctagaataaaatccacttaattattaattctaatttaatatttaagaaaatattctaatttaagttggtccaaaattaattaaattattaactttcaacttaattatattttctaattaattaaatttcatgaaatagaaacaaataattaagtatcttgaatatattcaacttaattatacattctatttttaagttctaagcaaaatatcctaatttaagctggt

SEQ ID NO: 215586 - DNA, 1226 bp, Cannabis indica
ttatgtttcaataaaataaaaaaaaaaacaaatttagaagaactttacaaacaactataaacaacaaaaagacaactacaaaacaacagaaaaatataaacattgacctaattgtattatacaaaacaacatcaacccctcaccatgtttttgtattataatatttttttacttaatattgacaatttgatttatctttttgtattactacattatttttttttcttcatgaaattcgttgttacaacttactttcaatatttttcatctctctcttccttttcgagttagtgacaattaaaatgacaatttatattttaaaagtttaataaatagttacattaataatagaaataaataaaatcttatgattttaaaatagagtatataatataatgagtaatatataattaatatgtcaatatctactattgtacattgtatcaatttttttttttaaaaaatttatcattgtatttataaaaaaaaaaagtgtcaaaaaaataaactaaatgtatatatgtatctacgtctaaaaagtaacacacatacaacaaaaaaaattaatcaggactaaactaaaaatatacaccataaaaaatattgtgaaaactacttaaaaagcaactaaaaatgaacataaaaataataaaacaacacatacatacaataaaaaaaataatttggaattaactaaaatatatatactacacataaactaacaaacaactagtacaaaaaaaaaaacaaataaaaaacattaaaaaataactttagcacaatatagaacaccaaataacaacataaaaataactataaaatgacaaaataaagctataaatcaacaaaaaataacaaaaaatcaaccttctttaaatatgtaatccttcataaatcaactatgaataaactacaaaatatctaaaaaaaaatattacttttgttatacccatattttgagtagtaatatggtgttgacacgtgtaacatagctggaatacgaaccaactcaaattatgcatcaataaatgcattcagatgactcgcctcaagaaatatagttgatagaaatactcgaactcaccatcttgtagataatggtgagacacgagtactaacttctgattgatgaaaccagcgagacgaataaagaaagtcaatctcaagataaacagaatacattacagaattatttagaatgggtagatatataatgagtttgtagc

SEQ ID NO: 215587 - DNA, 691 bp, Cannabis indica
actttatatggtggttctcgggaccgaacttactttatatggtgattataaagatcaaatgaatgaaaatcatgacccttttctctccactttataaaagatgctatgaggttgtcaaaccttaacactgaatagtaatatgttagatagccttatattgataaaagaataatgccactaactttacacgatgaccggaacatattacattcttaagaagtgtcatgctgcctatttatgaacacaacaatatgtaaaagttcaatcaattttacaggtaaacatcataaactaaacaatcaaagtagaaataaaactatgtattgctattttattagaattcaagttttggatagatctttagaatcattccttgtcacatatcaactttctataccaattatttgtaatcaactgaagtttctccttctccttctagtgtttctctcagtataacctcctaagtaattgtagtaatattgttgaggtgagaactaaaataaaaagaaaaaggaaataaaataaaacacgaaactcttgttgtattaatcccttgaattagtcataacaacatgatggctgtcttgagtatctaagtaaccgttgatatgctgcttcctattgcctgtgcaaatggactctctggaagatttactccctggctgttaaaaacaaacaaaaaaaaaaaaac

SEQ ID NO: 215588 - DNA, 672 bp, Cannabis indica
ccaagtcgtgccggtgaagatctgacgtatcttaccgcattacgaatactacaaatagacgagttcaagtcctttaaaccatctccaactaccagattaattatgtgacaacaacacctcatgtgtaacaagtcgccaccaataactacacctcctttcttctcacacagtttcttttttaacttttgaagagctgcgtcgtttgaagaagcattgtcaacagtcacagtaaacaccttccatattccccaatccttcaaacatcccatcatttcatttgcaattgtatcccctttgtggttggagacttgaaaaaaaccaatgattttcttatgcaatttccaatctccatcaatccagtgtgatgtcacacacatgtaattgatgttttgaatggaagtccatgtgtctgtagtcaaacatactctttccctactcatcacacttttcaatttcttcttctcatctaaatacacattgtaaatgtctctagcaatagtaatcctagatggagggtcaaactttggattcatgtaatgggaatactgcctaaacccttctccttctacatgtctaaagggaagctcatccaatataatatattttgctaaatgttgtctagcaccttctttagtccaagacattgctattaggctattacttcttcttttt

SEQ ID NO: 215589 - DNA, 570 bp, Cannabis indica
aaccacagtataaaaataaatatatgtgtcgtcaatataaattttagatattacattcattcttgaattcaagggcagaatcagaattaaatagtaagggtcaatagcgcctaaaattacaataaattttgacgactaaacctttttgtttaaaagtgcatgttgattaatgataataacaaagttcttaatttttacaaatattttatacaatacgttaaaaaaaatatgaataaagtaataaaactgaaaatagaatatgagcgttgcttagttaggaactcaatttaatattacaaatactttcttaaagtaaaaaaaaataagaagatgtgtgtctactaatattattaatttaagaatgttctaatttattaactccgctaatattaattaaacaatacactaattattatttattaatcaaaacacgttaaaactaaagtattaatacaataagttataggaataactgtgatataaatactcaatattaaacaaaaattaacacatttataatattaaaataaattataaaatacaatttcacttatgacaaatagtatagca

SEQ ID NO: 215590 - DNA, 663 bp, Cannabis indica
gacttagatgaaaataaggtagttattaatttctagcgagtggttcttgtgcttaggtcgaaaataaatccagaagcaataccatatataataatcatgagcaaattaatattgtaccaaccaattgtattcttttaacataatgagctaaatataaatatacaaattatatacaaattcataattgtataaagtattttggtgacgtgcctcattaatcaattcatacacaaaatatgaaaatgatgtatgttttatatatttctttctttgttttaatttttaagtttagctgttaataagcggaaaaaaaacttttaagtttagctttgtatttctttgtcttaaagaaaaaatttctctgatcttttccttcaattcattttatattagggattttttttcttcacgtttgctaatttactaaaatattttatctatgagaaatagctcacccagtaatgttttaataatgtacattacatttaaattagctttatcttcatcatcatagatctttgtaagagtgtagtattgttattaggtatcttaaaatatttaatgcattataaataataattagtaatttttatatgttatttattaaattaaaatgaacgagactattaatcttgtcaattttatcatttcaaaaaaaaaaaa

SEQ ID NO: 215591 - DNA, 742 bp, Cannabis indica
ctaattaatatttacctaagagcggcaagggatcaggaagaaaacttcaccaaacagctagaaagaagaaaggaagaagaacaataaaagaggaaaggcagcagcaagttttttcttttttagtctgagcagcagaaagaagaaaggatgaagaatgatatttgagaagaatgatgaagtttgaaggagggggtcggctgtttaagtgttaaccctaaagaaatatagttgtattctttttaatataaatggtgtaggtttagttttgagttgggcttttttttaagtttattggatttttataaggactatttacaaaaatatgggaaaataaaggtatgttttaatatatatggcataaaaacttaattaccctaaatatgacatttttttaagaaaacttacaaatatgggaaaaattcatgaggaatgccataaaaaactttaaatttagtgtttctttttcttaaattgtattattgggcttttttttaagttattaaatgaaaatgggctgataaaaccttatagtattggtttttcttttgaggcatgggcctcacatgtttttacgcctcaagcgattttttaccgcctcacaagtctgaggcgtacgcctctcccctaaatactgaggcgcatgtaatagtgcataaaaccaggtacttaaaattttgtctatttttttactttcttatcaaatccgattgttattaataagtggatttgtatgtgtcatgtc

SEQ ID NO: 215592 - DNA, 695 bp, Cannabis indica
caatccttgggcctcactcaagtgtccttggtattgcgttggtcgctcgttccgcagctggcgtggttattcaagccaagacttcgaagaagatacgtgttttttagcctcatgaggtcgaagccattggggtgaaagaagctttgagttggatcaaaactaatggatggacgagcgtgattgtggagtcggattgtctaagagttatttcgaatttacaaaataataaaattatagcttcttcgtatgaccatattattttagattgtaaggctttgtttgcagatgttggtaatatttcttttaattttgtcaaatggtctgctaataaggttacacatgctttggcacaatcttctcttgtggagactgatcgtatctttagtagtgtttctttacctactgtaattgcttccttgattttagaagatttgaattaatgaaatttcattattactaaaaaaattatgcttataaaaataaaatatttaaattttaggttaagttgagaaattactcctttttatattcattaatcaaaaatattcttatgttatattttattaaaatgtactcatttttgtaaatagattgcctaatatatttttatcttccacttaaatttagtcacataacttacattagcttaaaaagtaataataaaaaacaatacacgagtatatcttaaaagaaat

SEQ ID NO: 215593 - DNA, 878 bp, Cannabis indica
aattaaaataaataaatcaaagtgggtatacaatgtaattttctctagttttttttttttcaaaaaaagtttacaataatatacattttttatctaatttacaataataatcttactatactgacatgccacgctagtcaaatctaatgcatatgacattttttttttttggtattgtttttctattttttttttccttgcaattttaagtaactttttttatttactaatagtgctgataagaaactaattagttatcgatttaaaaaaaattaaattttatatcatataatttaagatacattgagtttacttttaaaatttatttatattaattaattagttatttttaaattatgttatggtagactataatttaaaaaacatttagataatttgaaaaaaaaaaaattatactaataagtcaccatgtaatataataagaaactatttttatatactaattattttatattttttaattattttaaaaactaactagttatcgtataatataatataattcaattgacaaaattttaaaatgaatatcaactaagatttaaaaaaactataaaacaaaaactaattactatattagtaattaaatagttttttttttttatatatagtaaaaaaaaatgtatactttctacatcttgaaatgttcacattgaagagtaaatcacaatgacattttttaggctcatctaagtaacgacgtgaccagaaattattttaaaagtttgagtgaagagagagaaataagaaagagagaaatggtataaatgagagtattgaaacatacccaaacaaataaaaacgttaataattgaccaagtcatttttgacaattagattaaaaataaagtatcatg

SEQ ID NO: 215594 - DNA, 898 bp, Cannabis indica
agtgtacacatttatttttcttttttataactattcattgattaccaaatgtccacatatataaatatataaatattgttattttaaagaattattggtttaatgtattttttttttaatttttcgtaataattaatactaaaaatgttacaaaaattttaatttttttttaaaaattatgataaaatgtaatataaatatgatacaagtttaaatttaaatttgaattaaattttatatatttaaaataatatgatagtgttgaattagattttattttaaattatgtattttgatttttaaaatgaaaagtaaattaaatttaaatattgtctaaagttttaagaaatactcgcagtgacataaaacatgccacacatcaaaataaacttaacttgaaatcatagttatttcaaaagtttaaaatcgtaccacaatttaaatatggccattatacctctttttgtgaccagtcttgccacatacctacacaagtaagaaaggtgtctgcatacatgatatatgtgtattttttatgtgtaaatatttatcttcaaatttatacatttatatataaggttgcatcagaagaaagggaaatgaatttaaatatgaaccgctacatacaattcttgctactaaaggaattcaaatatgttttacttggtgcttgtaaattcaattacaagttcaatcgtaaacttattacatataagtgtgcaaagtaccccgcataatgaataactctaatcgggagaaaacaacagtcttatagtgaataaaagtatgttgaatacaaatttagtttatacaaaacattttcaaagtaacacttacaagaatgagagagtcttgaccaggactcctttgagatgaaacctttgctcgccttccaatt

SEQ ID NO: 215595 - DNA, 642 bp, Cannabis indica
atgtgttcagtataataatggcgtaaattttattttatgttgtgtttgtttcctctgtttggtttaaaaattaatgttgaaattaatatcaatatgtatgcctatttctaactttcttttataatatttataatttagattagttatttgcgtttaacatcattagtttatattagaagttgggtttagttacatattaagtcaattgattttgtatcatcttgtttcatatatagttacaatattattattattcatgattgatggtcaatagaggaagctttagattaaatagggtttacaaaagacattaattggaaaatcatgggattatacagagacatcagatatctacaaacattcttttaagtgattgaaaagtcaatttgccacaatattaatttatatatagattcaattcaaataagaagtaataagaatcgatttttttttttaattattttgcatgtacacaattttatatcataatagtagattgaaatataataattttgatatatatatgtatgcgcacagggcaaactattttaaatagacagatagattttattgattggcctctttttattatttatatttactctacaggatgtacagggcaaactttgttataaatctttt

SEQ ID NO: 215596 - DNA, 687 bp, Cannabis indica
tattgataggagacatatatatactaatgttgccgcaatagttaaaaaaatctcaaaaattaaaatctcaaatctcatttcaaaattttttaaaaaacacattatttaattaaagaaaataaacatatatatatatatatattgcacttaacattaactaattaaacctaattaaaaagaaaactaattataaatacattgcacgtaacatcaacctaatatatatatataaaaaatacatataataaattattaggagctaattaagcacatgttctaatttagtttactcaatataaaaataataataataaataataaatgaattttttttaagaataattaaataaaagatattttcaacttcaataattgaatgatcgctttaatgttgcaggcctattttgtatttggtattttgtttttttgtttaaaaaatgagaataatattttttttctttttttttgtaattttcagggtgtttgacactatagctaaataactgttctttatttttaaaaattaaaaatagttttttgatcacaagtaaggatgtttggcaatattttcaaaaaataatttttaacatgagaacaacaaaatttattttctaaagtttttattatggtatagttcctccaaataaaaatattttcataagactgttctagtaatgaaaagttagt

SEQ ID NO: 215597 - DNA, 598 bp, Cannabis indica
tatatatatataaaagaaaaataatctaaagaaagaaaacactcgaccggcccctttattcgttgtgttcggtccaagctaggagaatagtttatattattgtgaaatgattaaaaattatatatagcttagaatttcaaattcatgattaataatctaatcatgttttccctcttcaaatcatttatattatgacaaacaaccaccttacataccctacctatacatatacccaaaaacaagaagccgtaaaatatgtatagtattttatgactaattaataaattattgatgctttctccaaaattgtatgatgaaaaacaacataaattttattagattttaaatcaagaataagtgtttcggaggtcaaaggcactaagtaattttagttaaaaaaaagaagacaaaatagtcgttattttcatgtagtagtcagtagcgacgaaaacaatacaaacaaatttttaagctttggggataatagtgttgcttgggttgttgagtattatggggttccatctcaaaactaattggcaatgagtggagtagctcatattcttatatatggctcaatactttaccatttattccatgt

SEQ ID NO: 215598 - DNA, 743 bp, Cannabis indica
ttttttattttcaatatatatgctatataaaatgacttattacatttgaattgaaagcaacatgtaggagtaggacaattattaaaaggagaaggaaacatgcatgatcaattgtatgcctttatattatccatgtcatttgaataagaacaatcattgttggccaattatatttggagtcatagactcatagactttacattacaagttgatacattatacaattggaaagaaaataaatgaattagagaaaaatatatagaagcaaaattttaaattatttaataaatagatataagtgggtcacatcaataaatagaagcatttttctaaaagtaagattataaaaatttgttaaaatattatttatttatcataaaattaaggctaattagtaatttttccctcgaaatttgacatgtactaaatcatgcccctgaacttttttgagcgttaaaaatccccctgaactattaagattgttaaatttaaggacttttatctaattttagtaaaaaaaatttaacatggatgaaagtttcagaggggatgatttagtacatatcaaagtttgaagggaatgatttggtagatatcaaagtctggggagaatggtttagtacataaacaattaataaacaataaaattgtatgaaattagacaaaagtccttaaatttaacaatctcaatagtttagggggaatttttaacggcaaaaaaagttcaaggagtataatttaat

SEQ ID NO: 215599 - DNA, 633 bp, Cannabis indica
gcggggtcaggagtgatactacccaccctatattcgactcagatatatagtttccaaactttttatatatttttctaattattacatattaaagttattgactatatttacaaagttgactattaatcttccctaacttaatgtgtaataaagacttttttaatatgtagaatgtttgtttattttaaaattaatatcttattttttattttaatgttgaattactacattatttttttcttaatattattgttttaatcttaatgggtacataatgggtctccatatccaatgggaattctcctacctcgaacccatcggggattaagtgaggcggggcagggatggggcaaaaataggaaacggggacggggttgggtgctgcagttgctgtttattatctaccaaattttcatctcctttttattaatgatttattttttataatttatgtttgtattttttagcataatagtattttttttataaatttattagtataatttatgtttgtaattataatctaaattttttctaatcttgcattaaaattagggatacatagtactgggcgaagaattaacggggattcctaccccgtccccatcccagtcaagcattttaatcctcatg

SEQ ID NO: 215600 - DNA, 501 bp, Cannabis indica
cagaagcgtattatttaagaaaaaaatatatacattacaaattaaacatacaataaacaataaatcgtaacaaaaaaaaaaaaagaagacagcaataaaatactaaaagaggtcgtttatataataaaaaaaatgagactaacccttacgtttttttttttaaacaaaaaaaaagaaaaactgaaacactttttaataaacaaataaactgaaaaataattgagacaccataagtacacaataatacaatacagattagagctctaatatttaatgtaacagttacaaataataaaaatacaataacaaattttatacgtaactaacaataacccagtatcccctaaaaaacaaaactttacgtcacttaatcaaaataaacctttccaaaaaaaaaaaatacaaataacatatttttccattttccattttcttaagcgtgtttttgcaaatattacacattcaaaatcccatgatttttcaagttacaaagtaaataat

SEQ ID NO: 215601 - DNA, 523 bp, Cannabis indica
ctaacgaagaaacttaaatcgcaaccaaaatctatataacaacccactttaaaaaaaatatttttgaaaatttttatagtgtagccgtatgaattagtagattagactttttttattagttttttttttaaattaattaatatgaaaaaatgagaaaaaaatagagtagaatgaaatcattttagaatatcatgtcactgccttatatttcccctatacatatatatactaggcaatatagcagctattcgctcggctaatttaatttttttaatactataataaaaaatattatgatgttgtttggtaacactttttttttctaattttttaatcacaaaatgaaaagaaaattttgttcttgaaaaataaaaatgcgttctataacaacttttatttttcaattttaaaaacagaaaacaaaattgtgttctgtaaatttcattttttattttttttaagttctggtctaggtccggaatgggattcaggttcgggttagaggctggattcagcgccaggg

SEQ ID NO: 215602 - DNA, 733 bp, Cannabis indica
aacccgaattctcaagtaatcccgccaaactcccaaaaagttgtttgggtccgatttgacgaacgtaccaatgtaattgcctacacccctaatcaccttctccgacataaatccaatagtcaaattatgtagttgaacccaaaggtcaaaatgcgttagcggtattgatcgcggattaataccatgagagaccctttccattaacaatggcgcacgatcgaatgtccaagggctaccttcaataacacgctcaatatccacttcatggtaaaattgaaagagaaagaggttcggatcaagctctttcacatataagcctctacccggttgccatagagtggctattttattttgcatcgcctggaagtcaattgagcgattcgttaagaaacgccccaccaacagccaccgatcatcaatttcagccagaccatcttctcccgcctcaaacactaagccctcctcatcatcgtcctccactgtaaatctcgaatagttctctgttaagtcatgaatttggggctgtctaccacccatcgtcagcccagtcaaaataacacagacgaataaaaacaaacaaaaactttttgtatcaactcacaaccatgtcaaatatagaaagtttagaaagactaaaaacacgaaatttatttgtagtgtattaaattttttttgaattttttgaaatttacaataaattttaaataactttataattttatatattttttta

SEQ ID NO: 215603 - DNA, 610 bp, Cannabis indica
tctccctcttcgctgcttgtggttttggttttcttcttcttcagcagcctccttagtctcaaaaaaaaaaatgagaagtttttattttttacactttttttttcctacatttttccatttttgttttttcatcatcaaaattcaactttcaaatataaggtgtaattagtagaaaaatactaagagaccccttgtggtgctaagcattacaaccatgtaaaaaattattaatcatttacaacgcgctatattaatatggtgttgggcactttaagatgcctaataacaatacttgcaattaatattattagtggtataattagaaaaattatatttacactctcaaaacttataactaaacttcattacaagtttatcccaattaaatattgatcccatcacatttactaaatgaatattttttagaataccccaagacttaaaaaaaaggaagaaaaaatttctcaaagaacgggagaagaagttaggcttcaacataattgacgtcttctcctgagtcaagacttcgcaccgaatccaccagtactccattgccgctagggctgaacatcggataggcttaccgagtttcgagttcgcgggtttcaag

SEQ ID NO: 215604 - DNA, 784 bp, Cannabis indica
ttagttttacaagatatattacatgtgcctagcttaaccaagaatctattaagcatatctcaattcactaaagataatcatgttattcttgtttgatgattcttgttgtgttataaaagacaagaaaaccatgcaagctcttcttcagggtaatctctgtgatggcttgtaaaaacttcaaatttccccttaaagctttttcaagaattctgtcttccagccttcacctactgccctaaatcatactactaccaggaatccagttcttgacaagtccaaggctgctacagtgtggcatcatcgacttggccacccctctcactccatcctcaataaagttttttctactattagtccaaatatcaaatgtaatattggtaacttttgtaatgcctgtcaaattggcaagctacaccaatttagtttcgaaagaatactcaataaaactaccatgccttttgaattagttttaactgatgtttagggaccctctttttacactgctaatgatggttacaaatatcatgttagttttgttgatgatttctacatagtacactttggttatttcccatgaaatgcaaatctgaagtcaaatctatttttacttcagttcaatgcctatgttgagaggttttttcaactcaaaatcaagagtgttcaatctaatttgggaaagagtatgagcctctataaagctatgtttaaaatcatgggaattgttcaaagtaaaatcttgtcccacacacattaacaaacaagctcgtgtgtaaagaaaaataac

SEQ ID NO: 215605 - DNA, 646 bp, Cannabis indica
aaatttgatgatgttttgtaaaataatattccacatgattattgtgttgagtttcaacaagaaaaaaactattgaaagatataattgtgttcaactcttcttaatattctttttccttttatatcaaataagtgagattttttaacctttacaaaaaaaaaaaaaaaaaaaaacaagtgagatttttatattttaaaaaaaaatgttttttatcatgagatgagaaataatgaaaactattatgagattttctatgaatgctaaaatataattaatttatcaaaaacgttcctctaaataatagttagaataatatgtgcatatttttgcacacattaatattatctttttcaacacaaaaacaggggtctataaataatatatcactattgtttggaaaaaaaatatataatattgtataagtggataacatttaaataatgtacaatgttttgcttaaataatgcccaatgtgtaaatgcaaagtcctttacttttattttttatttatattattatttgattttcctatatgaacatattgccctacacaaaagtatcaagtatatatgtttacttttctaagatcaaatatatttataggtatatttatatatactaagtaatttaaagttataaatatttc

SEQ ID NO: 215606 - DNA, 571 bp, Cannabis indica
tttgctgaaaattattctatacagaaattctttgaatctagtgatagggtctaacaaaatatataaatactaataatatgaatataataattaaaataaatgatacagtataattctaattaaatagtaagaaggttcgattggtttacctctatagattaaaagaagaaaacttgatctctttttttgttttatattgctgaagaaattaagtattcatgtggagaaaatcagcctcactgaacccaaaatcttggaagattagtataaaattaggtcaatacatgtgtcttaggaaaaaggaattaattaattaattaattagtatatatataagagaaatgctaaagggcaccaatggtgcctagtaccttcctatgtgtcaatatcgctattggtacaattaagtatcggatcccatataatttaatataatagtttttaaggagtatcgctagccaatcacaacgcaacattgtcgcaaaagtgctaggcaccactggtgcctaatagcaatgcttcatatataaataattaacacacatttgtaattatgtaaccaagaatctta

SEQ ID NO: 215607 - DNA, 1012 bp, Cannabis indica
ttaaatccctaaaacaaaagtcattagccttattcttgagagagaccttaacaaataaattaaaaattcaattaacttgaacaggagttcatgaacactcagaatttaagctgatctataaataatcacctgttaagatatgaatactagcctttattagtaaatggattttgtataaagactttgattctcatcggtccttgtcaaatataatagtattatataaaatacttttatcgagatgtttaaccacattgataatttaaatctagattatttgtaccaacatgatacttagtaaatgcacttacaatcccaatttaagaatttcaaaatattaattaatttttgactattttattcattcatgtgatcttcattctctcatagtaatacaagatcacattctcaataatgaatatggaattttttaatatttacataaattattcaattagtaatttaacaatttaagtataataataaaccattgtatttatttgttcaagtgaaactaataaatatctttacatacttttaggacacacacctaacagatacacactcaaacaaagattacactatctggtttcatctcattcgagcaacaaacctacaaattctctcaattcaccagctctcagcctggttttataactagctttgtacatcaatttgtttaacttagtaattgatcattctaggtaagtttatataggctcctaatttggtagcgggggagagagaagagaaggacaatagaattaactaattatattagcttaagtcttggacagttaaaacagttggcttaatgccatgttactattttaacttcttgatgccatgtcagcaatccaagggaatgtctttgataggctgagaaataagaaccagacttcacaattctccaccttggttcttaattttttcaatttgtagcccttgatgtatttaggaacttgacttagaggctctaggaatcatggcttgataccaagtaagtccaata

SEQ ID NO: 215608 - DNA, 792 bp, Cannabis indica
tgataatatatttttttgcacatagtttgcaattaattaatataatgtatacaaaattgtaaaatgcctttatttattctaaataaatgaaacgttgcccttaaacattacacattagcatgttctacttgaaagagtgaatatgaatagacaaaaatactctcgatcaatataaaatactagcaaattagtataaacacaataaactaaattagaagtaatgaaagaagtaaagtataaaccctaaattattatactattattactaaaatcttgaattttgttatctttttcaaaaaaactaaataaaattttatttaaaatatagaattatagaaataattaatgcataaaatataaaattattcataaaataattattacacaaggttgttaaagtaaaattaaatttatatatatgcaaatattaaaactaataagttaataattaatattgtcaaagcatatttttgtaaattaatatggaaagactaaaattattgacacttttattgtaattattgattaattggtttgcatgtttattaaatactatataattatcaatatgaagtgatttaaaattaaaaagaatcacatcatgaaaataaatagtgatttatattgaactacaaaatatttaattaggaaaataaaataaaggttaaataaagtaaatttaactaatgtaaaaagcctaaaaacttaattgtacactttatgtatagactagtgaagtttacgttgtagtcacagtaatatataaattatataattatatgtatattaatt

SEQ ID NO: 215609 - DNA, 649 bp, Cannabis indica
aaacatgtcaaccaataacatatttatgaagtattcaatacatttatgacttgttaaagaactaaaataactttaaatatgtcattaacgagtcagtttcatattagtcgtgtcaacccgaatacgactcgtttattaaatgagttagacaagtcaactcaaacacgatccaaactcatttaaagcaaacctaaacctgctaattcttgtgcgactttcgagtcttcatatcgtgtttgacccgttttgccggccctagtccaagtcatttattattaattaaaaaattaaagttaaattataaaaatatcaatatacatatttagtaaaaaaaaaattaaaatactattttttatgttttattttactatttaagatttaaatttttatttataaaaatacgtttataaaattttaaattacaaatatacactttattaagtaaaaaatatataaaaaaaataactaaaaatagcaaaaaaaataaacaacaactataaataaattaaaaaaacaacctcatacatctataatataaaataatttattgtttttattgaagtatttttggtaaatgaaaaaatttccacatattttttcttttcaaacttttgtttttctttcgtaccaaataaccattttttttcct

SEQ ID NO: 215610 - DNA, 773 bp, Cannabis indica
aataataataataataataataaatatttatttattaattataaatcagttaatatgatagtaaatatatagattttaataattatagcttagtatatagcttagtatttaatttattaatgtaaagaatgtaaaaatatgaagcattaactcgaactcatataatatatattacgggttagttggttgtttaagaagaaaagatcggcactaattcgagtatggtacaaaaaatattaaatttggcctgcggatcatatcgtcataccttataaaattattggtacgatacaatacaattcatatttttttcatcattatggcacagcacaacttatatttgtgcatgcttttaaaatacgaaccaaaccaacacaatagacaatacccacctaattttctgcaacaaaacctcttctatctcttttctctttgaaagttcactttgattcgaataagttcccaacctagaaaaattacgttaattgtctccaagatcgagattcttgtaagcctattagtcctcactttaacagatccgttagttgctctaaaaaaatgtcacatactaatattaaattgtagcataagtcccttaaaaattcactttaatagagataagtccccaaaatattcactttgatggagataaatccctaaaaagtttactttgatgcagacaagccttcaatctcgaaagatcgcggtaataatccccaagctcgagattctcgttagtctataagtacccaatttaacaagttcacttgttg

SEQ ID NO: 215611 - DNA, 666 bp, Cannabis indica
agatatagtcaatgaaacaatttatagaaaatgaaggactatgttacatatcaagctaaaacgacagtaaaaattgaggacatatacagtgtagaattagataatattaataataatgttaaacaaattaataaacgacaataaagctgaaatatacaacaatagctagagaacgacctataaggatatattatgactaagaaatttattaaacgacgctaccaataataataataaatatatagacattagacaagaactaataatgacagtaatatgaattaatagaaaaaatatatttaagatgaaattggctattttattttcaacaatggtagatgttagtgaaagaaattgaagccaaaactatttcttcttgcctttaatgggtgcaagatctcagtgtctctattcattttattgagactcactttctcaatgatctgattcggaatattatttatatcagatgtctttcttctttggtgcatctctaagtcatatttcttggcgtgctacattgctagattttcttttcaggtggatactgattatattcagagtgctgattttcctatacgtgttattgttgtaaaatgaactcattcattaattttcaatagctatattctctcaaaaagaaaatggtagatgttacaaaacgac

SEQ ID NO: 215612 - DNA, 818 bp, Cannabis indica
aataaatacttatcaaatatcaaacctatagaagaaatcagattaatctaacttaattcattccactaacgggcaaaagaaactatatggtaaaagaccattttgcccttgcttagactgaaaagcattcatgccacctaagggtatttcggtcaaacctaatacgtcaaatattcttgacattcccaatatctatctaatttgccccgctattactaaaatactaaaccataagaaaatttaactctaacagccaaatgtcgcgttctactgttactaggcataaaatatgaaaaacatgaaatttcatatataacataaataacacacctagaatttaaatatatttccataaattcataaatcataattaaaagtataactctaatttaaaccctaattatctgctaattttaatattaaaatttagcgatctttacacgagacctgggatctggacccaaacccagaccctagacccagactcaaactcgggacccaaactcggactcggacctggactcgggcctcgacccaaccggaactcagactcgggactcgaacctgggacccagatcgaggatttggaccccaaaaacggacccagactccagacctggaactttactcgcactttgacctagattcgaacctggggttcaaacccaaactgggacctagactcggacccaaacttggactcgaacccgagatcgagacccgggaaccgcaacccggaccctagactcgaaacccgcaacctggacccgaaacccaaacctaggatctggactcgggacttgagacccagacccgga

SEQ ID NO: 215613 - DNA, 912 bp, Cannabis indica
tggttcatcaaaaaataaaaaattaaactgccaaaaaattaaacttatttaataggcactgacaattttattagcgtttagtaaggtgagaattaatatcttagatctaaattttttttctttaatctcatgggttaaatagatattaaatcaattaatttatttttttatataaaatatattaaatatataaaattataaatatattataaaaatatataaatataattcaatgactgttggatgataattggatcgcttgtgttcggttatctattagatcgaatatcccaatcaacaaccgatccgataggattttcaaaatttacattcgatctgatctaattatgattagatatccgattttattgtatcagtcggttgtaattggattagatgattttctgcacacttctacgacactagttttcctctttcttatgcaacattgagtacttaaaggtttaactctttagtgcatgtgtgaattattttccttcaagtgccacttcccttttaaattctctttaatatgtaaccactgacattagaaaagtttcactggtcgtgtataacactttccctttgcatctgatgatgtagtcttgtcatttgtactcttttattctaaactagttaagcattgttgtcgccttgttggaattctccttggattatgggttcaaagtgaattgccatttcttgaattattgaaaagataaaccctaagggccaaacctaggtatgcaatttatttaattaggacattgatcacaatttttatgttcttttccacgtggcacttcgtttcgtcttttaaaagttggccaaagtcttccttgttggcttgtgtgtcttcaaggtgtattcctagctatcttgtataggagaatcttatttatcattatttta

SEQ ID NO: 215614 - DNA, 677 bp, Cannabis indica
ataaaacctcaatagataacataacatcattttcatactaaataaattgactaataattctagtgaccatggttgttgggtgggtatcttggtcgaaaggatgtaggcattttttcatgtgaaatactaaaaggcactaatggtgcctaatacccttttatgtgtaattaatatcgttattggtcaaattaaatatacgatcctatatagttgaatgtaataatttttagaaagtatcgctagacaattgcaagacgacatatcaagaggcactacaaaaaatgtcacttttactagcacaatttgctactgcgctgataaaaattacttttgccagcgcattttacaaactgcactagcaaagaggtcaaaattttaccagcgtacatttgcagtggctaaaatctaacttttaccagcgcatttacgcgctgagaaaagtcatttttgtcagcgcttttcattttatgttggcaaaagttctaataccaacattgatttgccaactcccttttgccaacacataacaagtaaattctattttaccatcacaataccaacttttgccagcacatttagtgatatttcttgtagtgaggtgttaggcaatattggtgcccaataaccatgctcttttttcatatacaaataattaattttagggctataaaagtaag

SEQ ID NO: 215615 - DNA, 589 bp, Cannabis indica
tgaatacaatggttgaacatgaattcagaccctatctatattggctagagtagtggccactatttctacacatatcgcattacgattgactagcgatattttttaaaaattattacattaaactatatgagacatgacacttagttagacaacaatattaacacataagagatgctagacaccactggtgctttttaacatttctctatcatatatataaaaaaacaagtactaaaagatactactagtgcctaacattcttctcggtatcataccattattaatataattaagtatcatgtcttatataacctattaaaatagttttttttttaagaatatcattaattaattataagacgtaacttataaaaagaattgggcactggtgtacccaataacaaagctcataacaagaaaaagaattgttgtcggtaaggagtaacatcctatgtcctattaggtgtcatgcaagttacaagtttttactaactttattttttttattttttatttattttgtttacaaattaaataaataatatatgaaccatacataatgtccaataagtatggattaatatattgg

SEQ ID NO: 215616 - DNA, 696 bp, Cannabis indica
cttttgaacattattagtgtttaatgctttttttataaatgacattttataattagttagtaatattttttaaacatttatttttttaaattggaatccaatacttaattacattaattataaggcataccaagaaaaatactataacccaacccagtatcttttaataattctcattaattttaaattatccttggtctttgatttgaagcttgaccgtgcgtgaccatagtggaaaaattgtaacacaaccataaatgtaggaattgaaactttgacttattaaacgtcactttctaatatgactaattaccatttttttaaaaaaaacttttaattcttgaaacagaaaaatgacttgttgtatgtataattaaggtataactatatataaaatataatctttcaactaatcagtaaacaaaaatataaacaaaatggaatgagttaaaagtgtttttttaattccagtcaattgctttaattagacaaaaatataagagagagtcaatgacttctttttttatttcaaatgagaacaatgagtacgtaagaggaaattgactgatgagatatcaagtatgcatgcatgcatgtatccctattaatgagatatcgtgtatatgcatattgataaatattgtcattataattaattagtgatgtccaaaattacatcacgaaaatctcacatat

SEQ ID NO: 215617 - DNA, 519 bp, Cannabis indica
ttaaaaaataattataaagataataataatttcataaattagtaattatctatcatttcatcactccatcattcatccctctctgtaatatcctaaagattgattatgttcgagattggccaacaccaaagccggatactaaggttagaagctttttacgcttagctggctattaccatcaatttgttgatggtttcttgaagattgcaacacctttaacgtaattaataagaaaaatttaaagtttacttggactggttggtgcgaaaaaagtttctaagagttgaagcaacgattgattactgctccattattaactcttccttctgataaggaaaaatttcttgtatattgtgatacttcaagactgggtttgggctgtgtcttaatgcaagctggaaaagtaatagcatgtaggggtgagtaatggtcgatttggtcggttttttacacacaaaaaatccaaaatttggttttcagctttcatggttataacctgaaaaccgaccgaccattata

SEQ ID NO: 215618 - DNA, 895 bp, Cannabis indica
atatataaagtctatttatatatattggtgcatgtattatatatatatacgtaccacatgcaatattataaccttgttgcctaagcaaccgaaagcaaagagcatcagcataaaggttattatcaccaaaatcaattagattttgataattattatgaaattgctccaaattttgttcaatttcattttcaaaataataagacaaccccaatcgttgaatatcatcaatatattcaagtgtctccaaagggttttccaaaggatgaagaccatgaagtaatttattcttcacttgttccttcatctcaataatcttctcataactctctttgttattattctccatagtttcctgaacaaacacagttgaagaagatataaatcaatgatggagactatatatattttaaatttatgtatattaattatctaaaaataagacatgcattaagggaattttttttttttaatgttttatttacaagtttacaatcaaaagatttttacttacacaagtacgtttttaaagttttaaaattaaaaaaatatatgcttttttccagaaaaaaataagaaaacaattaaaaattaccaatagaaatcaacatgcacgataactataaataaattataaaacaattagaaaaaaaacatcatgtacaactataatacatctataaataaactataaaaacattaaaaaaaaaaaaaaaaacaaaaaaaaaaaacaaagttattattttacttcaagtacatatattgtaataaaaaattaaaggttaaaaaaaagaaacttaatgtgttagcatatttgtaattttttaaaaaacttttaggttctattatgtaaaatttaaaaaaaaaacaaaataccataagagatgagtgatgatga

SEQ ID NO: 215619 - DNA, 524 bp, Cannabis indica
gaattatatacttattaataaaaggcttcgctgttattattttttttaccgttattcaggagttttgtctaaactgaattagttagtaatcaaagcgttttttattttattaattgaaaaacttcacaaaagataaggttgtttagagtattattcatctacatctactgtcattttaatacaatagtaatgaaacgttatttctatagaaaaggaaagcaaaagaatatgacaggcgagatttgtggatcaaatcttaacatctggtatatgctaatgtggaatattatcattagcctaaatagtacataaactaggcaatactacattaaagtaacatttattgttgatgtcggcattggggaaagctaaggaatgttcatccttattttctttttcttttttcttttttatcattgagagtaaacactgaaaaaatctaaagaaaaaaaagaatagtaagaaaaatttcattaatcaatattataaataaatgttgaaattattaaattaattatcaccat

SEQ ID NO: 215620 - DNA, 1019 bp, Cannabis indica
gaacaagaatttttgttttatactacaaacctttcaaatattatagaccgtgtgttttacaaaagttatcaattagatcatttttttttttattaaattataatttagaaattgtattttctaaaatggtacaaaataggaccatgagctcaattttaaacaatttttttgatataatcaacttgaagataattcttaacatgaacagatgcaaaaaaaaacaacatctctagaccgcctattattagttttattttgataaaagattagttcatattactatttagtactattttgaaaatacatagtctaatttgttatttaataaaatagagagtataatcaataatttttacaaaatacaaggtctaaaatgacatttactcttattttaataaaaaaaattgtaaataaatgaataaaaatattaaatttttattgaaagtaaataaaaaaatatatatgaaatatataaataaaagtacaaaaacttattaattataatgagtgaaaaatgaataaataaaaaaatgatatttattgtgttgtaaaatttgatgtatgctatattgtgtcaaatttgatacactttctaacatgtgtcaaatttaataatttggatctcattatacattattattggtgttcaattttatgaacatagactaaaaaatacatatacaccacttttataacactactcttctattaaagatgctctaaagagagctctaaaaatatgaaacaatattaaaccctaaaatttaaaatacacactaaaaagactaaatatactacgaaagattgtgttatgaagacattctagacagatgaaggcgacacattctcctcatctatctcgtctttgatccctttgaaacaaatcccctttggtttgaatcccttctcaagcattttctcaacctcctcaaatgaaagtcccttagtctcaggaacaacaaagtaaatggcaataaagccaatgaaagataatcccgcaaatagataaaagtccaagc

SEQ ID NO: 215621 - DNA, 679 bp, Cannabis indica
aattaaattttaagctctcaaatattagttttttactattaattaagtattttcataattagtggcggacctagatagagataagtagaggtgagtcgactaattttattttttttttttggtcatttacaatttagtatttttgtgtagatttttttcattattattattatttatacactcatttaatattaaattttacatttatattttttaaataagatttttcttaactttcattttcaccacaacctgtaatgatgattggtttgaagaaacacaaaactcgtattaatctcaacccattaatataattaattatattaataagcaatcaataatgttcaggcactacatctaggtcttatatctttaattttctttttaattaaaaattaataaaaaaatgaattaattatacataaattagatggtagtgggaagtttttttttttacctactaaaatataatagttaagtcattttctgcttttattgtttaaatagttaagaaaaaaagtaagtacttctagtcttctacaacatggacaagtacaaaagagttaattattattaatataaagagtactctaaaattcatttttattcataatatttatttctattttcttgaaaaaataggtagctcaagttatcatttgtatatacattttctaaa

SEQ ID NO: 215622 - DNA, 583 bp, Cannabis indica
ttctccattgatcagtatgtagactgtatgtaagagaaatagtttgtcttcatcggttccctaaagtccatttatttctaagtagggatccggagttcacatcaagcttctacgagagtttatatcgagctatgggtactcaactgaaattcagtatagcattccatcctcatatagatgaacagtccgaaaggaccattcaaattttagaagacatgctacaggcatgtgtgttagactttgaaggatcagggtaaagtaccttccccagattgagttctcgtacaacagcagctatcaggcaacaattgggatggctccttaagaacaactttatggaagaaagtgtagatcacctattcactgggatgaagtaggtgagagaaagttcttgggtcccgaagttattttgtgaacaagtgaggccgttgataagattagagcgggaatgctcacgactcagcgtagacaaaaaagttatgctgatccaaagcgacaggatattgatttccagatcagagatatcgtatttcttcgaatatctcctatggaaggtattgaatgctttggaaagaaaggaaaa

SEQ ID NO: 215623 - DNA, 566 bp, Cannabis indica
taagtgttaagtgaatagccacatgacagtccttgattagtctgctaggtcattaaatttttattttttatttaaataaactaataaaaaaatgacatgtgacttgacacttaacggtacgaaaattttaaaaatataacttaagttttattaccctaaaaaattaaatttaaatattcatccataactgaaagttaaacttaaatttttacacccaaattattcttttattatattattatataaactaattcgctcccctaatttcttttgtttgggtcggtaaatgttatatagtttgaggaaattatactatttacctcttttaatttgatacttttaatttttactctttctttcaaaatttattatgtttagctcttttttttcaattattctaccacttttacccctatcacttcacgatagttttcattcttctctaataaaaaatttactccaactttcccacaaacctactcatccatctacaaaaaaacacaaatctattacatttgaaattatgtcttagttacgcgagtctgtgaggataatttgggtacaat

SEQ ID NO: 215624 - DNA, 691 bp, Cannabis indica
atataaatatatgttataaacaaatgagtaaattgaactactcgatttcaatagggtacaaaatcttttactaactaatatataattttttcctattttgttttccagggtaagaaaagtccgtactaaaatgacaagatgaatcttttgcatgatcagtgaattgaatatgtccgagcaccggctgtacaacaagggttattaagatgatcaatttctgtttttgtttatactttacactataatcagttactttcatataactaacaattaaattaagttagagtatagtttgtatatatatatttcagtttctgttcattttaaatttatgtttatattttatcatagctaattagtgatattatataaattagtaaagttaattaatacaagagaaaaatagcaaaaaattttcaattttttctttttttttttataacaaaatgattgggaaaaaccgtacgctgaaaaatacgaaatttataattaaactgaaaactttactataggcgacgatttaaaactagtggcctatatataggtcacagttttaaaccgtcgtcctatagtgttaactatacgcgacagttttaaaccctggactcatactatttccccaacacttttcaactgtcgtctattctatacccattgcgacgctcgtataggcaacgactttatgaactgt

SEQ ID NO: 215625 - DNA, 988 bp, Cannabis indica
ttatattttaaaatatattttagatataacgtgttaattactcatgaattttgaatttaattgacaaaatagttagtaattagatataaaatatattttttttagtaattaacatttaaaataaaaaattttagtaattatacagtgtaaatacacacaattcttataggaaaaataaaaatttgagtgtaattaaaactactcaattactttcaattacacaattatagcgtaactatataattaaacaaatattttatattgtataattacttttaattacacccaaattcaatttctacataactttcaaaacacactctaactaaactacacataattagggttagaacacttaaatcttcatgattttggaaatatcacaaacttaaaacaaattcaaagtactaaatccagtcatcaaactacaaaggaactttgaatggcatattcaaagtataacagttccaactagtgcaaataagcagcgcagtcaaaaacagaaaggatgagctcatctttgttataacaaataccatttaagaaacaaaaacattgacttaaaagagtttttctttaccttcaagaatatcatatgcaactatggaaatcttaacaagaacccaaagatgaaatttttggctttaggatactctattttacaatgttttctataattcaaaacaaaattcgatgtgattcaaaagaaagcatgttgtaaatggtgactaaatcaataaaagaaaaaaaagtatgtcaaagactcaaacaaataggctgctaaggcaaaatcgacaaggacaagttgttatttgatggaagacttactcacataaataattcattgagcaacaaggataactcaactcccaaaatggaacattgaaataaataaataataaagcaaaaacaaaaatcagtttaaatgtcattttaagtagaaaaattgacaaattgtagaagaatagaatacactacagcagagaac

SEQ ID NO: 215626 - DNA, 517 bp, Cannabis indica
ataaaacatttttacatatatttaagtcacaaaaattatttataactaatttttaaattatattatttctacagtaattaattagtcaaactacaaccctactaaaataattagtcaaaatacattacttattattgttatttttttttatttgaatcagaggtatattattactcaaaaaaatttattattattattattattattttgaaaagaaaaaaaataatttatttaggaagtgtatgaactattatatttattgttcaattagatcattttattagttattgttagagaaaaaagaaattacagaataattattataattttctataaaaaaataaagaatgtattatgtactgatccattttgtatttagtaaattataatatttaattacatatctcattaaataaagacaactattcagtatttataactatatttctaaccaactatttttttaatttacatatcaaagttaaaagctagttcgcgtaaaaaaaaaaacgttaaa

SEQ ID NO: 215627 - DNA, 789 bp, Cannabis indica
gtcgttctccacagagatctcaattgtcctccctccctcaatttgttttttagatcacagcttggtggatgggttttccaaatttgtttttgatttttttttatacttttgggtataaatctgtttatatggatatttttgtattttttagattaaaatactgaaaaatataatagtgttggtgatgattgtgtattggggtttcaatgcgacggtgtaatggtggtggttttggtatgctgtaatggtggtggtggttgtggaagagaggagttgggtggtggtggtttcggtgtgatgtatttatggtggtggttatgggagagaggggttatggttcagttttgtgtggtggtggtggtgggtatggtggtagtgggtttggggataatgggagttaaaagagagcgagaagttgtatttgggagagagtgagttacgaagagagaaaaaaaaaaaattaagttaatttttttaatttttaattttaatatgatttatttttattgtttttttaattttaaaatatttttttatttttttaaataatgtaattatatggaacaataagattgtgacacgtgtatagtgtatacatgtgaacaattcaatatgatagttaacaaccaaaattggatagaagtgctgctaacaaaatataagtattgggggttttaccgccaaaatttgcgttttgagagttaagtgaaagtattggggggtttgccgcaattaatcattttttattttgttatgtataatagtggtatataattttgttaatataat

SEQ ID NO: 215628 - DNA, 717 bp, Cannabis indica
ggaattgaaccagtgaaattattagtaaaaatagctaactcctccaagttactcaaccttgaaatattaactggcaatactcctgatagttggttggtatctgcataaaaagtgattaggtttttgaggttgcataatgagattggaattggacccgtgagatggttcttagaaagatctagtgttttaagtttcttcaagtttccaatctctaaaggaattgaaccagtgaaattgttgttatttacataaaagaagatgaggcttttgaggttgcatagagaagttggaattggacccgtgagattattataagaaagatccaaagttttaagatgtaatagatttttgagttggccaataaaagaaggaatactcccaccaaaggaattttcatgtagttcaagaacctcaagatcatgtaggagaccaattccactaggaattttacctttgaggaaatttgtgtgtaaatgaaggtgtttgagcttagaaagtttccaaatattagatgacaaatgtcccacaaatttgttatctgtgagattgaaagattcgagtttaacaagattggaaaatacagatcgtggaattgacccagtccaactgttttcagacaagtcaaggaaggtcaagttcctacactttgatacgaaacctgggaatgttgaactaaagtggttcttataaagatcaaggtaggttaaggaaggcatg

SEQ ID NO: 215629 - DNA, 832 bp, Cannabis indica
ggaagggaaaaagggagaggtcatgggttcgaacctaggatcttgaaactattaaactattaaatgattgtaaaatactattacgctacactcaaaaaaaaaatattaattaaggaatactaaaaattaaaaagatgtttttttttcttatagtacattgcaaaaaattatgacacaagagaggcaaatcatccatcataacaaaggcaattactatcggaaaaatactttcattttataaactaaaagttttacaatacaaaatattcttaattataaaatacgccactttatttacaaaacgtgactgaaaaaacgcactcataatattattcttcattatcagtcgtacatccacaaccagtagatcccatctcccatggagcttaggcaacttatccaacattgccacaaccaaactacaatcagaaaaaatcatacaacgctttatagataatagaccacccaactcttttttttttttttgaataaaaagcgtgtatatatagatatcaatagatctcatggtcattacagaaaagatttgtcggaatggaagaaaacgggatacatccaaaccgctggtgggtaaaggcccatttcgtcacattatgggctataaaattacaggtcttactaatactagagaaaatacaactaacacacaaaggagatagtctattacaaaaagagacatagtgttcaagcgcccaatgagtctcctacccacttaagtgcattgatggctactctcgagtcgctctctacaaaaataaacttagcatctaatatccgaagctacttcaacgccaagcatgcagccgcgttccca

SEQ ID NO: 215630 - DNA, 772 bp, Cannabis indica
taaatcttcaatgatcgatttcaaatgtcttgattttctctttttcagagaataaatatctgatttccttttcaaaactataaaagatgtagggctatggaggttttctttgaaatatttcttacccattgctaatttactagaagaagaagaagaagatgatttttgtctttgatgtttccaccttggctccagagttggtaaacacagaaaaaaaaaaaaaaaaagaaccctagtgatagtccatcaggttactttttctgcagcaaaccctaaagtagggctaatggacccagttttccccttaacccgaatgcgggtatcgaaggatcaaaatcctgctcgtgatatataactcaggcgggtcaccacttcaagagttaccagctagacgaatggaacttaatcaagaatggtgcatcaaatgaccttctggcaagaagtgttgagctcttccagtcggttaatgtttgattttcttattttattatatcttctttcttcctttttttaaaactcgtattctatgtaggcttctttcttggcgcactttgatttccaagccaatcaataacattcaaatcatctatccttggagctaagtaaggccaatgaacatcgcgagctgctggccacccaaaagaatgatattgagagggagaatacgtgcctaaagagaaagtcgaagacttggagaagtctgagaaagacttgaaggcagagtttgaatccctgagaaaaaacttattggaaaagcactgagagagccgac

SEQ ID NO: 215631 - DNA, 1024 bp, Cannabis indica
ttctgtgtcttttcttattttcagtttatttaatttgacacgatctcaactcactcattagtatttttcatacaataaattaaaagtgaagcgatactaaacaggcccccaaatttccttttttatttttctttttgttatttctctacaaaattaaaaaaaaataatatagtaattacttaattaattaatacttacaagtgggtcaggggtatcctcttgtttgcacataaacccatgggacacctgtgttaaggccaacagccatttgagctgcccaatttggtgtaagctttgccaggagcaccaatttcccattctgttggtccatattcattttcaatctagtaaaaaaaattactttaaaactcaaagtttatacctttgactaaccccaaaacaaataaatatactacaaaaaaaaaaaaaacccaaaacaaataaatacttttaagtaaataataaatgtagttttcaaagatagttaagatttttatttcttctagaaaacagagtttggttttccataacatacctgtgcaagaataatgggacccccttgagtttcaaacagtctttcagctttcatcatatttacaatcatacttgtgaatttttgcattgccgccttcatcatatttaattaaaaaagataatacacattaattatttattaattaagaaaaaaacaaacaagaaaagaatttaatcatgaaatgaaatattcaaggtgggtttaccttgaaaggtccattgtctgttctaaaagcgattccagggacgaatttgagccaaacagggaatcctctgaatttcaaaaaacagagtacaaattatttcatatttatattttttcccaataaattatttaattttaattttaaatttttttacccaaagttccattcggcacaaacatagggaccaattcggagatgaacatataggccagcttgatgcaccagcttaatgaacttaaccaaatcataattatcttggaaattaaactgcaaattagaaaaag

SEQ ID NO: 215632 - DNA, 648 bp, Cannabis indica
gaatgtattatgggtgttggaccttttaatagatgtggatgttgtgtagatagaatgagtttgctcacaagcttgctaagtgggtatttaatttttcttattttggttttctgtctcttgaggagttggttgctcttgtggccaactagaacttttcctggtttgcttagttttgagcatgttttaatatatttgaagtttgatcaaaaagaatgaaattgaatgtaatttagagtaattgcaaggtttaacatatttgtccaattgtaatcacacaataatcatctaattgaagataatgtaggagttttcattacattcttcaattttcatggccttctatgaaaattatgtataattataatatattattatttgtagataattaatgttattaaactatttaattaatagctcatttgccaaatataaaaatgagaattcatatgtcattaatacttgacatctaaacacacattgtattttaaggagaattgctaaaaggtgcttaacatcttttaacatgctacatcgttcttggtacaatcaagtatcgaatctcatataaaatatcgttaactaatcgtaaatgcactaagtttaaatgatgttacgcaatgccttacatcaatgctctattttaaaaat

SEQ ID NO: 215633 - DNA, 634 bp, Cannabis indica
cacttgtcattagaatatagagaaagtgcaaaagagaatgtaaaatagagtgtgattagcactcctctaaatacctatatcttcaaaacaaattgctttgttggtacctacttcacacctcaattttttatttgaatgcaatatttaattagtcaaaataataattttataacaaaactaattttgagtgatttataaaataaaaatttattaaaactaaaggaaaagaaaatcagttctcttttatatttaccaacttcttatacatgaaccacgaatccagctcctactccccatctttttctccagatcctaacacctgaaatattaaatgataacttaataatattatttctaattatttataaatataaatgtttaaaactatttattctatacttcattctttttgtttccaataaacttattaatcaaaatttataaacaaatcataatttgtactattagacgaacatttgatttggtgccatctaaaaaaaaaacttcaaaaacacatctctctaaaatcgtgatggcaaggaaatgatctcgatagacgcaacaaaccttggggaagacgtcggagttaaggtcgtcgagactttttcgacagaaatgatgatgacaaggacga

SEQ ID NO: 215634 - DNA, 941 bp, Cannabis indica
acaagttaagtattttttttatttataacaattcatttagccgattaataaaggagaacactaaagcacaattataatatataaatgagtaataatataagggtgaacctcttatactattattttgttgtctactatttggttgttagatgaaaaattttagtattttgatcaccttcttagagtcattatactctagaccattgttttcaaaaaagttcctccttatgtaatagttgagctaaggaagattcgagctaaagtatcatagtcttggccaatttgattctcaacatgagcaagcgaagcttgagtcgctttgatatcctttggtaaggaaccatatttgttagagtgccacttaaataacctgattgagcaaagattaatattggaaagaaccattgccaacgccgaattggaactgttagttagccatttagatgatatagcctacctctttacattcctcatcctccttccacatggtttcatatcagaatttttttgcttttgagaggattgttgcgcctcatccgtgtcaaagaccacattcaatttaataggacgatggttagacataaaaatctaaatgagaaagtatatctgagaaaaataattttagccaaaaagtgttagtaaaggcccaatctaaatgttctaaaatatcaaatttattgaactatatttccaagtgaacctattcccattgaaattcataggaacaagttcacatactgagattacttccctaaattgtaaagtcatattaggatcgtgtttgccctgagcagtggtaaactaagaagatttttagcaaccacgaactttcaaaatctgtcatggctcaagtgactctcaacttcaacttgaaaggtcagaacataaacttctacatgaaaaattttatgtcccaatctggttcgacatagagtaaacac

SEQ ID NO: 215635 - DNA, 649 bp, Cannabis indica
aaatactgatggatggagtatctcactaataatatacgggctcggtcccaagctcctcactcattctgtacaaatagtaaagtccatgtaaaagagtagagagagtttagaagcccgattacccaatccaaagctacactagattgaatctcgaagatcaatgactggaggtattacgatatctttcgttgttcatctatacacttgacttgtctttataattttgttttgcgaatcgattgtatctactttatttttcatataataatacctaatagttggcatcagagctgtttttatctgtcttgatttatttttgagttttttgcttatgtgttatcctaattgtccccacttgacgtggcagtgcttacgtggacaaaatcagtaccacgttgcagtacaactcaccaacaagaaggccaagttagtacctaagcaaatagagaccccgacactcaaacaggcatcaaatgacagaccagcttcctcacagaagctggtcggccacccctggccggctagcctctagacagcaccatggccagccagcctgctctcggcaagagtttggccagccaagagaatgcttgcaggatttcctgtgcaattctataggtggactgcatgatttaggctgcgaatcggg

SEQ ID NO: 215636 - DNA, 784 bp, Cannabis indica
attaaacaacttctttagtttcttccaaaaattctcacaattttgcctttctcctgcatacaaattaccaaaaaaaaaacaaagaatcagaacaaattttcataatttaattttattatctaaacatgaatcaacccttaatttatattccaaatatacgataaaatacgatgaggaaattaaaaataattgtttaacttaccttgaaagtgattgaaaaaatcctctgtaccatgcacaatgacatgtccatcattgtaaatattccacttagtaatcttcacattattgatcgaaacagttccattatcaaacacttgagttacaaggagtttttctttcgaacgagttgaagattcaaatgtagaacctttcgataaagagcctgattcaaaagcttccttgtcaacttttcccatcacaatttggtatttcaaatcaatccatttttcgaaacggactgctttgttcggaggaacaaagagagtgattgtgttgttttcgccatagataatgaatctattttggtcatccatgaagaatatgaaatcatcatggcaataagggttaataatatcggggttaagatttttatcgagaatagttgacattatttggtaccctgtgttttcgagagctttcactatatttgcaacttctactattacaatgtttgtgtttttggtggttttgtaccaatccaaataacaagatcgacataaattattagaatggcgatattcgtaataattacataaagattcataagaaaaagattgagaaa

SEQ ID NO: 215637 - DNA, 670 bp, Cannabis indica
ataggcacggacggacacacttatagacttgtgagggctatagcccccaagtaaaaaaaaaattgcaattaaaaaattaaatatttttttatttgataataatagcaataaaaaattaaaaaagaccccataaaaataaataaattaaataaagtaaacaataaaaaaaaaattaataacaattaatcccccacataatagggtctgttactgcttatagattttagtaatgtaatcaaaattagtaaactaataattatttaatattttgacaagatactacttggtaccctatgtttattttaaaaacttattaaaattgttcttcaacatatacttaaaaaaaactacaatctaataactttgaaatatgaaacattaaaatttactaatattatttcaaaaggtaaactaatgttgattacaatttatttacctttaaatattaaatctaaaattttttttttaacaactaatgaaactgtttggtatatttaatttttttaaaacttcaattttgattttttttggatggaaattattttttggttaattaaatcaaaagaaattaaaagttttttttttttgaaaataaaagaaattgaaagttaattaccttagatttcggttatttatactggtgatagtaagaaaatttatacttcccaca

SEQ ID NO: 215638 - DNA, 608 bp, Cannabis indica
tgtcatattactattggtgtaattaattacagatcgtacttatattactttaataataattagtaaaaaaatactaaccattgataatcaccacaacacacgtaatagcaaggctcattttttatataaaaaattactctccactcctaaaatctcatctctcattgatgatatcacttcctaatagtaatgttattttataacaacattattttaaggcatcaaggtatttaacactactataaggtaacattttataattggttagctattttttataatttttaataaaataaaataaataagacataatattaaattgcaccaataataatattacatctcacgaatatgttaaccatgcacgatggtgtcttttagcatttcttattttataatgcaagctctagtcctctcataaccaagtgttgtgtggtgtatcagtggtaggaatgcctttttattggaatattttcttatttgggttaagggatgaccttattaaaggtaaaggaggatgatatataaagtctcaatagttgccacgtggtccccgaaattgtttcagctaccaaatgttagaattttatgtcctaaataaaactcaa

SEQ ID NO: 215639 - DNA, 396 bp, Cannabis indica
gtttagactaaatttttaaaaaacaattttctaaaaactaactaaaaattagaaaacagaaaacattaaaatgttgttttctattttcgaaaacaattttgtttttttgtctaacatattcttttttacattttcgctcatatactcagacctaaatctggactcggacttcgaaacccaaactcaaacccctaacccatgtccaaggtcaagtcagtcccagggccatgtctagggtcgggtggtcccaagaccaagtccaagtccaaatccaagtctgggatccagagtgggctaagttcatgtcgtagtatgatatagaatatcaaacaaccttttactcattcagaggaaaaagattttgatttctcaacaaaagagacagttttgaaatta

SEQ ID NO: 215640 - DNA, 635 bp, Cannabis indica
cggtggtggtgggttgtgggttctaacggtggtggtgggttatggtggcaatggtggtggtcagtatgatgaagaagaaagaagagacagggtagagagaaattgtgaagttaaaagaaatgatgaaataaaaaagagaaagagagaaaaagaaaaaattgtttatttttaataatttatttttgttttaattaatttattttgattttatttttaaatagttatttatgtgggccaataatattgtgccatgtgtacactatatttatgtggacaatatcttatgtgcacatggacagccaacttggcacttaacaactaaaaatagatggaaatggttaagtgctaacaaaacataagtttaagggattttaccaccaaaattttagaattgggggttagttgcagtaaactaagtatttatggggattatgctgcaaattactctttcataaaatattaatttttataaaaattttacatttttaaatgtaaagatttttttttgtatttttatggtgttctataaaaattacacgaaaacaataagcaagaaaataacatccacacatcatcaaaacaacaacaaaatataacatttaaaagtactttaaaagaccgtaatttttgtaaat

SEQ ID NO: 215641 - DNA, 631 bp, Cannabis indica
gtagatatttctgtccaattaccggaaccaaacatattcagcccttgtagaaaaatcctacaaatataaaaccaagtattattagtattttttataatagatgtataaaaagtaattaataacaataatatagcatgttaaatgtattactacttacatgtgttctttctcagtccatcgaccatagtttgaagaggttaatttttgttgatcttctatagtcaaaacagaagtgggagtgggaataggaaatgtatctgttgtcgttattatttgtgcttcttttttgttgttactttggtcccaataattattaggatgggcaagttgaggtactaattgagatgtatagcaaaattggtatgtgttagtgttagtaactgatgatgatgatgttgaactctctaacggagacaacatgatttctaatttatctgtgttttcttgatcactcaaacaattagtttgttgatgattaacaactactggtagtagttgttcggatgatgataatgagttgaaactgttctgctcatcaataggctcttctttcatcgctttattaatctcgtgatcagtttcaattgagatcgcttctaagtttatgccattatcttgaataattatctta

SEQ ID NO: 215642 - DNA, 778 bp, Cannabis indica
tacatgataaaaattaagaaaactaataataacataataaaactcatgtagactgtcacctctctttggtactttggttgcgctcatactcaagattagtaagtgtcctttaaaaaaaattagtaattgtaatacatgtaaaataataaatgaagaagcatatatatatatatatatacacatatatattacaaaaggggtgaaactattagaaaaaatataattaaaattaagaagaattgtgtcatttttattttattttgtaatacataatagtaagagaattgagaagaatatagtaagagaatatatgagagaaatttttttttaaaaaaaaaaaaaccacatgatattttttcttgcaaccaaccaaaccaatagaatagaatatactttctctctttcatttgtgacgataatcctgacaaaatatcatataaaaacaacactaacataaaagacaataatttttaaattacagtaatatatattacttgaatatttttgaatagctacaaaaagaaaaaaaaaaaaaaatagaagagactaaaatcttaagaagacataaaaagaatacatgaaagtggtgttctatatgattacaatatcaaactcataaaatatttggactttggagcttctaaatatatataagtacataaatttaggggtcttatagtctttaccaacaccaaaacatattatatatgtataaaataaatagtgttattagtaacctagtcttttgaacttttaagagtaatgtataattattaat

SEQ ID NO: 215643 - DNA, 669 bp, Cannabis indica
gctatagagggcttatatctcagtctgccttaattgggttatcggtagtcacctcaagaattctcatcacacagataataccacttacagtaaggaccaaacttttttttaatttctttcaagaagagttgtggtgagtttcaaactcttgacccaagcaagatgcccgtaaatgtaatctctaccactacaccacacaacacacgtgataaaacaaaaatacaattgatcactcaatttctaattttttttagtttgtttgtttgttttattttttttttttctaaaaaaaacattcataaataaatcaataataattaaaccttctgtcattacaaaatatgttctttagaatagacaaaaaaggcaaacgaccaaacaggttttggtttgtttgttgaacaatatcaatttatcaaatctctctgtttttttttaaataaaaaaaaaaaaaatcaaatctctcatatttgtagtggactaaatatatcaaaggccgacgatttgttgagtccaacccttttttgggccttggaccgaatttagggatttaaagctcaattgaagaaagggcatccattgcatttatccatgtgaaaattgcatctgtggcatttttgccatttctgtttaagatcctatttcttaaaaggggagttatatttgcac

SEQ ID NO: 215644 - DNA, 904 bp, Cannabis indica
aagtccactaaaggacaaaataacaatggggcaaaatgaccaatttgcccctccatgctaaaataacataaataacactaaaggggtattttgggaaattctaaattcccggccaatcccgacattcccaatgtctaataaaccgtcccacaatactaacatactaagttgtgattttactgagccaaacaccgagttccatgttaccgggcaccggaaatgcaaacttatgaaaatcactaaatgacataaaatgcatttcagaattcaacaataacagtataaataattatttaaatagctataaataattttccataattaaacatgattaactgctaatttccaaattaaactaagcggtctttacagtcaaggctgcctagaggagttttttgggaactatttttttgtgtaaacactatggttacataaacactatgggtttatgtctttcttcaactctcaataaaagcaccaaaatttaccaagattttcaaaactaaatatttaagatcttaagaagtaataaaatgtagaaataaatgagatggagatgtttacgtggttcgggtgttaattaaccttagtccatgagtgagtctattggcctcagaggatgtgtttgatgtttttacagtgctttagcaagagaccctaactctatagtctgtgtttctcttgaagaagaggaaagtttagaataatatcagtaccatctaggttgtcatccccccttcgtatggaaatagaagggcgttatagactaaagagcgggtatggacatggccatgactcgcctagggtttctacaaaaagcccactaatggggtaaaatacatgcaaaaaaagagctgactgttgggcaaggccggccgtgagcataggcgggctaagcctgtgc

SEQ ID NO: 215645 - DNA, 753 bp, Cannabis indica
aataacataaaaattcatcaaagaaatgttttgagtcacattgcataaggccaaagttattgtataattactaagtcctataaattagtaattacactatagttttaataaaaaaaaaattactctatattttaataaataattaatatttttatttctaaatattttatactatcaagttgtgtcttatactatatgacttgttaataatacctcataaaatatgacttttacagtaatatagtcatttcatcacattttattcaattttattgtgaaatcagtgaagtagatgataattgataaatagatacaaattaaataccttttcacattttacattttacattatatcatatattaggttctttatttttttctatatatcattaaaaatattatattttttaatatattttattataaaaaccaaaaaaatttgaaaaaattaaatgaaaaagaattataaaagagagaaaaattattaaaataatatttgaagaatgcagagtaacaatattcatgagttaaaattttgtgttatttatgaaacccctttttaacatcatttctttatatatatatatatatttttatatattttagctaatgagatgtgaatgttctaaatgaaattatgcactattaaacttttccattatcggtaaaaagaaaaatagaagaatcaaaatggagcaatatttgttttttttattatgtaagaagtgtgtaaattatttttaaaaaaagtat

SEQ ID NO: 215646 - DNA, 431 bp, Cannabis indica
tacatcttctatgcctagctgcaacagatttcttcttctgcttagtctcttctttccagcttttagcaatgtcatgtgaaacactcatggcatccaaagatgcaccagataatcctcttcttgtgaacccaactgcatacagtccaccttttcctttccaccctaatgggaatggattctttgggattccatcctctgagaaaaaatcattctcctattaaaaacaaaatcaaaatttattagatcatttatccacattaaacaaaaaataaatgtgaaaaaaagacttccgaactacgtggcactgtaagatttgttaaataaatttaccaagcaaacctaataacatttgtttgtttttattaaaatttgactttatatgatatttatatatgttctatatagccccaaaaaaaaattgttaaatataa

SEQ ID NO: 215647 - DNA, 687 bp, Cannabis indica
caaaattttaaaattttattttttattttatttttaaaaagcgattgtcaatgtcatgtatttatacaaattgatttttttattttagtattttttggtattattttttttttttgtaagtttagtttaaattatttaaatagtcaaatcggagataaaaatatgaatttttctttctttaccttaacaaaggaaataaaaaaatattttttatattttttatttctattttttaaattttatgagagtttcatatcaatgtatcaatatcaatatcaatatctatacatatatataaatatatataaaagaaagcacaaagagaatgatgtgataccttatatgagtttccttttttttcttctttgttttcttattttttatttaacttttgtatttttagtaatataagagctattttcaaaaacttcgaattggtttagaattcattgtattgattatatacttttatgttatatagattgctatcttttagtttagtttgtcccaaaattaatattagttattttcaatgttagcaattgatgaacttaatcttgtttatatatatatatatatatatttatataaaggagagcctaaacaaaattgatgtgacatcctataaatttttctttgtattttattatttttttctccattctttaatatatatattattttttt

SEQ ID NO: 215648 - DNA, 833 bp, Cannabis indica
acccgacacgtcatcgtaaaatcgagcgcaacccagtcagcgatcttcaacccatctttagtgaccaaaatattccgacccttgatgtcgcaatgtactacgccagcggaatgaagatagtccaacccaattagaatttccctcgtgtaggctttgatttcagcttggctaagccgaccaccgcgccgggaaatcatatcggagagagagccaccgtcagcatattccaggcagagattgtacataatctctccattttccgaagagacattgaaacctctgtaatctatgattttcggggagctcaacgcagacaaaatcctctgctctctctgaagagactctgatttggaaagctcggcagacttgacagcgaaaatctcgccggagccatgagctgtggcgattgatacggtggcaaaggaaccccggccgatagttcggcccctggtccaatccataaggagagaagttaaattaagttttagagagtaaaagtttggtaatggaccgttggtggtgggttatggttttttggaccctgtgatgcccaatctatatatatagtattagtatatacagaggcttctaaaatttatgcaaagtgtttggtgttagttagcttaacgaaaaagcagccgtgaaaataaatagataaaatgaaaaatgaaaatttgacatgtttttggcttttttgatgattgggcggtcgccgtctttactagtcctttttacccttgttaagagagatccacgtgtcaaaagggaaatagatttgacaacttggttagttgtggccggcgtttaattacttagcttaacatctcattaat

SEQ ID NO: 215649 - DNA, 1579 bp, Cannabis indica
ttcaatataatattatacaatactgcaatacggcgtagcaaacaaaccctaagaatttatatatgtactctctttggtggttcagttattcttatggccgatgccaatattcaataaattcttgttctcggtcccttgtaaagttttttttcttctcatgggtgatgttctatgaggtcttaataaaaatagatatattatatatatgcatgtcaatattaaacatacaattaagtcacgaaattctaaaattcaaatttttagatattataattggtaccaataatggttgtaagaaaaattatgcagataaataattaatcacataataaaagcctactttttgattgataattaaaaagattatatgtagtgacagatcaacttttttctctttttctttataaaaaagaagggtcagaattttctttcacagaaaaaagtgggaaaagattgcctttaggaccaatctataatgaaattacccattgtcgtatccatatgtggaccaaccatcttggtagactctacttttggtatgggtttttaactttggatgagaatcacttgtttggtatgttgataatgattattatatagaatgtaaataatattttaaatcttgtcttttgtaaaagttataaattggactttctattttgttaaatgatataatagattttgtattttctaaaatagtataaatatgacttttaaattaatttttgtcaaaataaaacttaataataatccgacttagaagtgttatgacaaaactggttaatttttttacgtgttaagaattatcttcaagttggttatatttaaaaaaaaaatagtcaaaaattaggctcataattatcttcaatttataaattttacaaaacacaaaatctaaaatagtatttaccataatatattttcatatttctactccctataaccatattacaatgctatatattgaaagtataataatttttattttttaaggcaattttgttttttatttgaaaaatatatatctcaataaataataatttttatatggagatacagtttttatattttattaaacattctgtaaatcgggttatacatgctattgctagacaatttgaataatattatgttaaccgtatgctctcggaggagaatgttttttctgaatttttatctatcatttttgagtgattacataataattataaacatattgatacaaataatattgtttatttttctagatgtttatgtttttcttttgattaatatgcctttgttagtttattcctattccaatagagaaatgctaagagatatattaaggtattagctgacatattattatttatataatttaattttacatattttaatttgataaattatatgtaggaaactaaccaggggcggacccacatagaggcgaggtggggcagtcgcccaccctgaaaaaaaaaatcgggaaaaaaatatatatgcattttagttagttacaacataaatttataaataaaagtgatacccatacaaattaaataagctttggtataacggtaaagtcatttcatgcatc

SEQ ID NO: 215650 - DNA, 770 bp, Cannabis indica
ataaaaaatttataaaaggaattaaaatattgataaacgtaatttccttattgatatggacacgtatttaatataattttggcatagatattttttttaaaaaaaataaataatagatagatttataggtttaataatataactaaaataaatatttttaatttatattttgataaaatatttacaaacttaataaaaattagaataatgagagaattgaggagagaacaaatagatgtatttagagtaattttagagcatcatgtcaccattttatacttctcctttttattgatatattaaatattgatgattgatatattgattttaccccacaactttcgacatcaccgaattctcgttattagtgaataaaaaattttgctctattttatttaagaaaataattttaaaaaaatataatgttcaattaattctaaaaaaaattaatataaattatttaaaaatttaataaaaatattaaatattaagtttagttaaaaaaacttaaattatatttaaaatttattttatttataaacggttaaaaaatcaaataaaaaatattaaaaatctaataaataatttaaataaacaaaaaaaaattgagaaaaaaattaagtttctatatatttataaactcacatcttaaaaaataaaaaaaaaattaataaaaacttaaacaaaaatattatattattttgaaaaaaaaaattataaattaaactaaaaaaataattatattaagtaaacaaatttaaattttagga

SEQ ID NO: 215651 - DNA, 488 bp, Cannabis indica
agaagcggttgagatttttgacagtgtcttctaacttcctttttcagtctccacttgctctagagagtctttagggcacggatctgttagtcatgtactcccattgtgcaaacatttcttcataagcatgttgacgacctgtgctgtctgcttctgatgaggtggagactgcatcatcttcagactcaactggattacagctttgggccatgaatgccagtacctgcttttcctcatctgatccttcactggctgtggagttcttttcctcatcactatcactccaagttgctgcaagggcctttttcttttttagtgtgttggcccactcagctgaatgtgaccatatccatcacattctcggcactaaattcctcggcccttttgatcagtagaggcttgtcctggtttgaaatttactcctttgtttctcttgagaagattttctttgtcagctggtcaatttttttcctgtagttctttttcaa

SEQ ID NO: 215652 - DNA, 626 bp, Cannabis indica
catgagtcaatcttattcaaattaatctgatacagaactatgattcttttttttctcaaggattttctttcgtacattctgtccctatatttataataacataggttgacagttaattacattcaaattcgaatcccacaatattatttttccaacattgtgggctataatcatgctccacgtaaataaatacggttattatttgaaaatcatacagctgtgaattaaactgcttttaaaagagtcaacgatgacgtggaataaggcacgctgcaaagtatatcccactggggtatctcgcttggcacaatagcaataataaccttggcaaggagctggagctcttcccacgtctttctgaggattgataatgcaaatctcatcatttctgcgcgtgaagacataacgctccatctgacagtcgcagttcttgatgacaagatgaactttagcagccaacatcatttgaatgtcaatttctttctatgagagctgacgcgatggagcagtggagctcattgaaagatgtctggagctgactagagaaggtaccaggagtatgccttcctatagcgagatgggtgtctcgctattcactattcgtgtccttcaagctgttatactta

SEQ ID NO: 215653 - DNA, 1047 bp, Cannabis indica
cgactttttctgggcttaggtatgacttggtcgatattgtttttcactactgccatttgatttttgctagtacgattagcctagtatttgtgacatgattttgagtggtttagctctgtgacatggtttgatcgtgttttagttcctgtctatgtatcatagttttaagttgttttagtcttgtttatgtaacatggttttgttttgtttcgttgttgattcttctttattcttcaatgactcactattacatcactgttagtggttagcaataaaaaaatttttccaactgaaagggttgttaattagtagtacaattgcataccttacacaatagttgagtgctcatgctacgaggttgaacatgctacaacagtttctactgttgtattatctgagcagtggatgaaacaaaatataggtgttcttaaggttaattgtgatgttttagtcttgttcgtgtccccaacatgagagatgtcccaattcaattgcagactattattttaaccaattgttagtgataaaatttcatgatttattgaatacatatatctgttcaatataaattgtggctatgtaacataattctttgtttaacgttattttttaattttttacgttaattttaataaaatatactattatttaacagtaacattttttttttattaattttataatattattacatttaaaataaaattatgtagagatatactctatataaagaaattttaattttattatatatataaaaataaaaattatgtagatatttatatacaaaatttaatatatcgaaaatattatagatattttaatcatatttttaattttattagtttaactttaaattaaaataaaaagaaaaaattatgtagatatttatataataaaatttaatttaaatttaaaatatttaaaatattatagatattttaatcatatctttaactttattagtttaactttaaattaaaataagagtataattctaatttcactcaatcgaccatacaatgattcactatgatatctcacttg

SEQ ID NO: 215654 - DNA, 639 bp, Cannabis indica
tttaagatttatattctagaagcaagcatttaatagattatatattatagaatatataaaatataaatataaaataaatgaatatattaattaaagaagtataactaataaatatctaaaattttcttcaaaaaaaaaaaatatatctaaattttttttattcatatggagataatataatcttgtaagatcgtacaagagaattaatattatcaatataaataaaataagtcggtaatatattaaaataaatgatcttttaatatagaattacagtttactatacactatactctagtgaatgtggttctaatttagatcatatatgtagatagatatgtagtaaaaattttaaatttgattatacatgactagattgatatgtaataacatctttcattaacatgtcctttaccataaaagagttattcatatcacaagtagatgagtctaaatcttgagtatacatgaactcctatttgtgttcattgagttatttgattcactcgttaaaatttctcaaagaagataattcttacaatttctgttttgggagcttaatatcatgagtggatgggaacatgttatgcaataatagaatcttagatttctaaaaggattaaatattagttcccttat

SEQ ID NO: 215655 - DNA, 793 bp, Cannabis indica
actactttttaatatttttcttacaatcaaggagcgtaataaatcaaatttaaatatctaactaatttaaaatacttcactatttttttattttatatttgagctttataattattttaaatttatatgatttgacaatattaaatatttattattatttaaattatttgagttttattttttaacgtatgtcgtctcatgcatgtttgcatactgtattttagacttttagtgctcaattttttgattatactttttgttaatttctattttaatcaatgctcattatgtgggtgtggtgacatgcatgtactaaaatttataatgtgtcaaagttatttctaattcattcaagattatatatataattagagaaaatattattagtatttatttaacacttttcagaattgatcctaaaatttagtgaactacaggtaataaaaatatatttttcgactcttatttaaaaaaaaatatatgttattttttaaaattaataaaaaaataatgcgtatttttaaaaggggataattttttttgcggccactagattattggatggaccttaagtacaggcctaacccgcctatgtctaggaccgacctgataacactttcttaggtgtcatattactattgatataattacatatgaaattatatataatttgatttaatataacttttataaaatatcgctataatcaatcataagacgacacttgtaaatggtgttaagtactactgcgcgttgctcactaacaatgttcatataattaatatattttata

SEQ ID NO: 215656 - DNA, 657 bp, Cannabis indica
atcatttaaacggaatgatgggatagaacctaacagaatgacgaaatttctgtaaatataatagtttaggaaagatttttaacaaaccgtatattttagggaccaaaattaatattatcgaaaaagttactttattcttcaatttaatgtatgagtaagtttctataaaaaaaaaaatgtatgagtaagttattattttttaaacaaaaagttattattttttcaataatgagataatgagttaagtacactaaaaagaaatgataaatgagaattatctatcaaaattagtctttcattcaattaaggtgcactctaattgtgtaattactatgttgtatgtagttactatgacgtacttaatttttgcccttgaattttttttagtcattaaaaattttatctgaattgttgagattgttagatttaaggatatttgtctagtttcattcattttactaattatgtgattgtccatgtactaaatcatgtttcctacactttgatatctatcaaatcatgccccttgaactttgacatgtatcaaatcaagctctctcaactttctatccaagggtacccgaattttatgtacatggtgaggactcacacaccaaaccaccacacacacgcgctctgccattcgtccgagctggc

SEQ ID NO: 215657 - DNA, 554 bp, Cannabis indica
acggttgtgcaccgaagcaaataggataatgcctttgtaaaactcaaattttacaaactattatttcattatttcactcattgtccccccattcaaaaccctagcagacccatttcgaaacccagccgcgcctctgcccacgtctgtctgcccccaccgttggttcccaaactctggtaagcaccttggccgccaccgtatgctaatttgttctttttttggtttatatgatttatccctaatttgtatgctttcttcctcatttccatttcccacttcaatgcaccatagccaaacaaccaaactctcatcttctctcttcgtagatcgagcagatatgttgtgggcagtgacgaaacaagtggctcaggaattttacggcttcccttcaaatcccactttccctttttctcttgtattttcacgataacctcttcactcttgccagaccttaaaatcagagcaggtcttgtgattttcttaaaaatctcaaatcatcttcagccattctcagttagagacatcactctctatcgtgcatgagacccttattt

SEQ ID NO: 215658 - DNA, 837 bp, Cannabis indica
agatattgacatattaattatattacccattatattatagcctattttaaaataataagattttattatttttattattaatgtaactatttatttaatttttaaaaataaattatcattttaactatcattgactcaaaacgaaaaatagaaagaaaaaaagatgaaagaataaagttgtaactataaattctatcaaaaaataatataatagtacaaaaagataaataaagttgtcataactaaaaaaatatcgtaattacaaaaatttattgagaaattgatattgttttgcttattacaattgggtcaatgttttgttatttttctgttgctttgtaattatttttttttgttattttatagttatttttattttatttgttaagttggtgtaggttgtttttaggtgtcttagttttttttttttttttttaattttattggaacacattacttttgctaattttgaaactttaacacagtatttttgtaaacttggtatagtaaaaatgtaaaaatctccgtgtcccaatatttttgtaaatttttccttattttatactatttttgtaagttttctaaatttaaaagtaacttatactatacgttagaatttgagtcttacatatgttgggtacttaatataaattgtatttattggaagtacacggaaaaagaaaagaaatattggcagctaaaccacttaaactttacgttttgtaacacttaaccacaaaaactgaatttttggcgactaaactacctaaaccctggttcccattttgtctctgcacacctccatccaaaaatcacagttaagtgccacggtggact

SEQ ID NO: 215659 - DNA, 760 bp, Cannabis indica
tcccttccagagttgtgagggaagaagggaatgcttggttgtaatcgttgagctaagattagagaatcttgaggatgaattagggatggattgatttgtaaagtttaatgcaattatcgattgtgaaagaaagatggtaactcttggacctgaaggtgaggattcattcgtgttcgtgggcaaggttcaagagtcctgaatttcattaatttcagcatttaaggcaagagatttaatgtggaatggatgcatcagtttcttaactagtaaggtatatattatgaagaatacctatggaaccagaatacgttccagtggtatgagaatttctgaatgtctttccaggggagttactggagttactattaagtgggagattgactttgaaatagatctggtacttgggcagagttatatcttaaacttcgtatcgaatggtatttgagatggttgaaggttcagttatgctggatgttggacttgaaattgttggactgtgtatcccatcctggagtacgtcagttttatttatgaagagaaagaatgaaactttacaaaagtgtattgatcgttggaaattaaataaactcatgatgaagagtaagtattcttttgtcaagaatagaaatagtgatgattaattttagggaagtaccatcttctctgaggtcggtcttcgatctggttattaccagttgaagatttaagagaagggtatttccaaagcaatttttttgtacttgatgactttgtaaatgtt

SEQ ID NO: 215660 - DNA, 390 bp, Cannabis indica
aattgaaaaaataaaattagatcttaataataaatattatatttacacaaaatttcaaaactggaaaaaaaccataggaagggctatggcgccagtcatttaataataaccgatgccatgggattaaggtccctatttcgtcgtttatttttccctcctatggcctcacctgaatagcgttggtagcaaatttcactgtaaccaacactgtaagccccaaaaatcgtctctaaagctcattttctagtagtgttttctattgatttatagttgttcttttgttatttatagtagtttatagttgtttttatgttgttgtttaggtgatttataattatttttgttattttatattttcatatagttgttgtttagtttatttgcataaaa

SEQ ID NO: 215661 - DNA, 559 bp, Cannabis indica
attgtaaaacactttaatatcatataacaacatttttattaatatatatgaatgttactatatgatacaatttgaatttaattgatgaatgtggcagctccaactattttggaagtcttatgtagatattattgttgtacaaaaatagtttttatcctacatatgcttaaaactttgccacacccttgtttgttgagatgtaaaataattaataattttctataatgagttttcatccctaaatatacaaggaagacctttatcgactagttttcatcccgacatagtatcttttatgacatgtatggtaagttgtgagatcattttctaaactctcatctttttactaaattttttatttttagtcacaacaaaatttgtgactaaaagtaaaaaaattgtgactaattataaattaatatttttatgttgtaactaaaagtccgtaactaaaggaattagtcacaaaattcacaatttattgtggcaaaatgtatttttagtaattttttgttgtaactaaaactcaaatttagtaaaaaaatttatgttgtgacta

SEQ ID NO: 215662 - DNA, 1148 bp, Cannabis indica
acgacaagtcgccactagcatgtcgctcctaatactgtcttttgttgtagtggtagtactatatatatattaaaatattgaatatgcttattaattgaaaattaacacatcgatttaatataacaattgaatctttttgccaaatcttctatattattctccccaaatactagtaatgaggtccaaagtctctttttccaaacttttcagctggaggatagggcgtttattaccaaatatttagggcttcctcaatgtctgtctcgtgttaaataccctgctttcacttttcttaaggataaggttgccaatattatccattcttggaaccataaatgattctctcgggcaggaaaagaaaccctgatcaaggctgtccttcaagctattccctcttatgccatggcttgctatcgcattcctacaaaaatctacaaggaaattcaatctctgatttctaaattttggtggggaaatctgcagaatcacataaagttcattggaagaattggtcaagtgtttgccagtctaagtttgttggggtttggggtttcggtctttaactcatttcaatcaggccatgcttgctaaacaagcatggcgaatctttctatatctcgaatctttgttaagtagagttcttaaagccagatatttccctaattcctctattcttgaggcagttcctggtcataggccttccttttcttggagaagcattctgtggggatgtgaattgcttaacagggtcttatttggaaggtgggtaatgggttgagtattcgcacacttgaggatcattggcttcctggcagccgttttaagacctattccacttctaaccctccctctcagtctctttctttctttctttccccttctggggattgggataggggcaagttgacaaatttttttgatagtactttggtggaggacatagtgtaagttcccatttctggtcacaattgtaatgatactatgatttggggcccagacgcgatagggctttttacagtcaaaactgcgtaccacctagctctccagtctcgcgatatgcctacctcctcctcctttgcttcaaataaatccttttggtccaaaatttggacctcagcagcgccccctaaaattaagcatcttatttg

SEQ ID NO: 215663 - DNA, 565 bp, Cannabis indica
tgtcagtgattctagtgcgaatttcatttgtggagtgaaccacttgttgggtttgttcttcgatggaagtcatcgaattatgaatctctttagtgtcatgcaatagatgctctgacttctcttgtatggtttctagcctttcctctgcattttctgctgattttttcaaatcgtttactagtctctctgtttgcctcctgaatatatctgacctgactcagaaaaaacaatctatgtaaatttcttatttattattatgaacatgtaacaacataataccttctattagattgttaaaaaaaaagttggtatctctgttttattgaaaaggggtatcttatcgggaaattatgaagggaaaaacctttaaaatcttaacggtcgatcatattaatttgttatgaactttttagagtgttaaaaaaagtatgaatacttactactttaattatttgaaataattactacattaatttcagaaataaagtctaaaaaactccttttgtagttggtttacattaatttctaaaatattcctgatttactatcaagaagatacaaggaa

SEQ ID NO: 215664 - DNA, 817 bp, Cannabis indica
aatatatataaaatacatctaacagataaaactaatccaaatggatattagatcgattggatgactggatcagatcggatggtaaaatctaacatccaatatataattagatcaaatttgcataggcataacaatattggatgtggtccaataaacacccctaagctcaaggaaggctgacgagtttgactggagaaaaaaactaaccttcgatagctataaatttagaaatgaaaaattctactttttctcctaaatttggattcttttaaaagagtagtactcacaacaattcctttaaaagagtatattctataaaaatttaaagaattatgtaaaaaatacacctccttcatatggttctctattttagagaaacgaaatctttactttacatgtagagaagctttaaaagcttcttcattttatttctttttattcatttctctctccttctctctcttttcctttctcattttctctttccctttctcatttttctctttatttaattatttaattattataattaatatacatgcatataaaaatattacatttaaaggatttagagaaaaaaaaaaaataaagttagtatggtgtgctgtaaattttgatgtaaaataaaaaaaaagttagatttagtgatgtatttgaaggatggagtagagaaaattttgggtgtgctagagcatgtgatgtagtgtgtgtttagtttaattctttaaatatttaaagtttctctattatgagcatctaatataagtaatattacctactattaattaattagattaattattataagtaattgcgg

SEQ ID NO: 215665 - DNA, 626 bp, Cannabis indica
tactttattttttttctttttttttccgttttttttttttttttctatttgaggtgtgtgagaatcattgacgaagctataaattgtaggtgagccagctccctcacctcaattattttacatcttcatatatatgctaattcacacataaattaatttcattctcatattgtgttgaccccggaccttgctagggactgaacgataatttcaatcgtttatgatgtttcgtgggcaatttgttaaattctttggccaagaatatttcaaaataaaataaatattcaaaagtaagtaattgattatataaataataaaattaccaatttttataaagtagaattaacatatctattctatataaaactagtaaacaattcgggcttcgcggcggatgtttaataaattttaaattatattttaacattattagttttccataatttattttttaaaatatgagaaaatagatgtaaaatcaaaccaactcgatccaatggttcataatctttactttatatatgtcctgtttatgtcgctatttactcaaaaattttattgtgatttatcactatatctaaaattaatattatcaccgtcctccacttgatataataaataattaa

SEQ ID NO: 215666 - DNA, 789 bp, Cannabis indica
actcggatctcaaaccccagaccctagacccaaactcagacccaactcggaccccaaacacggactcgatctgggcctgaccccgaaccccaaccttagtctgacctggaccccccgacctggacccctcgacctggaccccgaccccaaatacggacccagactccgacccaaacctggacctcggacaccgaatcccgaccccagaccctaaccttgcctggaccccgaatcccaacccagacgccagcctaagttaaagtctgtatttgtgtcgaggtttggggtctgggaccgtgttcgggttcggattcgaggttgaatagattcgtgtcatagtatggtgtagaatattatttttttagtaaataaatataaaaatagttttaaaaaatctaagccaaataccattaaatttttaaaatgataaaaactgttttttattctcaattttaaaaacacaattctaaaaactaaaaactgaaaacatagccaaacaacctcataatttttctttctctttctcgtatttatttttatttcttttagaaaaaaaaatctatcatttttttaaatataaaaatatcattttttaaattctattttgtagttctctaatatcataaaattatatttatgcggaatttgtgcaaatatctaaaaaaaaatggtaataaaaaatatattaaataatttataatattattttgaaaactattatggatcgggagtaggtgtagttgtagtgtaccccatgattttcatgtaatgataacattcattatttac

SEQ ID NO: 215667 - DNA, 893 bp, Cannabis indica
catttaacattcgatgataaaaaataatttctatccctgctctattccccatttagatggggaatctcactccattaggggtggatcctcacgggaccatcttgtggggaaatatgcatgcattacataatgcactcataacaaaatatattgaattgaatacaaattataatcttatatcattacaaaggataccttatcaaaatttacatatatatatatatatattagcttctgtacaaattacaatcctatgtcatcacaaaggataccttatcaaaaaaaaaaaaaaacaattgaggattagcatggtgacaaaaagaaaaaaattaagaatagacattagttgtttgttataacagaggatacgtatacaattttttttctcccattagaaacatttataaaaaatatttttaaaaatactcatttttaatattttatttacaacttaacaacctactgtttttatttacaaaaatacactaaagttttataattacaaaaataaactttgttcagcaagaagtaaaaaaataactaaaaagataacaaaaaattaacctcacaataactataaatcaactataaaacaaccaaaaattactagaaaaataccctcatgacaactacaatacaactataaataaactataaagcaactaaaaaaaacagtttattattttactaaaaactatttttgtaaataaaaaaatttccgtgttgatgtatttttgaatttttttttttaaatttttgatgtattatgtaaatttttcttgtatatatttacaggtacatgattttgtcccgtgatgtactttcatggaatgtatttcgtgatgtacgacagccgttagatgggggagttatttgatctgagggctggggtt

SEQ ID NO: 215668 - DNA, 744 bp, Cannabis indica
agtttcaccataaataactaactcaaaagtatctagttgcaactccttaaaatttaggtggaaaattcaatgaacacatgtaatgaaaaaaggttcaaacccttttccaagttttacaagtgttgatttttgccatgttttggttcttggtagtccttattatgcaatattcaaagcttcacatgttaaaaaaaaaaaaaaaacaaataagtaatttaattaaggaaaagaatgaataaaagtagtttagttttaacaaacatgtgacatgatagtgttagctagtaataggatacatggaaaatcttatatcaagtgatatcattgttatgattcaaagaatagttttggcaaaagtataataattaaaaggaatagtttgacaagcatataaaagagtagaaactgttgtattctgtgatcaaatgaagaaacgaatgttgttatatagtatgctttctcatgagttgacagaaagtagggctagtattagtattaaagctatatgttcctactccatctcaagtaatcactaaaaccaacttctttgctttgaaaacccttttgttttttcctctatttaattatttatagccttttaacaattagttgtgtgtacatataacaaattagaaaagaaagtgtttaggctaaacaaacctaaatatgttgaggtttgacactaaaactattccaatcacactgctaaatataatgtcatatataaattatctacaactgtcc

SEQ ID NO: 215669 - DNA, 869 bp, Cannabis indica
agatcaagagatcaaagcaataatatagatcaaaaaatggtgcgagtaaaaagtgaaacatagttataaggaaactcaaatcaaactcccatgatctttacatatacataacctgaaaatccaggattagagagatttagctgagattcgagaagaggtgttttgggtctgaacctcaagattttttttcaaagtacaactaaagctaatgctaatgaacaatgttttggtatgaattgtttttttttatttatttatttatttaaaacagtttcaatttcgaacaagagagaaagatcaagtggttgtcggaccatggagtgttccatggaccacatgtcaacgtgttgtaaagtccaagctttgaaaactgaactatttttcttagcttatatattatcttatgaatttatgtactttagcttctcttttatctttcaaataaattatggattttttttttcaaaacaaaggtgcattttttattgagataaattatggattttattattttattttaaaaaaataatctaataagaataatattatattatatagaaaaattactttatatactattttttaatttttttttttaaatttacagtttgtgatgctctagtgatttctcctgtggttacagtttgggttgcgccggcagtttcttcagtgatttttatgtgagtttttatatgaattttggttgtgattaagttgctttgttagttactataggtgtttctatgtgaaattttgtgaaaaaaaaaaaactattgtaaagtataaaaatgaagaaaaaaaatacctattatatatcctatgtatgcatttataagaataatataatttcatttatggattatatatgt

SEQ ID NO: 215670 - DNA, 1219 bp, Cannabis indica
aaaaaagtaacttttttactacaaaaaaatttgtcatatagtcgatatttatattgagcaaaagcaacactctatataaattggtcttgaaaattagatcacattatacatgtggcaagactactcttatctctctcttgctctgtcttttcctctctcttgttgccgcccaaacccgcgtctcctcccattctcgcaccacccgttccacccacaacctacgaccatcggccaagagaccattcatcgaggattgccaccaccatgacccaattaaaatttaaaagatataagtatgattattcaagtttccaataaaaattaataatgatatatgtacaaaaactatatattaaaaaagttacagaaatatgaggactatgagtatttatattataagtttaattaaatatcatataccaatttaaaaaaaaaaaaaaaaaaaaaataaaagaggaacaaaaccagagcatgaaataggaggagcaaattctttcttttatacggaaataaaaatcaaaaggaggaatagttcattgcgcttactttgtcttccgattatagttactattaattatgatatattattaactcgcaaggcatcttctttattagtaatattgggcaactttcagtagaagtggtctggggatgctcagtactaacaaagtgggtctcaatttaatctttcaacaaaaacctctcaagaaaatggcttgactacagcaacgatgatgccttacttttgtccccccataaccgtttataatacacacattttgtatataaaatttttagatattttatatattacttcttaaaaataattttttaatctatctctttatatatttttatatttatcccatctgttttgttaaataataaaatagattttgtattttttaaaatagtacgaatgtcaaggaccatgaactgaatttttgtcaaaataaaatttaataataatccgatctaaatgtgctatgaaacaactatttatattttctatatttgtttatgttaagaattatctttaagttagttatattaaaaaaaaaggttataaaaaattaataaacttaaggtcctatttttacaattttattgtaaaatacaaagtttatttatcatttacaaaataaaaattccaatcaataacttttgcaaaatacaaaatccaaaataatatttacccatttatatatttttttattaa

SEQ ID NO: 215671 - DNA, 760 bp, Cannabis indica
gagagaatgggcttatttatgtgtccttctacttttacagaatacaatcagacctcctatttcaaatattccatatatgaccccatttttactaaaatagtcctttggacgatttaaagtcagaaacatattttcagcatgataaaaataccatctttctgtaatatattttttttttttaaaatagtgttatcaatataaattagaagaattacttttaagaacatgatattttacttttaaaataagtaagaaaaaaatattaccaactcacacttattttttttttttttgtaatgaccaactcacaatttctaaaatgctaaaatgaggtttattttaaagcaatttaatattgctttgttacacttttttctttaaaaaaatccatcaattaaagaaaaatcaagtcttgtgcttgcttgatgggtagcattttgaatccatcatccacctatattcactaaataaacaaactaaaataatgattttttttttaccttaaaaaaaaaattaattgttttttttttttttattaaagttaaaatatttattttctaagttttccaattgggaattcttaaaaaaaatatagcaacagcccctatgagttctaaaagggagtgttattaaaactcaatttttataatagtgatcacatattcttataactttatttaaagattggcgatgcaagttaaatattctttaagacaattcctgtgtggtcttaaataaagtcttgtatatcctagtagca

SEQ ID NO: 215672 - DNA, 1131 bp, Cannabis indica
atttgatttcgcgggctctgctagggtttgaagcgagcttgagccttgctcctccctcgatttcaaagggttccctgcttcagggattggtgttcccacctccaccatggatgaactgctgaagaaaaccaacaatcttcaagtaactgatgaagatgattgggaaatagacaagagtctttctatcatgattgcaaagttcaatctcagagggcgattatgcaccaatgctgaacacagtagaggcttcctaaagagagtcctgggaggcatatggagattaaaggagacggaatggaacatcaaaattaaagataaattcgatacaggtctgttcctaacctttacttttgcctctgaatcgattcaaaaaaatattaattaaatgccatggtatttatctaacgggctgttaatttggggaaaatgaaaattcgaatgaatcttgggccaatgatctgaccaacttcccgatttggggcaaggcaatggggtgccgattgatctcttgacaagaacaacacagtgcgaatggcaaacaaagcaggggcggttatccaagtccagaattcaaatgtttcaagaatggtggcagatgggttctttcgattccaagtatggatgtctattacgaaaccagtttgtccgggttttccactaccgtattctggaaagaaattatggattgcattcaagtatgacgaattgccattcatgtgcttcaaatgtgggagaattggccatagctttaaagattgcaataaagaaccaattaagatcactgtggaggagaatgaagaagtagaagcctatggggtatggttgaagacagataatggatgcagagatggctttcacggcaaaaaaactggtatggggcaagccaacgttcaaggaaaatcgctgaataagaatgcaacagggtgggagactgtacctgtaatttctaatacgtttgtaccactggaaacgagcatggatggggggggggtcgaacaaatgttaacaaaggcaagaacccaacaagaaccaatgaaacaactcgagaaggggggtcaaagagcaagaatcaacaaccaagaatataactcagtgtatacaaagcagggaggtacggaagatgtgcatgat

SEQ ID NO: 215673 - DNA, 619 bp, Cannabis indica
tatatttataatccgtactgtgaaagaacaataataaataaaagaaatactttacaacctcatcaccatacccccacacaggcagattttcagaaaaacaggaaataaaatgaactaataattaatttaaaaaaaataaaaaagtatagtgtatttgttgtagaatagacaagacaaattaattataggaaactaagtgtcacgtccctttaacatgtgttgtgtgatgtactaatagagattgtctttactggcatcctctcttatttgagtcaaagattcgaaactcacttcaacccctttatattagaggaatgaaaggctaagcttgctgggagtagtgctatctgtggaaacccttgaggtggtaccgatgatccaattaaagttggttaaggtataagaccctcattactgacatatgattcccgaaattgatcttaaatgattgaaagagtaaagaaaaaatttgcaccacattattttttttaattttgtatcacttaataattaataagaattataattggtttagatgaaatcaatcaaaagtatttttaagtattaatttggtctcttctttatgtcagttatcacatttcacaatgacaacaaggtg

SEQ ID NO: 215674 - DNA, 1039 bp, Cannabis indica
aggtgtcaattgtctaagtcacaactcaagtggaatcaaacttttgtctttcacacgaaccgcgtaaagagagatgttaaaaattgttgtgcttcaataaaatcaaccgagaaatacaactctatggcaagaataatacaaagataaataatgattaaataatattacaactctatagtataaatatacataaaatagaaaatagtaaagataaagagaagattaaacacaaaactataaatgacatgttaaacacaatatatatataaataatatatatcatatagaataattgaatggtagtgaaattagtttgttcctatactatacaaatattttttaaataattgatacttttaagggtacacattatttaatatagagttgtgtctgagattaaatttgagtctttcaaaattttgacacctcctttttcaaaaataaaaaaaaaatgaccaaaatggaaaaattaaaaatctttaattgtttattaaaaaggaaaaaaaaaggttctgtagctctagtttcaacctaaaagatagcatcttcaattggtctcaaataaaaaaaaaaaaggaaaaatggctctgattctcacttgagctcgaacaaaaaagttagctctgattctcggttaagctggatcccgatcttgattttgtttttctaaaagaggacggtgtggcagtgggcaatgaaggaattggtggattggtaaacaagttattcgaaagtaccatgaatttggtttatatgcattggtgaattatttttgttataaatgtaaatttttattgaatggattgatttatgatactgagaacatttaccaaatgtcatttggttgaatcgggagaaatagacaatttgcttatatggtattgagtaaataattacaaactctatatagtatagatatttctttattgcttttaggaattatagcagtagctacagtataatttccaaagtttggagaaggttagttttactttcttattagttctttcaacgttcattgatctcacaccaaatctac

SEQ ID NO: 215675 - DNA, 660 bp, Cannabis indica
tgcccagcactgcatgccgccaatcttaaggggtaggacagacccacatagaagcgagaagggacaattgtctcacttagaaaaaaaaaacaagtaaaaatgtatatgaatttcagttagttacgacatatatttgtaataaaagataataatttataaaaataatactagctttagtgtaaatgtaatggttaatctaggttgcatatatgatataagttaaggggtcgaagcccattaatttttattttttttttaagtttatttcttcccgtgccttaaaaaaatagacgcctccctcactttaaattctgagtccaccgtagacgtgtttgcttaggcttgcgaccctctcaagattcaagaaaagcactgttttacctgacttatggtccacgttgtaaacaattgttttttttattttattttatttttagtatttccatatgttagtttttagggaggttcacttaaactattatagaagcataatattaaccacttttttttttattttatttttcatttgtatcgcacctccttaatataaaagttgatgttgtgtcaaaaaaaaataatatatataaaaaaaaagtgtaagttctcatttgtaattattataagaaataatattaataagggaaaaaaaacaagaaaaat

SEQ ID NO: 215676 - DNA, 1060 bp, Cannabis indica
tagtatatttaatttataattaggatgtatcttataaatacatgctaaattaacctcgatatatttgttgatatatatatatatatatgtgtgttatatattattgaattaattttaaatatttattagattaaatagatcccattttttttaagagaaaatgtaactctaatttattggtttaaaatgcagtcaaattgtcctacaactctaatataatataatgtaacaataaattaaaagtgtgactaaaaataatttgtaagtttgtatcatattttttggatgtacaaaatttaaccaaaactatatgtgtaagttacacatttcaatttaaaaattttaatgctagactttaagaaaatcgcttaatcgattccaactgcttaaaaattctcaaatcttactatataatctcttcaccaccaaattaaagtctctataacatctgtgaggcataaggagtttgaatttcaaaaggtgataacctaaatactataaatatgtgttttatgttcactttcaaatacatattttcctatgcataaagcacatggctagaaaatacacccaaaggctttaatgtattattgtataaatttgaattaattttgagttatatctaaaatttatatgttgtataatcataaaattttatataaatgttaaatatcaaatttattgtgtgtttttgtgaatttagactttttttataatattaattatttttgacatggtacaaacttattttgcaagaactaaattattaaattgtacaaaatttaatgttattgttcataatctcgctaaatatgtattttcccaagttactaataaaatttggtggcctgtctattcttcttgtattcatgcacttattttgagtgatatcattaattaataaatttttatccctttctttttttttctaagcaagttgctcgaaaagttgtttagagattttcttctcaaaaaaaaaaattgcacaaaattcataatcacataaaaaaaaagtaatgacatatttaaaaatgattgagattctttaattagaatatat

SEQ ID NO: 215677 - DNA, 666 bp, Cannabis indica
aatggaatgaaaaggaaacaattttgattccatcatttgtttggttacattttaaagtattggaatgctctttccaccattttggtagaatgctattctattttaaaaaggaaggaaagaacattctaatgtaacaagagaaaaaatttaataatttttttatccattttttacatgcattttaaatttaaatgcatcaaatgtatattctattcttatatacaattcttttttaacatacaatttaaaataaaattaaacatttctttatacatatatttttttttcttcttttgaatttattatttattattatatttattttaatttgttgttggagacataaaataactataatttgttttattttgatgctagtacatatgtgaattttttttcataaatattaaataatttaatattaaaaagtaaccaaatctaaaataaccggtccaatccacattcttaccgattagattagattgaatttgagctatgtaaggatttgattggatccagaaaataaaatccacacttagtacagatcagatacactatgagtacgtaaaatagtgcggattggattgaaatgtacacgcaggtcttaatgctaaaaaaaaactcttttgagttaattagttttaatagtttttaaaggaagagttt

SEQ ID NO: 215678 - DNA, 356 bp, Cannabis indica
aattaaacataaccaaaagcataggttcatttcaatctataacattcttttttgataaacatgaaacgtagttttgtgttgttttctcttacaacaatttctattgtgttgatcatactatcttctaattctcagccatgttcatgttcatcaattcatgatcaagaccaaacttatcaccatcactatcatcatcaacaacatattattgcaccaaaaactaaagattttgtggttcatcatcaaaactcgatcatcaaaagcttcgaatttatgtcaaaagaaggggaggaggaggttactatggaggatcatcagccgcagccacaattcagaagccttttctcatctcttat

SEQ ID NO: 215679 - DNA, 1305 bp, Cannabis indica
ccaaatttttacaatacaataaaaaattcttatactatgttaattaatggtgtacatattttctactaaaaacacttaaaaatttctaacctaacttttaccatataattaatgattcacatccatacataaaactacctattatatcaccatatataaatgtataatcacttaacacaatatttaattatgtaatttatgtagataactctaatactatttgttactctatcatccactaaggctgaatatatgatagcaacataagcaataaaggaagtcatttggcttaaagggttcacaaatgaacttagtatcaatatagatgagttgattgttcattgtcacaatcaaagtgatattcactttatgaagaatctcatatctcatgaacggtcaaagcatataggcatcaagctgcattttataagagatattatcggtagcaaaaatatttcagtcaagaagattctcacaaatgagaactcagctgatatgttcactagctaagagtgtaacaagagaaaagtttaaacattgcctaaacttgctgattattgaagaacactaaaagttctctaatttttagaggcacaacagatggaacagtcaaagcttacaaggatatattttaccatgtgactaaaataggtagatttgtgagaaattttagtaacttggatactgttactattagtctcatctgatgaccagttatatgttgcaggtctgtacaattagctcacaatttagtttttttagtttactaatttggtacccttcttattgagttgcatatataaagctttgagtattacttctttacgtaatgatttagagagaaatttagatgactattgtttttgtaatgaggatggttgtaaaaaaggatgtgtgtgtttgatcacatctctctcaagtgagttgatttgtaaggtgcaagacactatagtgaggtgcaaaacactcttgttgacgagattaactctgtattctcctctgtattcctctattgttgaagatcgaagcttggccaaaaagtaaaaaaaggtgatgaacctcattaatacttgtctctctttcatttagtttgttctatatttattttttggtttatattaattttgtttgattcttggtaggtgcaccacaaagacaatgttaacttgtaagaaagaaaaagaaaatgcttttctttaaggaagttatgtcaatggtgacatgtatttttttctaaatatatttctcaataattatatatatatctcatttataaataaaaatacccaaaaagtacaattccaa

SEQ ID NO: 215680 - DNA, 928 bp, Cannabis indica
ccctaaataaaatacaatttcattgtaatcatattgacttttaataaagatcaaaaatcatttcatgactcagtcataagctttgttcacatattttatacatgattataaaatataagttctattaaatcccaaacatatagttattcacaattacagtgatgtcatcacagtagaaaataattatgattatatgcttcaaattatctaggcccacgttttatcagtgcacaagatttttattgacaagataatcagcaataaggtttacttacacttggataagtggaatgtcttttctaggacattagtaaagtaaactagcatcagatctattggctatacattgaactggatcgatatttacagtgtaatagatatcgtaaacttaccataatatcttttgtaggtaaatatctaaatgttgatcttagataagtgctcttaatcttgagatgattaggttctagctcaattgtgtttcacatgttctttgatttgttcattaaagctttcccattggtttagctcaaatacttatatcttaggaacatggtagtgcaattgagtgggagcactggtcataaatatggaatatatagctaatataagtacttagaagtgaaatgatggtttccttagagcttggcaaaacgagtttaaatgattgaggtctcatttcaataattatattagtttcctaaaatatcatttacaaggagctaagtattttaaggataaaatatattaaaaaaatggtaatttagtcctattcaatgtagaccgtctatagaggatcattaattatttaaattaaaataatggataattaaaagtgtatgtattcttggagaatagaacgttctatgtaatcaggagtgtaattctgaatctatgatagaattaggaggaattaatacgatagaaa

SEQ ID NO: 215681 - DNA, 834 bp, Cannabis indica
aaaaaagatgatgcatcttattccttcagagaaaaactgagtgccttcttcctaaacctagccgccactctcttcctcttcttcacttctgaaaaccgaaccctatagtgagtgagtgagtgcccacacacatcaagtggtacctcaatcatagtgtggaagattgtgaagaatccagattcaagagaaggacattcgggctcagatcttggtgatactctgcgacagaaaggatacaagggttagagatctgagtggaaggagacattatattccgctgcaaccactgtaaggtttctcatactttatatgtgtttatttcatatcgttttagaagttcatatttaggatgttaaacaacatacttgttagtaaatctaagatcctggtaaaatatttccaacatatatacactataaatgcaccatatatacattataataatatagaatatactatatatagaatatatatactgtttttccctactcaacaaatcaaataatataattattttttttaattaagggttacatttactattatgttttaagtataggtctaaaataaatggtaattttttttataaaaatatagataattgccaaatagcaaaaacttataatttatattatctcactacttaagtataaaatttttcatcaaatatttttaaaacttttttttttaaaaaaaaaaaaaatcataaatcaaacaaaaaaaaattattattatgacaaaaaactttaaagaatttcataaattatacattttttttttgtcaaagtattataataattgtgtgaagcgcgattgcattacttaattatcttt

SEQ ID NO: 215682 - DNA, 397 bp, Cannabis indica
ttccaatactcctacgctacaaagtcagggcgtacaccgtttcttttacgtggcaaggtatttagtgggtacgagaacttttacgtgttggactcgtaggaaagttggagaaggaaggttaatttggagtggtaaagactcgtggatactaggtcacacttctttcaatcctctttcggtattcagttcctccaaatggactggttgccaatttaatcaccgaagaacgctaatggaacatatctttatgttgagacgattttgaccctgcctttaagtttttttccaaggaatgacttgctgatttggcatcatgatcattatgggatttatatagtcaaaacaggctaccatttagctgtttttttggaggttgttgtagactcttctccctcga

SEQ ID NO: 215683 - DNA, 757 bp, Cannabis indica
gtaaaatatttaaggtgaatagaattagtgattacgccatatgactgaggttgttcccattctcattaagggattgagcaagagttggttggtatctttgccacccaaattctatcaacacttgggaggaattgcccctaaaattcctttccaagatctttcctcctgctaagattgccaagctaagagctgaaataaacaacttcatccaacaagacaacaaatctctttatgaagcttgggagaggttcaaggacttaatcaaaaagtgccctaatcatgggattgaaaagtgaatgcaagtgcacaacttctacaatggattggttggcactacccgaacaatcatagatgcacagctagtggggcttttatgagaaaaagtgtgaatgaggcttatgaactacttgaagagatggccatgtataaccaataatggtcaacagaaagaagccaatcaaaaaaatttgtgggtatgcataaagttgatgccataacaaagctgacagcccaggtggaggccttgactaaattggtgactgctcaggcaaagtaagctcaagttacttgtgagctatgtgggggacctcacacttatgatactagcccggtggatgtgaatagtttgccaatggagtaagctcaagccattgttaactatcaaaataacaactatggttacaactaagggggtcatcggcagaactttcaaggacagttttgaaattagcagtaataagggttctacccacagaga

SEQ ID NO: 215684 - DNA, 753 bp, Cannabis indica
atgaagtatacaagaagtataagagaagaacacttatgaattagaaagggatttgcttttatagagcagaatacttgttgggaaggtaggaaaaattaattaacattaaatgtgtaattgtacacgtgtaagacatgcaatgtgcttttatcgatagaatgtcgatacattgttgacaggttgttgataatttgtggataagagcaattgaggctaaacattattgatattatatcgatgttatgtcgatagcttgtcgatatcctcaacagatagagtaaaagttagaaaggtaaggaaaattaattagcattgaatgtctaattgtacacgtgtatgacatgcaatttgcattgtcaatacgatattgatattatatcggtgatatgtcgacactctgtcgatgatgctgccactcgaaatcctgacaggtcttatcgaggggatatcgatggaatgtcgatagtttgtcgaatatgttaaattcttttttttttacgtttttttataatttttggtatttttctctaacttacctttttttgtttaaaattgcaggatcgactatgtttcttgttgtatcgtacgatggtgtttgatatgttgagggttttaattgggtttataaaaccgaatgcagtttgacgttgacggttagaactgacacaaccatacaacaaatgcgttttttatttagttttcaaactttgagacatatttagtttttattttctactaggttatgcttttttt

SEQ ID NO: 215685 - DNA, 544 bp, Cannabis indica
ccctcaagaactgaaagtggtggattggcacttagaacatagcagacaatagcagatttccagtacgcaacctcctcctctatgtcatccattgtgatcttcactttcctctctttcttcgaactattaaaatctgattccaggttacgcatcactggttctgctcgaagaatcgaaggcgtagtttgaattcctttggagatagaattttggcattccctattaacagctaagaaatagccaaaatcagcagctatctcatcttttcgcttcaataatctcaatgttaaatccggagatacaggacgctgatcttgaagcaacacatcaactcctgccctgtcttcctcttcatccgagaattccactagttcaacaccaagaatttcctccatggatttggtcttccttacatcagcagatgaattcagacctttcttcttggaattcttattcaaaatttgcgactttgccacagtcttggacctcgttttcgccatggcaccaactcagaggagagttgcaaggagcgaagagagagaga

SEQ ID NO: 215686 - DNA, 536 bp, Cannabis indica
ctttagtttaagaggtaaaaaaaaaaaaaaagaaagtagagacatacgacgtcgtcgacatggaggcaaccagagtcggaaggtcggccgaagcggaggacaagagccttatcaatggtgtctctgattatggagtctacctctttcttctttgtcagagttttcagcaggtaactcattcttctacctctttttcactcgacgggaaagaatgcttttttttttcctgtaaaatgttcttaactaatttaggtgagtttgttaatatttttttttgattaaatttctgcctttttaattgaataggtgaaaatatttttcaaaaatatattatataaatctgtttttactatttaatttttataaaaataaaattatttttttaaaaaaattaattaatatgttggactccgaccctaatttagactttaaaacccaaataacagtcctgaccccagtctcgaactcgaaccatggttccgaccccaaacatgaatttagactcagacttaaataaaatcaaaaaataaaaataa

SEQ ID NO: 215687 - DNA, 810 bp, Cannabis indica
tttttttttatagtggtctacttgtagttatttgaaatgtaaaattttaagatacgaaaaagtttaacacgttgaaaatatggtttaaatagtttgttacacatgagatttttttttttattttatatatgtgtgaaatagactgtttaaaccttatttttgacgtgttaaatttttattagaatctctaaaaattttacagttaaatttttattagaatctctaaaaaatttacaggatgccctaaataattacaacataaacgaccataaaaagagttggattaaaaattcttccaaataccaaaatttaagtggtgcatcagtggaccccctttcaaaggggtacattgttgaatttttctataataataataaaaaaatcacccaattatttaagggcgttttttagttttaaccaaaaaaagtaacaatattacaaaaatactttcagctggccaaatatacaaatatatagtctaaataaaaaaaaaataacacaaataccacttacacacgccatctacgattcttgggcaatcatcgcgcaaccacgcaataacccaacgcaaccgaaataaaaattcaaaccatcattaattctgacgactttacctgagaagacgatcaaaatcaatcaaaacatggactgtttcgaattcatgaagaaaaaaaaggtgtagaaaaactactacgaaactaaaattcaactagaaatccagtttaatttgcataaaactaatgtgctgacttcaattttctaaaataccgtcgagatgcagatctcaaaaaacgtagtaacaagacttcc

SEQ ID NO: 215688 - DNA, 684 bp, Cannabis indica
taaaattttctagcccaaacaaaaccactcctcctatcatcattcattataataaccataatcaaaacctaaacttccccacttctactcatctatagtagagtagaatgtatttgggcctgaatttttttttacaaaaatattagattttgagtaaaagtttataattttattgttatacgaatttttttacaaaaatactgttttttttataaatcaaccgtaaaacaacaaaacagaacaattaaaacaacagtggaacaaccgtgaaaacttaacacaatacacaacataaaacttacactatatttttgaaaagattccaccccacggtaccaaagtaaaaaagttataaatttcaatatgtggtgtaaaaaccccgcccgaaaacccaactcgcatgctgaccctgtctggccggaacctggtaaacctgataccttaaagaaaaactaaaaaattgggattcagatgccacccaaacgctatttgtaacgaatatcagattgacatttttcacatatattaagtttcgaatgaaattcgaacatgatatatataagtaaaaaataaaataaaaatctaacctaagcctaacactcactcacctcaccatcccccacaccacatcttcttcttcttcttcttcttcttcttcttcttcttactacaaaaactgttacc

SEQ ID NO: 215689 - DNA, 590 bp, Cannabis indica
cacttttgagaagtttagctataaactcaacacttcctattctttcaagatgtacttgccgatcttcgtttttcagtgagatgatttagagtagttgatatttgatcatcagtctcaaacacattatgatttggttcaacatcaacaacagtatcaagggaagaatatccaacttccttctggctcttttgtctgtcatagtcttgagaagttgattgaaatcttaaagctgagacacaaagagtattaacaactcgcaataaatagttggtaccattattatttgtgtctttattggaggtgtcattcttctcttcttctaataattttgtaagctttatttcttcatggattagagaactgctacttgaaatggttactaagcgcgagcaagcaaactagaaatgtgcctctccccccttagagagcatatatatgaatttctgtgaaaaaaacgtatacaaatgaattcccattcatgtcttgctcaaacatactactaaaaaatgaggcaaattaatcctactatacattgtaatatggctatttaatattttttgtcctacaaaattatgatctatgcatcatag

SEQ ID NO: 215690 - DNA, 724 bp, Cannabis indica
taaaaaaaaaagtcattttaaaattatttctaatctctctatctgtaatctatttctttacttatttttcctaaccgataaaaaataatgtggtagtcatttttataaaaataagtagttaactcttgatttattttatgtacaaaaagtaaatctattagaggacaatagtcacaattataagcgaaatacggtgattacaactagtgtgatacaattaaataatataactttaatttgttatatactgaaataatattttttgagttattatttattatattaataattttttatatttttaattactgtattaaaaagattaaaatagtcgcgcgaagagcaactatattgccttaattatatatgtattatataaatttatcaattattatattatacatatatattttgagttctaatttaatttatttattttcaaaaactggtatatttataataaataaattaattaaaagttataatttattagatttaaataatttgtatgatattaatttttttattattaaaatgaaaataaaaataaaaatttaccataatagttatttatattattaaaaaaatatatcaaaattttaaatttgataggattttatgaataaaattatcattaaacaaaatacaaccgcatgaaaagcgcgatttgtttcctagtttgtttaaatgagagtttcaactcttattgtaatacccaaagatt

SEQ ID NO: 215691 - DNA, 530 bp, Cannabis indica
tttttttaaagaaaagtaagtattgaggggacaaaaattatcaatttaggaccaataaagaccttggtttttaatttagtctacaaattccttgataaataagaagcgtaaatgccaagccccttggcctgctctatcaatttttctcggaagagaatccagtgtttcgggattacttttaaagcaagcaatgtgtataaagcattttcaaatgtgatatacatatgttatacctatctttttcattatatattatttacttcaagtattctcgtgggaagttataaataaatgtgaaaaaagagtagtttagaaaatatttagttactgtttatctgttgagctaaatgaaataatacattatttgtagaatattaacaaaaactatcatattaataatgatcattttgtaagagtggtcaaatatgaaaattaacatttctattaaatattgcaaaaaaaaattctaaaaatcactaacgagagaagggtcgttacctctaaaatgagtaagaaatcatagttttgtg

SEQ ID NO: 215692 - DNA, 505 bp, Cannabis indica
aaaaacttcttaattcatcttctgtcttcaactcttcaatcttcatcctattcagaaggttttttttttttgggcaagagatattgaacacaagaaacaaaaataataaattaaataatttctcctaaataacatactaatagaggttagaaaataataacagattaatgagcacggactcttcccacagtatcagataattagattaaaccaaaaaatgtttagttagaaactaaaaaaatttattagcgggtgttttacattgttttttgttttcaaaattgtgttttaaaaaataagaatagaaaatactttttgtagtttttaaaatacaagacgtttttagttaatgttttctgtaaaattgtttttaaggatttttttttactaaaaaaatacttcaatattccactccacacgacatgcatccaaccccactcctacctcggtatttaaacttaggtggataataggtggagaatgattccccatccctatccccatt

SEQ ID NO: 215693 - DNA, 561 bp, Cannabis indica
caaccagagacaagaggttttttaagattaacctcaacaaggactctaagaaatgtgttccaagagctcggattgtcttcttctaactccaccctaatcactttcccaattaaaccccccagtcgagagccattatcctttgaaaaaaattcgtggggcaggttatgaatctgcacccacaaacagaaaacatccattgaaaaagacccttcaaacctcggcatccaagcacggagagcaaatgtatatccttgaaacgaccaggggcattatccagaacccattgcttatcttcttcacattgaaaccccagtttaaagctattgagagtagaaccatcagctaaagcaaacacagccaccttcttattccaaaccttagaaacaaaccccaaaatgtcattctcatcaacagccatgggagccacgagcattccatacaagcacaaagaggaaaagtgcttttatggaagaagcactcggggacagagaaatggtagcatccaaacaagagataactttgcctctaataggggcatcagcagcattaactaactccatt

SEQ ID NO: 215694 - DNA, 563 bp, Cannabis indica
aagaccaatatatatcttcttaatgaagttatccttttactttttaacaaaagatattaccttagtgataacacaatatatttatttttagtaagaaaccaaaatttttgtgttatatttatttttagtaacaaaacaaaatttaactcgtattatatgaatacaaatttagttataaatatacatttagtaatagttttagagaccattgttttagcaataacataatttaataatatattttagttatttttttaaatttcaatcataaattttattgtgactaaaataaaaattatgctagtctaactcaaatttaccatattattatatcatcatgaggtattttttcaatttatcataattatatctagagcattcctatgagacatcaaggtatttaacatttttatgatatgacatcttataattaattagatgtttattataatttttattaaattaaaataaataaaaactaatattaaattgtaccaacaataatattacactttataaaaattgtagacatcatgtgcatatatgtttagatgggatgagat

SEQ ID NO: 215695 - DNA, 604 bp, Cannabis indica
aaaaaaaaaatagaaaaacttaagtttaccaatggtgtgtgagtaggtgggagtcaagtatctacattgctgcggtacttttatgttggttcatgtattttcttaaaacaatttgagatggcttttcaaatgatgcttgtgctcatcaggtttctcttcttattgtttaattaactttttagtgaatagaacaggagctactcatatataatgaccctgttttttttttcttctttacaagaataaacattaatcacttcagtaataaggaagaatattcagcaatcttggagtatttttggcatcattgaatgggagcaatactataattttttaaagattatttgtggttaaactatgttttggattgtttagttaaataaagtaattgagttcagaaatttcgttttgttcctataattaataaattttatcatgtgtttggatgtagttcataaaatttacactttttatattatatatattgacaggaatacaagggagttcatggtgtcaaggtacagagaaattgcggaaattgttcttagatacctagaacatcgagatcatcttgttcggcagagcataacttcattgttacctc

SEQ ID NO: 215696 - DNA, 777 bp, Cannabis indica
gtcatttgatgtttggccaaccaaattaacaattatacacattggacacacatcaaatgagtagaggcatagagatcaattgcagctattctggacttgagcaatctcagggagtgagaatgcttacaagtttagacaaagtctgaacttggcttggggaacatatttggttaacatgtctgcaggattttccttagttccaatcttcttgatctgtatctccttccttgcaatgacttctctgataaaatgaagcttgatatctatgtgcttggacctttcatggtacattggattcttcattaagtgtatagcactttgattatcacaatgcactgtgatgtcttctcctttgaatccaagttcttctgagaaacctctcaaccaaattgcttccttaatggcttcagtagcagccatatattctacctctgtggtagatagggctaccactttctgcaagtttgatttccaactaatgcatccaccaaaagcagtaaatgcataaccagtaattgaccttctggtgtcgatactcccagcataatctgattcaacataccctgcaacttcagtttcaaattttgcattgtctctgtatagcaaaccaacactagttgttccttttaggtatcttagaacccacttcacagcctcccaatgtatcttgcctggatctgatataaacctggtcaccatgctcaaagcatagggtacattgtccatgtatatcctgtcttcttcattatttggcgcttgattttgagcaagtttgaa

SEQ ID NO: 215697 - DNA, 818 bp, Cannabis indica
agatgaaactatattatctagttaaatataatattatattaaagagagaaatatattattttaatccttgtgaaataatagattaatgaaaattaattaattataatttattggtgaaataaataataaatcttatttgtggcaaaattaaaaaatcaattttgaaccttaaaatatgacccatacgtgtaggtaataattaaaataaaagatctgactgatatttgttattcagatattagatatttatatttgaatttggattgtaattcaaatcaaattaaatattttcttttattttaaataaagaattaaaagaattttgatataacactatatataagatatataatatcgtaaattaatgacagagaaaaagcctattaacagacggaatacaactgaaaaagaaaagaaaaataagattgattttttttaatcctattctctctcacacacagccacacacacacacatacacccatacaaggtgtgtgtgaaattgaacaaccctgtcttagttacagtatctcatgaattaagtacgcactgtaatacataaattaattcatccaaataagatataatagtatactctattcatgagtgttgagactggcttggaagataaatgtgtggattcttcaataaaagttcttgaattggatgatcattaattttacgaaaagaaataagaataccctgatagacttcaagaggtattatctttctttcattagtctatatttaagctatatatattatgttgagatccttatgctaatgattcatattagataaaaattatttttagattc

SEQ ID NO: 215698 - DNA, 984 bp, Cannabis indica
agatcggattggattggatttaaagctttatgcggatcggattggattggatttaaacttttatgcggatcggattggatccaaaatatgaaatccgcacttagtgcggattggatgttgtttgaccaaaaaagtgcggattggatcggatgaacacccctaaaaagtaatatcagatgaccatcggaccaccatcggaccatatctacatttataaatgttaagctccattcattaagctcggcaagaaggcatcagaccaccatcggaccccatcagaccatatcatcgggctaccatccgatcacaatcggaccttcgtctgcaacctttactcattttaacaacaggagggtatcagaccactatcggaccaccatcgggcctaacaaaaaaatcagtttttttgcccaaaactcaaatctagccattttcaactctaaatctaacatcttctcacacatagcaaacattaaccatacaatttattcctttgataacaattgttgatggtgaagccgtagttgatggagaagttgttgggtccgtggtggtcgattaagtctgtgggtcctttgagtttctggtcatagctagtgggcgtggagagaagagaccaaggttgtgagggttgttcaaatgagaggggtagaatggggtcttaccaatattgaatagtttaggtttaaaaaaaaaaacttgtccaataaatgtataattcgtcaaatttccctaataaaaatatgtgaatgcatgtatatttttttttttgagtgtagcgtaatggtattttacaatcatatatgaacttaatagcttaaggatcctaggttcgaacccatgacctctccctttttcccatccctccctcaccactaagctagccttagtggcttatgtgaatgcatgtatattagtacttgacgttaattaaaaaaattactttgcattaaatgtgtgtcattattatgttttttttttttt

SEQ ID NO: 215699 - DNA, 829 bp, Cannabis indica
ccaagagatgaaatcgacgggtcctttaccagagaatcaatggccaaatcgttgaaggtagtgatggttgaagaagaaggggaggtttatagagagaaggcaaaggaagtgagtcccatatttggagacatgggagtgcagaacaagtatgttgatgagtttcttgcatatcttaagtctcattcaatttgacaagttatgttttattttatgtaatattttgaacacattattatatctatacatatatgtatgtgtgttcattaaaattattattattacgtaccacttgtgtaaatgaattacatttgtatgactatgttatttaaatccattcaactttttattaattccgaacacttaaataactaataatgatgaactcatctttttttgaacaaaatgatgaaactcatcttatatatactgaatgtttttgttctttaatataattattctcttcaccttcctcgtgaagaagcatatattgaaaaaaaaaaaaaaaaatagttttgtcaagatcgacaagcctgtttgatttgtaaagtagtcggaatagaatcaaatattttaatcattaattctatagagaatatatatagagatgatagaaaaaaaaaatctaaattattcatttctatcaatatttgctgaccttattcttttcttatctttaactgttttttgtttttccctactgtggccgttcacatggaatttacattgatgagtgggagaattaattcaagcattagaatgaaggtggtctttggttggactcggaggtgatgatgaaattgaaatggaatgaaactaatttttttttttt

SEQ ID NO: 215700 - DNA, 624 bp, Cannabis indica
aaaaaaaaaaaaaactttgtaaataaactttgtcaaaatttagattgtgatacaaataagccatttaatttcagtaggttctacttctattagaaggactgtcataggtcataactgaatcaggggaggtactactataatatatttctttgctcatccaatttatgtttaaattttaaggtgaactgtccctcatatttggaaaattaaaaattctagaagagctgtcacaaaagacacatgcccccatattattaaatattgattctccttaatcattcatataaatatccgagcgtttccttaaaagggtagggatatattttaaaaaagaaaaaaaagaaaagaagatttttgataaatatggattattgtaatacacataagtaccaaaaataaaaataaaatataaatacattttttttttttgaaacaatgaatgaaaacgtacatggttatattattgggtttgtgttaataaattaccaaataaaaaactcaggtggttggtaagagcatcaaatttagaaacaaccaataaaaatccaaattccagtacccaattcaataatgatcattcaatatatatgatcacaataaaaaaatctacatggttaataatgt

SEQ ID NO: 215701 - DNA, 694 bp, Cannabis indica
atagttgtcctatttgttcaatatgcataaacacaatttttgcattgagatgtaataaggcagtttcattccacacatgacacatgcaattagtagaagcagtcaatctcgtttacaatttaacgcgttatttatgttttaggattaatgtcattttctgaaagtatcacaggcagtttctacgacactagactttccccattcaaacgcgtgtgattaaaaagaaggggacatattccattacatatatacatatatacatttgaaattcttccacttacacataattccaaacaatgaaaaaatgaaataaaataatcctgttaattgaaatatatacaaatgtatatagaaagacaagaaaagtacagatatttactgtcttcgtgggaagacaatgcaacaaaatattgacgcgaactcaatagcttagtcaatcataaaacgttatggatagtgtctagaaaaaaaaaaagaagaagttatggataactaacaataattgtgtttccattttagaaaataatagttgtgtttcaattaagagtgttcattcaattaattagcactatttttttcatagtacatctaatttgcaaaagtgcagattttatattgtgaaaattacatgaaatatgggattttgtaaaaagttataaaatatggcatttataggtttgctacccttctatgg

SEQ ID NO: 215702 - DNA, 527 bp, Cannabis indica
tataatttattgtaatttttactaccacttttatattgatattgttattgagctattgtttattattatttatcattagtgatatcttatttctggcttagtcaaatagaccatcaaagagaactgttaagaataatctgttaagaataatgtgtaaagggtacgttgcacctccgatattgcagctgcatccaatcattgtcaatgattggttgtcctctctttgtattccagaatattcttttgttaccaaaatttgttatgccttgatttttgttatttccaagtggcattgcctaagtggccattcatgtatttacttttgctatataatgaacattcaacatttagtctggttgagttgataattttattttgtctaaattttctatcttggtatcagagcaaaataccagatctccaccatgttattggacaatctcaaacttctctcactccgttacctgaaaatcaaaaccctactataaataatttatcagaatgatagagttgaactgtaaataatt

SEQ ID NO: 215703 - DNA, 520 bp, Cannabis indica
aaacccgtgacctgtgaacctaaccatttcacaaaccgagtccgggtaaaattttttgaacccaaaactagaaaaaccagcccgatgttcagccttagccttcgcatctacttgtttaaagacaccgggttcgtacactattggagttgtaagtgtacttcccggagggacaatagttggagcggatagttggggagtttgagttgcactacttgttttggtggatggtgtcggaattactccataagcatggacatacgcttcttctaagtgtatgaaaacttgggccctagccaagaaattgaacaaagtgtaagacctttttctttgtgactctccccatagaaaggatttggtagatattcccgaggttaaggccactagtttcatatcaccattaacattagtctttgcagctgcatccatcattctctgtatatatttcttaaggctttctctcggttattttttgatgtacgtcagtgagcttacttctatatcataatcctttacagttatg

SEQ ID NO: 215704 - DNA, 525 bp, Cannabis indica
agctttttaagcctaccctatttattgattcccttgttaatttgagattaattattaaaatcttgtcttttcttttaatcctatacatgaaccttttgagacttaaaaaactctcttgttcatccttttttcacaccatagtatattgttgttttatgtatttgtaaaggtgtgagaattttgttaaagagaaaatattgatatatggttatgtatcactgatgatgagaaaaatatcattattcccttagaatgaatgtttgtaagttgtaagtatttaatcaaaaaaaataaaaaataaaatgaatacttgcaacaatttaagtgtggtggagtaataagttttatgctaaaataaaaaagaataaaagatttaattgttgatgagagcaaatgaggaatgcaaatgagaattatttgagagaatattatatatgtatgatatggcgtgatataaccttaaattaaccttcttatctacctttcattctagccttacattataagcttataaagtcctcttga

SEQ ID NO: 215705 - DNA, 815 bp, Cannabis indica
tgataatcccaccaattttccttttttatatcaattttatgaactcacttaactcaaagattatctttttcgtgggctatgtgacctctgtccataaaaaagctctacatatagagtcaatagcttttaacactttcctcgaaagtatcattacttgagcctaatagatgttaattgctacaagaagaaaatttactaaaatcgctctttctgcatatatgataagttttttgaacttccaagttcttattctgctaattatcttctcaataataaaatcatatttaacactagaaattctttttaaacaaataaaacactcgaatagtgaaaggggagcttattactttgttgaaacccgaaagcatcaaggatttgttcgtaattttagtataagtatgtaagaaaattataaatcaaaaacaaatgcttaattatattaaaataatttataattttataaaaattgtcctcaaaataatttattatacatgtgtataaatacttaaaaacaatctaactattttcaaatttttaggcacatggatgagtataaatacattttttatgtgatcgtttatatatagtatagttatttaattagaaaattttttcccaaaatttttctagtaaaattactaaaatatttaaaggtgtccaaaaaatacgaaacaaagttgtgtttgaagcatatatgttttactagatgaaagttacgtggcgagccacgtaaactataagttttatttaagttctagtaaattttgtttaagaattcggtaacaaatcaaattgtaaattattatttaaacaat

SEQ ID NO: 215706 - DNA, 689 bp, Cannabis indica
aaaaaaaaaaaaaaaacgtaagggtcgataccttttggttcctaatgatagggatttttctagtttttggtcaagtaaaaagaatcgtaattaagaaaattttaatgtgatagtgtgcaatgtaattatttgtagcttttataattttttgtaaaatttagtaataatttttatttagagcgccttatatatatatacttatagttgtataatttggtattcgattttaggacccccaaccacatgcactgtcgtactttttatggtcatttgagctagcctcaagtagggctgagcataaaatataaaaaattgaataaaatcgttcaaaccgacctgccgaacactattgaaatcgtaaccggcggaacggaaaactgaaaaaactgttaacagttaaaaccgtcattcaacagtcaattttttataataaattggtcgaaaaaactaaaactggtcgttatacatatatattaatttattaattttttttgcttttaagtattgtagttaataatattatatataataataagggatattagcggctaaattcctaaaactttacggtttgtaacagttaaccacaaaaactgaaattttgggagcaaaactcctaaaactctggttccgttttgctctgtacacctccattaaaaaaatcacaataaagtaccacggtggactat

SEQ ID NO: 215707 - DNA, 821 bp, Cannabis indica
gaaagatttggtattcgaaaagtttaattcgagggagaaaatgcagttcttatgagcttagactttgaaattattgatttaatttatgtttttcttatcctatcaatagaaaatttgctggaaagtataaggcatttctcctacaacgagataaaatccgcaacaaataattttcacgtgagcaataaactagggcgcggaggctttggaaccgtttacaaggtattcgaactatgtcattcttatcttttgttgaacttcatttatgaaataggatcaaaatcttgaaaacaatgaacttagcttttaggcaaatttgtttttgttgaaaaattcggtagggaactttgagagacggtgtagtagttgcggtaaaggcactatcggctcaatcaaagcaaggagtgcatgaatttttgacagagataaagaccatatcgaatgtcagacatttccatcttgttgagttgataggttgctgtgttgatggagggaatcggattttggtatacgaatatgtggaaaataacagccttgaacgagcgttgttaagtaagtttaaacttaaataaatcggtttgaacacccgaaaatgagccatggatgtaacttttctttgtttcttcttgtattgtaggttcgaggggtacaaacatcaaactcgattggagtaaaaggtcagctatttgtttaggcgttgctcggggtctcacgtatttacatgaagaactcgaacccctgttcatagaaacatcaaagctagcaatatactccttgacgaagatctaaacccgaagattggtgatttcgggttggcaaaa

SEQ ID NO: 215708 - DNA, 522 bp, Cannabis indica
aatgctccatggtgtgtaattggtgacttgaataatgttcttagccaaagtgacaaacgcggaggacaaccttatccgagttggttaatctctggtttcgaacaaactctaatggattgtgatctttttgacatggacttgattggttatgcctatacttgggaaaaagggaggggaacttctcgttggatagaagttagattggatcgcgcccttgtttcatcggcttggcttcaaacttttacacaagctcggttactaaaccttgaattttcttcttcagaccactcgccaattttcctagaagtcgtagctccggacgtcttcattcccaatcggcaattcaggtttgaaaatgcttggttaaaagaaccgatgtgctttgaaattgtgaaggattgttggaatgtttctaaccatgtgagtgtggccgaaaaaatatctctttgtgctgagaaattatcaacttggggaaaaaatgtgactggcaactttaagtttcgaatcaagaaatgccgaaat

SEQ ID NO: 215709 - DNA, 668 bp, Cannabis indica
atgggtcaacttagggctaactccggatcattaaatgcataatatatttgctatttggtgacagttgtagaaagtgaaaacaatacattattattattattattattattattattattattattattattattatctgtgaggaaaaacaatactttgaattctaagacaagcaaaaaggactagaaacacatgcacacactcaagaataacatggggtttttacttagtcaatcttataaaataagatgcataatgattcacgacagcaagggctaaatgattgcgactaaactcttttgccttttaatctcaataaaaaataagtcagaaaaagaagcagcgcccaaaagtcttacccaacaaacaaaaccaggtaacttagagttcatggtaatgcaaccagtcaagttcaatctctacaaatcgtaatatagacggtaattgaacaggattaggaagatgtcaaaactcaattagataatgaagatgtcttcttgtgtaaaacaacacaatttaacaaacgctttatttttgcgtatgcatgacaacaaaaattgactgttaaatgaacttggacttggaaaatcaacatggcagtatttcaaatatttggatttagcatattagttaatattgagaatcatgttagtataccaatccatccc

SEQ ID NO: 215710 - DNA, 701 bp, Cannabis indica
ttaaaaaaaagttgttaaaaattagcttagggtcctatttttactgttttagaaaatacagggtccattttatcatttaacaaaatatagggtccaatctataacttttgcaaaacacaggatccaaaatggtatttacccatatatgtataattagttacttcttgagttttgagtattacaaaactgtccttacaaaagtaaagtatacaaaattgccacattcataataattatatcatgcttttattttttttaactaaaatgaagtatatgtaaactctggacagctcatacttaatattttctttttgacttaatataataactacaattacaaattgatgaaaattttatatatattatgattaatatatgtttccttatgattaattattaattaattaacattattttatcatttgccccccacatacatatattatatgagcattgctattgagtattctggtgctcaacactttctataggtataactttataattggtcatccatatttcttaaaatttattttcattgtaatatgcactcagactcaaaaaaacatattattattagattaaatatatatttttttttggtactaataatgaaagttaggcacatttttatttaaaatttagcttaggagatcgaaaaaaatagttaccccaattccaaacagtgttcgagaggtatg

SEQ ID NO: 215711 - DNA, 971 bp, Cannabis indica
attatcttttttttttttggccaggagtgtcgatcttctttgggtataagtgcgggctggtcagggttatattttgctattgcgattaaattttgctactgtgattagtcttgtctctatgacatgatttttgagtgttttagtattgcctctgtgacatagttttaagtattttagtgttatgtggtaaaattggtttttgtttttttatttcgttgtttagtttttatttatttttcgataacttgccatcaaatcgctattaatggttgggaataacaagttctatgcgattaaatgagttgttagtaatgcagttacgtactttgcacaatagtagaatgctcaagctatgagattaaatgaactttttgcaacagttttctactattgtgtcttatgagcagtagatgaaactgttattaaggttaactgtgatgttataattttttttttcatttgattttattttagttttttagaattagacgattgattatttagctcgtttttctaattctgattcatatatatattttttttttgagtcaaagtgaaaattttattcaaacactttcagccattacaatagacttgaaatcagcagaaacattatgctgattaaaaacacaatctgacgaaaaacaagactctctagcgagacaataagcagccctatttgcagatcgtttaacaaattttaaagaaacattattcaaagacgaaattaaggcccgacaatcaccaacaagtaatcataaatgagaaggcattaaaattgagctaataatagcttgcaccaccaccaaagcatcagtttctattactacactggaccattgttttctttctatccaactcaaggcctccttaatcctaattgtctcagcaatttcgggcttaaccaccccaaaccgagaagcagaaatagcttcaaggagaattctattcgtatcacgggccacacaccc

SEQ ID NO: 215712 - DNA, 1021 bp, Cannabis indica
cgatatgataactcggtgttggaattttggattcggttcattccggtagcagcaaaattgtcggatatcccccaaacctttctttgtgatttgtttattgggaatcttcctacggagttgaaagagaaggtgcgaaaatataagctgaggacacttcctgaggtcataagcaaagcattcgtagttgaagtacaattgaggtcacaacatccaactagcacatcgaaggaggaagaattgcagaatgatggctcggcactacaggtagtaaatcgacaacaacagaacaatactcacgaggaagctttgattgacgatgaagttttaacagcggatgatttggttcctccatcaaagaagttaggaaataaattgcaaaatcttgactcggaatgggaggtatatcctaggactgaagatgatgaagttgagactcaaccgccactaccaacggagactggaaataacacaatactggaattttcgggggtgaaggatctgaaaacaaaggtggagaagcactgcaatggaaatgaaccaccacctattctgacgatccccacgggaatcgtttaccgatatgggaagctacgaggagacgatgttgaagaaccattgcatttgccattcccgctggttactgagaagttgggggagatgtcgttggtgaatattctatcgccggttcagaggatgaactcgttgaagaaatcaccgttgtcggatactgagggaatcgcgtctgggctcccttcaacaaaaatggcagagtggggaatacagaatttaggtgtgattttggtggtggagtcgccggtgaagatggggaatcggagaagcctatttccatcagatctgggtgtgatcttcttggtggagtcgcctgagaagatgaaggtagatttcctttctcgttatctggaaaaaggctcttttgttagaatatttacctttgacccacttcacattatggcccaatcaactacaaacatgggcccacttatcattggaggtcatgagc

SEQ ID NO: 215713 - DNA, 528 bp, Cannabis indica
atatcccacaaaaattggattttactgcctccaaaagtataagtgtacacgtacccaatgagtacctcctcccattgcccacaccatcgcgagtacttgtctttacaatggaatttcccatgaagtgggttccagccctttctctagacttcaaaattccaagtacaaccttcatccatctttaatttttctaatagcttaaaaagatacttccaatccttagtctaatttttttattttttacagaatccgtccccagaactgcgctcacaaacaagttgtggcaatggatcgccttctatgaagccttatcagagggggaattgaggggggggaaggagtgaatgactaccaaattactacgccaatatggcttgatatccactttccaaagcatccacggagttagtggcaggggtcaaccacagacccccaacgaccttaaggagcagactgctttggaattatcagttttgataacgaaggcaactaaagatgaggagctcctcgctgtacatcggccagtca

SEQ ID NO: 215714 - DNA, 754 bp, Cannabis indica
atgatgatgatatatttttgacaaaattatcttcacatatagttggaattttgatttaatttttcgttttttgttcaaaacagtaaatcacacctcatatataattaaatgatatagttacattaaatatatttattcatgcatggctgattatatatatgaatgttaattttttgtagatctttattcaattgtagtattcaatttggtagtttataaaaaaaaatatttaatgaattgtgttaattcaacatcaaaaactaaagtttaattttgagtatattatcttggatcatgtattttgcaaaagttaataattagaccctaaactcaatttttaacaattttgtttctaagaataaccaactttaatataatttctaacacgaacagatacagaaaatgtaaccagtgttgtcataacatctcttgatcggattattattaagtttcattttgacaaaaaatcagtttagggtcctatttgtacaattttggaaaacacatggcatattttgtcatttaataaaatagagagtcaaaatagtaacttttacaaaacacagggttcaaaatgatatttaccaagtttttatcattttggttaagctaactggaaaaatctgctcatttacggttttctctctaaacttattgtagtcgtcgtcatcgtcttctccgaccaaggctcaccggacattcatcatcttctccgaccaaggcttaccgaccattcttggtatgtgggatggct

SEQ ID NO: 215715 - DNA, 1184 bp, Cannabis indica
gttgttcattttgacactacaaactcaatatacaaaagtaaatcatttggttcaataacttcataaacaaatttagaaaataacaagtataacaaatatgtttataaaaataccaaaaataaaacatattttacttttcaaggttttcaacaaactgatacaatgtcacgtttaggcgagagtcaaagcatcatccattgaatagagtagtcaactcatctaaaatgactaacattctagcaatattttattcaatcgaaaaaagaatctgacgttgtcccgtttaggcgagagtcaaggtcattcctatttcatgagcctccaccattgtttcatacttttgtaagacttactaatagtcgccaccattagggtgatccatactaaaaataaaacacttacaaataatacttatctttcgagatctgtggcgttaaattgctaatgaacgttcatccattagggatgattactcactaaaacaagaactatgtagaaccaacaatggagatcgaatgtctctttattaaagctcattatttaaaaaaatgtatttttatttaatcatttattttaattatattttaataatgaaaattataaatttaaagttggtccaaaattaattaaaaaataattttcaactttaatttagtttttactattgaattttcgaaatttatatataaatatatataatttgaaaaataaataaatgaattaaaatataataaataaatatttgaaaattatctaatttaagttgttccaaaataactaaatttccaacttaaattattttttaaaaaaattaattaaataacaaattaagttactaacctcgtaatttgaaaagtattccattttaagttgatccaaaattaacaaactttcaacttaaaataatattcaaagaatctttcaataactgattcctagaattcctcaacttaattatgaatttaaaaaatattcaaattcaagttgattcaaaaattagttataatttacaattaaaaaaaatatttaatgaaatattaaataattaagcatcagaagaatctaattagttataattctttatttaattaaatacaagaaaaatacatgtagtttatcttgaaaaaatttcactaaactaagtatatttttcttaaattgattttaaaatatacaaatgaaaa

SEQ ID NO: 215716 - DNA, 711 bp, Cannabis indica
tttgtatttacaaaattgaatttttttgcttttttttttggtctattactcttttattaagtttccaaatagaatttttatattcttggtggaatattgtatggcataaaaatagtaaagtttatatttttttatttcttagaagattgagaattttttgggatattttgtatgaataaatagaaatttttattgtgatcttgattctctttgtgataatgacatataataatatgagcaagtacaaaatgtttttttaagataaaataatgaagaaatcttgtgtaaattaaagactttatgacatatcccaatactatatgaaagatttaaaataataaacatgattaattagtgtaaaaaatattaaatatgaattaaaattatgtccaaaaggagaattgtaagtggaaacatataatgtggtcaagttgccaaaagtggagaacaaacaaaaaaatagtgttctctaaggagaagaaattttgatgctttctctttccaaatatttatagatatattttttttttatttatagtgatgaaactaatttatataaaatatagggagttaaatgtgattttatttcttaaatttagtactttttttatctatatataaatattttagggggtttaagtagttttttcctttaaatttaaagtttttttaatgattttctttttaaaaaaataaaaaatttaacttgat

SEQ ID NO: 215717 - DNA, 1044 bp, Cannabis indica
taattcttattacattataaaaccaatggtaattacatagttaaaaaagacatgttttgcccttccttttttacttttattaaatttaaatattaaaaattataaaattaaagatatttttatcaatatacttcttactttatctaattacaatgctcattacaatatcaaactaaatatcataatattattctcattacaatttttattctattacattactattacatcaaatcaaatatcatctaaatttactcaattacaacaacaaaactttaaatttttctaaaaaaaaaaaaactacaaaactttaagataatagtaccaagtaacccttttcatattagagaggttaccctcgtaaattacacgctaacccctctctctctctctccccacgatcatcgttctacttttctgtccaaattgggcggcgccggcgaaccaccggacccggagaatcactccaaattagcttctgattcatgcttctttctcttacagtactctcctccttcggtatttttcacttacactctccgctacattttctttaagcttaactcaccattcattaatggctgccctaatactattacattccaattcatcagtaatattagacgtgaccgaatttggtcttacttacttacattacactgctttgtatttgacgagaattagattactctaaattgatttttctttagaatttgattcccttacagcttggctagtcactctagaatttaaggtttaaaggtttcttttttcactgactcaattcaagacaaccaaatgccggtcaagaaggatgtttgccggaattttcagcgcggcaggtgggtataaagctttatctccaatacatgaacttttattttgcaatatttacatatatataattttatatataaagttttggtgtggtttgtctcttttcagctgtcaatatgggcaacgggtgtaaatttcttcatgtgacttcatcacaacaacaaccagagaccccaataatgtttttctcatatcaacagcagcagc

SEQ ID NO: 215718 - DNA, 550 bp, Cannabis indica
atagcaatatctttcagttgattcgttctcatcagttaggttttttcattttttttttgtttagttagattttctgtgaattctaagaaaataagtttgcttatttgaattgatgaggattttgatttgattgcaggaaaaatttgctcggttacctcctgttgaggagattcgtacggttcttgactgtatctgcttcgatcgccactcctcagtctcaaaccacgaccaccaattcaatctgcttttcttttgtatatttattctctgctttacttatgtgtatttattctctgcttttacatttgtgtaattattctcttattccatcaatttagaggttaaaaaaactctttgagatctgatctttcacttgttattttcaatatctgatcgaaaattcagatgtttgttttgagcaaaaactgtagcattaggaatttcatttcgagtgttgccgactccattgaattcatgcctccagattctaataaaattttgaaatactgtgcgactccacacagtgactgacagccgcatctctctctct

SEQ ID NO: 215719 - DNA, 764 bp, Cannabis indica
aacttacataataattaaaaattattaaagtatctgaagtaaggataaaaaaagaatattaaaattattgagctagtatttttttttttaaaaaaaggtggttattttcaggttaataactttgtataataagacagtagaattgcatcagaagaaaataccatctattctaaattttgatgtcgcatcattccactatcaattttaggaagagaaaaggttgtacaaaaaataacacaatttggttgaccaaattgaaattaattattacccaataatctccaatgtaatcgattgttcaagttgatagattatgttgataactgaaaacaataataaacaagattgatagttcgataaactttatttgataaatatagaaggtatatttatgaataagttcatgaagcaatttataaagtaaatggttttttttttttttttttttttgaaatggataaagtatatggctttaaagtatataagtttgttaaaaatatgattttttttaaaaaattattttatgagaaaattttaagaaaaaaaaataaaaaatatggaaaaacttcaaaactaacttccaagctgcgataagtaggcacgaatttctgtagttagcattattcccttatggtaattggttactcatctagttagcataagctatttaattactcttacttaattttctcatatttttaaattttttcttcaattttttataaaataataattttttttttaaaaaaactatatttttaccc

SEQ ID NO: 215720 - DNA, 1381 bp, Cannabis indica
aggcatcgagccactatcggaccaccatcggacttggcaaaaaaactaatattctacccaaaactcagatttggtcgttttcgaccttaaattttaatatctactcacagataacaaacattaatcgtataatttattcctttaacaacattgatgatgatgaagccgtgattgttgtaggagtcgttgggtccgtaggtcattaggtctgtggtcgcggtggtcgtggagagaagggactgatgttgtgggtagtggattgtaggtcgagtccttgaggtgagttcagaaagcgagagcgataaaggaggaagagaaagggttaggtatttggaatgggaggggtagaattggattttatgaaatgttaacatattttaccaatatggattaacttaagtttaataaaataattttaatctaataaatgcataaaaaattaaatttttctaacttatatgagtttttgacagttaaattctctcaactattatttcatttgtatttaatttttaaagttcaaattttgacaataaaacttttcaaactactaaactgttaataaatttaaatattatctagttaactgtcactatagattgcttatgtgtacataatacatttaattggtacatataatattattgttttagaattaaataaaatcataaaaataaaaaataaaatatattataaattttaaaataatttatttataatttttaaataataatattatatgtattaatataaacgtgtcacatatatacataagtagtttatgctgacaattaactgtaaaaagatatattaaatttattaataatttataacattttaccactaaaattaaatttaaatattaattacaagtaaaataataaataagatggtttagcaaaaaaaaaaaaaaaaaaaaaaaaaaaaaaaactttaatttatatatttataattttcgttataatcatcattcttatctatgacaaaaaccttcaaaagcttgtctctccatttttttgtcctcattcaatctaataatatattccttttctactatagcgtatataactataaataaatttggactaaatatttttttagatactaaaacagataaaagtgcatcgatacactaatttcaaaaatgtatcgtagaattttcctaaaatataaatcactacatataaacatgaaatgttaaccaataaaacaaaaattaattatgaaatattaacattttaaataaaaagtaatttacggcttaaaaatctaaatttaactaactttcaggttctagataaatatctaagtttaatttttaacgttaatataatacttaagttatatttttaaaacttatttgtaggtacaatgaccatta

SEQ ID NO: 215721 - DNA, 1021 bp, Cannabis indica
attctcaaaataccaattaaccccaatactaagaactgtttcatttggggacatagccttcaggaagcctcactgtcaattcaatttaccatcttataaactcaatccatcccaatccaaggtcctctaatcctcatgcctttaagcagtggtggaaatatgtttagtctttgaatattcctcttaaaattaaacattttatttggagggcttgtaaccactttcttccttctaaagttaatcttttctcaagaaagattctcgatgacccatactttcccattcccttttagtgtgttctagggcaggtaaatgttggaagtacactagtttctcaaattttttctataataataagaactatgatataaagaatttcttttaagaagatttgaaacttttcagaaagataatttcgctgtgttttttggtatttttatgggctatatggaatcaccgtaacaagtctctctttgcaaataaaaagtctatttacatggatgtagaaccttttattacatcttacttgcaggactacaagacagctaaagcaaagattctccaatcagatagttcctcccaagataataatgtagataagtcgagctcagttttaatacaacccttacaagggcataacaagcttagtgtagatgctacagtaagaagtcatgttaataaacatagatatgaggccataattcaagattctcatgatagagttatagcaggtttccattcttctgcgatttcaagtttttctctaatctttcctgaagcaaaggctcttctctgtgctttacactggtgccaaacgatccatttttctatcaaccttgtggtcttagattaccaagtgttaatctcgaaaatccttaagaagatgagatatcattcaaccttgtctgatctgatttggaaaatcatcgactctttgtcctcttttcctaatgccacaatccgattcgcacccagaagcaacaacaaattagcacataacctcgcccaagctgcattagga

SEQ ID NO: 215722 - DNA, 730 bp, Cannabis indica
ataagcatgctaattcttactgtctcgttagacatactgaccgtactcacgacctccaggaatactagttcttttctccgtgttccccgtaaaaaaggtgccttcactccagatgaacttccaattgttaggtattgttgaatcataaccttagtttcctcacttctcaaatctcctttgccttggtttatttagtgataacattttttcatacttttgactttttgccaagactcttatcctaaagcgtcgaaactatcaaaataaccaagaaagaggacaagtatagagccttcactgaggagcagttaagagtttaggagttggtcatgactgagttactttgtaggtctggcctgattgtaaaattctagggtatcgaccctgctatcctctggggtagctctaggctctaagagagttgaaggaagttatagctaccgacttagctgttgtaataaatggggtagctaaagaggacaagctcctagaacctgattggcgagcccatcatccaaaacccttaactaaagaagaagagatttcaaagaggtttgccacagcatacccgaacgtggggacttcaggagctagtactttgggaagatgtaatagacccttttgcgtctttcgtacccctaacctctactgcaggtcctgggtggatcaagggggattcgataaatagttttgagcttagaccgtcacagataccccatgaaagactata

SEQ ID NO: 215723 - DNA, 573 bp, Cannabis indica
ataaatgtttgatgcggcgaactgaaactgctaagaatttatttgcacagtttcttatgatgatgatgatgaattaaattagattttgtttgttttgttcctgagttgaataattaattaactgcaaagttattattcttaagtaagtttttagttaattacctcaaagttatatatagtttctcacttattattattgccttttctcttgttgcccactgctctgtttttcttcccatatataataaaggtaagtctaccctgcaattttttaaaggggtgttttagtatttttcatctattttgagagttttttagtataatttttgttatgatgatgtacgttatactttgttaaaaaattacccatattttagaaaaatttaaataatttataatctaaaaaataaaatttacacataattattattttatacgcgtaatcttaaataattacaatatatacgattataaaaaaaaaaaattagacaaaaaaaactctcacaaaaatagttaaggatctactagaccaactctttacttaggagtatacagaaatttccataaatatat

SEQ ID NO: 215724 - DNA, 1141 bp, Cannabis indica
atatatatatgtatatagtgtagagaataaaatcccatgtgtcagaaaataaatgtgcaaatgtatatatcaacagtaacacccacaaataaatgttgtacaaattctaatatatattcacatatatgtatgtatatatattattgctatctagctagctaccattaataaaagtccactctaatgggtcatacatgcaattatacaaaactagaatataagttttattatatattagctagaatcattatcatcattattactactactgtttcaaattcaaatacatacaacaaaaaacagtactatatatctacataaacatatatatatgcttagaaaacttaataataatttaagcttaatatagaaaaaaaaataataataatataagatcaaaaagagaattattatatattatgggacaagtaattgaaggagattatacacaagataggtctgtggatctcaaaggaagacctgttttaagatccaaaactggaaaatggagagcttgctttttcattctaggtaggtagcataaatatatatataaatatatattaataatatttttctaatttttttattatatgaatatttaattagttgacttataatttaggatatgagatgtttgagagattagcaattgtggggtttcaagctaatatagtgttgtagttgtacataaattatatatattaataaaaaattaattttttcattatatgaatatttaattagttgaattataattagggcatgagatgtttgagagatcattagcaattgtggggaatttcaagccaatctagtgttgcacataaatttatatatattaattttgtaattgtttttattatataaattaattataattaggtatgagatgtttgagagatcaatagcaatttggggtttcaattagctattgttgtacataaatatatatattaatttttttatttttttattatatgaattaattaattggtttttgtacttaattatgatataattagggtatgagatgtttgagagattagcaattgttggggttcaagctaatctagtgttgtacttaacaagagagcttcatgaagggactgtaagagcttcaaatagtgtgaccaattgg

SEQ ID NO: 215725 - DNA, 700 bp, Cannabis indica
gaactaaaaagttaaaaaaaattatttatacatatatataattttatcaaaataataataattgaaattatactatttaaagtaatcgattttacataaatcaggttatatgtagttactttcgctccaatgagattatttattatttctttcaggttatttttgttaatgtctaattgaattatatttaagtaatgttattatgtagttgcttgttagtatttttttttttgttttttttttttttttatgtgtgtgtatttatatatttgagttgatatagaagtatttggtaattttttttttagattacttatgtgttatttttcagttttttctgagttgactttatgtgatgtctaactaatttttatattagattttgctttgtaattgtttatttgttactatttagttgttcaagtaagaaaaaaatatttatatgtaatattttatgggtacatttattaaaattatttttatattgatatttagttaagtatttgtttttgttaatttttttttcgaaaaaatgtttttgttaattgttgtgttggtaatttacttataattatgcttaaatttatctttatacagtatatttataaataaaaaattttaacaacagtatttttataaatatgaaattgtataaatatttatttttatgtcataccattattgtaatttataaattgta

SEQ ID NO: 215726 - DNA, 590 bp, Cannabis indica
tcacatctctatattaatatatactaccacaaattttatattaaactattctcaagactcaaatatctcgtgatgatattagtctctcctaatttctaatggtgtaacatcaattaatgaaatttaaatttatagtgttaaattaatattaaaaagtattatttagtatttatttttttttaattctaactacaacactataaattacatgaaaaaagtatattctttataatttttgtatataaatatagatattacatatatgtattaaaaatattaattatttaaccattattttaattattaaaaactaaaaaaaaaaaagcaattttcatgtggtgaatagtactgtctcactaatgataataagattaattttaattagtgagaaacaatactaaattaaaatttttaatgttctgttggagataacctaatactcataaataaaccatgtatgtttaggcctataaaaaaaatgttaagaaacaccttaaggaattaagggtcatttatttttatatatattaaataagtaaaaaaataaattatataataattagcccaccctaaatctttctcttcacaat

SEQ ID NO: 215727 - DNA, 573 bp, Cannabis indica
gtcagatcgtcgatctcatacttagaagttacccaggattggccaattcgtcaacctgggcgctaggccttgcttctggcacttcagaagtgttgtttcttccccgaaagtacttatttccatatttttgatgaagacgaagatgatacaaaagtcagatcgtcgatcttatacttgaaagttgcctaggctggcaaattgtcaacctgggtgctgcgtgcccgagcactgagtgctccgggtgctcaaaaatgaattttctccaaatctaatttttatacctctaatatgtccatggtatgtctagttcgtatcccaatgtaaaatttgacccatttacactgagactgtctcaaaaattgaaacccttgatggggatatcaaagtgggccctgggtgaaacccttggtgcccaagttgactcctaggggacatgttcatgtaatttcagctcccctgacttggatttgattgctctatgtcttcatggtacaaaatactgaaagatagtgagttgaaaatgagttattgatatccaaacttccattccggagttttcgaagtcaacctagg

SEQ ID NO: 215728 - DNA, 569 bp, Cannabis indica
aaaatttaatattcatatagaaagtgtataatcttgtaaggacgtataagagaattaacatcctattatatgaataaaataagttggtagtgtattaaagtatgaaatctttaatatacaattaccaagtacaatttactaaacactatactttcgtgacatgacatgtgattttaattcagattacatatatagatagatatttagtaaatatactgtgtataatttaatgcatgactgatcgatatgaattaatatcttttatcaacgtgtcgtttatgatcataaaaaaattatttagatcacaatgatattgatcattagtagatcagcctgaatcctgagtatttatcatgaactcctatttgtatttattaggttttttgattcactcgttaaagtttctcaagaggtgattcctacaacttcaattttggaaacttaataacatggatgcttgtgaacatgctatacaataagtagaatacaagcttttcgaatggatcaaatattaactcccttaaactgttaattctaggagtaattacagttggatccaaatctatgat

SEQ ID NO: 215729 - DNA, 513 bp, Cannabis indica
gagacatatgattagaaattttaaagtcttgaccaactataaggaggctaaagaaagaatggtactttttggagatggaaataaatcacagattataggaaaaagagaccttaagttaaatggcatccataaataacagatgtacaagggctcaaagccaacctcctaagtatcagtcaactctgtgatgctaacttcgatgtaagtttttctaatacccaatgcttagtttcatctaatgagtgttctgtgctgacaggtaacaaaacttttgaccattgttatgctctttgcaataaagtggtttgtcatcaaacattcttggacaaaccaaatccgtggccttcttgagctttaagtatcaaaggatagggtgtgtgtgcttggtatattttgttgtcatcattcttgttgatttttcacacccataggcattaaaattgtatttgataactctatagatccagttaagttgagaaggattttaggaatcactttgtttctgtttgcatt

SEQ ID NO: 215730 - DNA, 787 bp, Cannabis indica
ggaaaattatgcgattttttggcaaaacctgggcaatttttgtgcgatgagatatgaaccattttgtaccttcgtaatttttgcgatttataattaataagaacttttgttcgtaattgcagatggctccaaaacttattctccccttggctgagcattttccaggttgtatcacgtatagaggaaacgaatactttgcttcaataaaggctaagtttgaagccttcaacttgactgagagggtgaagggaactccctttggagttttttggaatgccaatgatctgaaattctctggggtgattgtgcatcagctgctattgagggaaaagaaagtcagtgaggtcaaaaaatgatgaagtgtggttttacgtgggtaaaatcgaagccagatttgggcgatctgagtttggtttgatgaccggcctaaagatgagcggtggccccttgacagaagaattgagtacactatgtgagcctgatcggatattgcgggactacctcaacaatgccaaaatggtcactttcaaaaccctttggctagcttttgaggcgtgcgatgtggccgacaatgtgtacaagttggggctgtgtgcatttgttgaaggtgtgtgctgttatcaagggctgagggtgtttatatatggacggatatgctgaagttagtagaaaacgtagaaaagttcttctagtatccgtggggcctcctttcttatcagaagttgatgtcatctacaactaaaagtatgagtgacttgaggaacaactacattgataaggtctctac

SEQ ID NO: 215731 - DNA, 511 bp, Cannabis indica
agtttcaccaaaatatcaacttaattgtaatataacacaaattttcaattaaaaaatattatgctgttttcttgcactatatttacaatttataagaaccatattacttacattaattctttattattattattattattattattattattattattattattattattattagtaagtacaaccaagtagtattttttaatacggtacaagtttagaaggcacaaacataactttttttttttggataagtacagacttttattgaaagacaaaccaaaactacaacaagttagaggccacagaaggagccacttcgctaagaagtctcatacaattcgaagaattaactctagcccactgggctaatttgtcagcaactacattttaatcacgaggaatgtaggacacttcaatatttacaaactccttacataacttaaggcatttagaaaacagaggaaaaatgctccagcataagacaatagaacccgcctggaaagcagtagca

SEQ ID NO: 215732 - DNA, 909 bp, Cannabis indica
ctcaatcgtattttttaattctaaaaacttgttctttgtttcgttgctttttactcttatatatatcattgtgtacattttggtttataaattatatatatatatatatcatatatatacacattaataattaaaattattttaatcctataaaataaaaaatactattataatttaatttaaaattcaaaatccaaattcatatctttttattttatattaatttttaatttaaatatattatcctataatatacttaattcaaataattaaaatataattagtaatattttattttgatttatcttatttaataaaataatcaaaataaattaattggttttttatatgtcaccctacaaatgtggggctaagccctacacgcgtaagccatattttaaagcctaaaattgatttctcaattttgtcataaattagatttattaattattttgcaaaaaaataataattgattaattctgattaatctcttattttactaagattaaaataaatattattttacacttaaataatatatttctctctttaaatattatttaataataatattatatttaattagttaatataatttatcaaataaaactaaatagttaaatatcattttaattattcaattcataattgatataattattcaaaataataatttataaaaaattacaattttgcccataagaattatttcttatagaaattattctttctcaatttattcttcaaattaaaccttctcttgtacagtgttgtatggaggtgatttaggaaccatgtacctatattttgaagctccaataaatacttgataattattaaactcttaattctattattactccactataattatagaattatactatttgataatatataattatattt

SEQ ID NO: 215733 - DNA, 638 bp, Cannabis indica
taggaaagtaatattcaatcaatttcatcttaaaccttggatccaaaacagttgctatggctaatatgccatgaatgaaagtctaatactgctcaaatttatccatcatatttgatgtcattaatcctaatctcatcatacaaagatttaagacactccttaagcaacaaccaaatttcacaaattttagagaagaattgattagcagtaggatatttagttccagaaaacatctcagtgacattgtaaaacaacttcaatttctcacacataactttttccaaaagccaatctcgctcactaggttcttttttgtaatttttctcagtatgtattaggcgactgaagacatctttataaacaatggcactagtaagcatcaaataagtagaattccacctagtcttacaatcaagcactaactttttgttactggaacacgataatcctttcttagcctcttcaaacttttcaaccctttttggagtgccagtccaaaaaaaatttcactctcacatatagtttctatggcactataaaactatatgcatatatgtgtgagaaaaaagaactactataactaatatatagtatatgttgtatgcatatacaatacaacaatacaattactatactaa

SEQ ID NO: 215734 - DNA, 1005 bp, Cannabis indica
aaatggcttggtatatttccatctagccttattgattgtgttgtgttgactagtctagtacatatatatgccatgcaaaagttggacattttgacataattgactgattcagtacataatttggatatttgggcttgaagagctacttttaataatcagcccagaaaaaagtgcctgcttaaagatcttgcccctaaatttgaaccaattttgtttcaatcaaataatgtcaccagtttccacagaacaccataaaggattcaacacaaatattctgaaaatttagaattctaaataattattaacatataatcgtgtaccgaaataacctattaaagggtaatatagacttatcttaaccttaattaattgaaacatgggagaattgagaaactaggcaagccatgtgatctttttcaggaaatctaatatttgtatgctacttaattttccaactaaaacatgaaaattattacacattatccaaattatatatcttttctttttcctacagttttcatactttttttttttgctctttctgatttatcatctgttttgaaaaataattataaaaattatattagacacaaaaacctaccaaacatataaatactcaaagcccaagtcttctatatcaagcattcaaaccaaagaataagaatttcagagagaggcagagatcacctcagatgatgcagattgagatcagagagactgcaatggcgtagtggtgtggttcgacagaagtttcatcaagcatttaaaccaaaccaagagcaaaaaatatacaaagggcaaatctttcttattatatttcaggaaaattctccaaagtaaagcctcgagttctgagctaagaccttcatttcatggatgaactccagatgggtcttctcaatcttaactctcatttaccatctgggtttcttcagtcatcaaagtttcgaaaacccatctccacaaacctcaagatttatcctcaatcatgtcgatcaagccgct

SEQ ID NO: 215735 - DNA, 525 bp, Cannabis indica
tatttgtaagaatgtaatttttttaaagaatactgatagaaaattggcgaagaaagcaattgttttttgtttaaaaaaaaaacttttacaaattattatagcgtaaagttaaattttaattttagacgtgctactttttttttttttaagaaaatgactaattaaatttaattttaattttcattattttgtaaataattaaataatcttttaattattttttaaaattaatatactgatgagaacatgacatatagcaacataacaagtctaataagtactttctaatataactttaagtatttaatccataaataaaaaataaaaagtaacaaagctgctatttttctaaaaaaataactcgaaaacaatttggtggacaagattcaaagttcgaaaattgatgattttcaccaagagttaatttttactattggatcatcatgaattattatcaatggcaaaattagccaaaactatttttttcattttttttttgtatttttttagttaagtaagatgaaa

SEQ ID NO: 215736 - DNA, 694 bp, Cannabis indica
ataactaagggtgacttaccagatcctggggtgctagcatcaggagccctagtgttgggaaccgggagcagcaacttgggccgagacggcactcggtctttgccagcctctacccggagagtcctcccggtagcggtttgagccttaatgtaagctagctcttgttccctcctaaagagatacttttggtatcggtcctccgctgaggcgataatgtccgcccagagttaccttttcggcatcaggggtgcgaatgttgggacaaaggatctttgagaggttgaagtcgcccaccgattggccctctgtgatgagcttagccttcctgcagttcaccgttgtgaccaagtcccccacattaagaccgtttttgtcatatgtggaaaagaccttggcgtgctgaaggaagacttgggtaggagcggtgcggtgcatcgggggaatcctgacccactcagtgagcagttctgggcgttccactacttgaaagccggaacagaagaaaaatcggtgacggtactccataacattcttttggaaattgtaagggaccggaccctcatttccaggatgcgcccggagtgtgaaaaaatcgtcttaaaatttatcacctttcttctggacaaacacaagttcgtaaaaatataaatttcgactaggctagttgatgccccgcctcgggctacataaaaaa

SEQ ID NO: 215737 - DNA, 508 bp, Cannabis indica
gcagatagcttttttggacaaataggaacacccaagtatttgaaagggacttcttgttgagagaaaccagaagcatctaaaatcctttgaacatccacatcacacatgttattacaatagacagctgttttagaaggattcggtttcaaacctgaagtttgcgagaatagctcaagaccttgtagcatgaggtatatactcttgtaatctccattacagaataacaagacatcatctgcaaagctgaggtgattgagctgcaattctccacatctctcatgaaacttaaaatcctgtttgagcccaactttcctcataattctagataggtattccattcccaaaacaaacaacagaggagacattggatcaccttgtcgtagccccctttttgaatcaaagtatccatgtaaagaaccattaaacatcaaggagaactttggagtccggacacacaccataatgagatcgacaaagctagctgaaaacttgaaagccacaagcatct

SEQ ID NO: 215738 - DNA, 799 bp, Cannabis indica
ttgagtaactctaaagctgtatagtgacacttcaacgcgcgtcactaatgagggtgactggaaaaatagtttttagtgacacttcacacgtgtcactgaactcttttacattcactttttgcgcgtcactataggcgtatagagtcaagttttgtcagactgaaaaggtaacaataacacaaataaagtgtcactatatcctttttttttctttttattaatatttttgaagatatagtgacacacaaaaagtgccactacattaaatattttttttaaaaaaaataatatttaattatttgattcaaatttttatataaataattatttttattttgaaaaaatcaatttgttaatttgagcagaataattaattattttttattatttatcaaatatatcttattttatgttttttaaagctttttttaatttgctgccaattaaaatgataccaatttttttttttttaaataaaatttaaagaagtgattttaatggattttaatgttatgcaagataattaataaaattgctataaacttatatctgccattaaggaaacaaaaaacttaacaatttttttatgcgaaatgaaaatacccaaatacacaatagaaaaaattacagaaatttcaaacatatgactatttgaatcaaaaagaaaaaataagtgttaaaaagaaaatacaaatctattaacaatgaaaatctaaaattatgtagtatgaactattgaatcaaataattaaatcccatggattctagtcttcaatctccgtccctggctaactgtgac

SEQ ID NO: 215739 - DNA, 657 bp, Cannabis indica
tagtacttgtatgccttaaagtcgtcggagctcacattaatctagctaaaataactcatttttaaattttagctaaaacaatattaaaatagtgctaagtgagctaatcattcattataagtaaaaatgtgagttaaataaataaagtggagttttgatttgagtgctataaatttactttacttagagcactcacattagatatttaaaataaatatttaaagaacttaacaaaatacatgctctaaattctttctctgttttaattcttttaaaaaattgttattcatacataatttacatttataagatattattcattgttataaattcaatagtttttctattttcttcattagttttgtttgtatttgattgaaaaagaattatcagtaattaatttgactttgaaatagtgactgcctaatcttaattcctaaattggaaaaaacgttgaggcaatgaagtttgatagggtaggggagggcctactccttactgtggactgtagagagtgtagagcaatcagagcaaattaatgctaataatcggacgatgagtttgattgattgtctcatgtaattgtgtttgcaccagtaaactggttcgagatgaagtgatttttctttcagaatgtatggttgatcatattattac

SEQ ID NO: 215740 - DNA, 550 bp, Cannabis indica
ttaatataataaataataaattataaaattaattataatatataataatattaaaattatattattgttatgaaatactatatatatatattcaatctaatattttttttatgatattgttataaaattattcaaaactattctatattttgtgcttcaaatttatataaaagtttatatggttcctctaataataactactcgaaagttgttgacatgctaccgtctttatttttgtgaaacactatgacctatgtgtcttctctcattttcaagaatgcatgctttctaaaaagttattgataacaattctcattttctataatgttggtttatatatactccaatatctaaatttcaggttaaaatttattcatcattattctttttcatttcgaggcagtatgattattttttaatgccttttgcattatttacatatacttgcactgatagtgatttctgcttataaggttcttcaaaatggaaaagttgcagctacaaatatgaacagagatagcaatagttcacatagtgtatttacttatgt

SEQ ID NO: 215741 - DNA, 542 bp, Cannabis indica
cttctccaatctttaccagttctgcatcagttaatagagcaattctatctaacagatcgaattgcaatgtcaaattatgaagtttgcctacaacaaactcaatacctgatctgaccatatcatctgctagttgaggtgaaatcttaatcactagttacttgcccggagaccctttctgctcagggcagctaccagcacattagccttcctataatggtaaaggattccacagtcgtaattcttaaccaactcgaaccaacgtctctacctcatatttaaatatttattggtaaggaaatatttgaggctcttgtggtcggtataaatctcacacttctctctgtagaggtaatgccgccaaatcttcaaagcaaaaattagtgcggcaagttctaaatcgtgagttgggtatccctgtccatattcctttaattgacgggaggcataagagatgacccaattgacctacatcaaaatacaccccaaaccctatctgaatgcatcgcagtaaaccacaaacttttctttattagatggtaagg

SEQ ID NO: 215742 - DNA, 1287 bp, Cannabis indica
aatctgactccaagaattagaaactaatgctctatcaagacgtacctcaatccatgcatttgtggctctacctttttcccaagtgaactgatgaccttgcagctcaagatcttccaatccgcaatgcaacagagtttgttggaacccagttaacagccaatgggggtaaggacgcccacccctcttgtcttcttgacgaacaatattattgatatcccctataacacaccaagggagtggagaccggtctttgaggctttgaagcaatgcccaagattcacttcttttattacgatttggttctccataaaaaccagtgagtcgccaatccggagttgtagaagatattgatatttgaagatcaatatgattattagagtaacccaacaaagtaccattatccttatttttccaaagaaaagcaatcctacccgaagccccaatagcatcaaccacaaagacaccttcaaattgtaaagattgggccaagcccaccacttttgacttatgacatttagtttcacacaagaaaataaaatcgggtctcttttgaaaaacaagttccttaaggaattgaatagtctgttggttcccaagcccccgacaattccaactcaacacattcataattcttggcgggcctggaaaccagcacccgcctcgagcatgttttttgaaaccgtatcaggggctgtagtatcattgtcatccaagttagaaatatccatatttttgactccttgactattactaatccccacacggcccaactcattctcatgtgtctcagtaagcccaatttccttttccaagtccattctccttcttttattatcaataaaagtcaaacctgaattcaaatctaccccagttggcgccaccacctcattcccattatccttccttaaatcatgggatttttccaacactacattaacattgacagtacgtgaatcatgggacattaatggagatacctgatttgtagctcttccttgattctctcggaatgatggaatttggttgctacggccaccaccttgtgaactgcttgccccggagaggttcttaactgccagacctgacttcaaccaccgtgagccatcagcgtagtttcttcttctcggtgccgcttttaactcaaggctatattcttgaacgagttgatcctttggtgtgtcaaaaagcttttcgcagaacttctcagagtgtccaagaacaccacaaaggaagcaaaagttggcaagtctcatctaaaacaaacattacatttcagacctcccacta

SEQ ID NO: 215743 - DNA, 850 bp, Cannabis indica
agagaggaggaaaaaccggaggtgccctccagttgacctaaggctaaaattcaaaaacatggtgacttacgagaccatctagacaaaaagaaacacgcaccaacgacttctgtgggcacgctaaatgaaggaatgatggttgagttagcgttactacgcaaagacattgctagggtctcccagaggcaaaaaggggatgacttagattctgattgcgagaatcgggaaccgtgcgcccggcacatactagatgcaaagctcctcaagaattttaagatgctcgagatggaagcatacaccggagactcggaccccagtgaccatttatcatgtttcaatcgggtaatgactgttatgagggtcaacaatgatgcaaagtgtttatactttccgttaacgctgagtggttccgctgaagaatggttcaaaaagttagaacccggattagtagactgctggaacaaattacaagtcaacttttggagacagtttgtggcagcgagaaagattaaccttgaagtcagtgccctaactaccataaagcaattgcctgcggaaactttaaagaactttacgaaaagattcaaagaataggcttcaaagacctagaaggtggatggcggacaacagcttgccctcctccaagccgagatctgtatggggactcctttctggaacgatttacaataggagggagcacccaatctccaagctttccagaagacggtccaaaagtacatcaatttggaagaagcccaaatagtggcttacggaggatactacccaaccggagtgtcaagatacgcactcggagttcttcaactcttgggagccatgcctccagccactc

SEQ ID NO: 215744 - DNA, 528 bp, Cannabis indica
aaattgagagtttgcattttctaatccttaaactctttactttacaagtttgattatttttcataatatattgcttgccatattactttcttttatttgattaagtggctaattgcttaattttgtgttaaaagttttgatttaccgaaattagtataaatttccaattcacccccctcttggaaacatatcttgggctaacataaactattttgaaatttttaaaattttaagtgtattaaatttaaataactattacatatataaattattaaaaaaatggtacttttttttttcttaattatcaaaacagtaaaatagtatccgtacatttttcttttaattttattgcacgaatcaccaaatcatttattatttttatttttagtaaactaagatacagattaattaaataataattctcaaaaaaaaagaattattaaataatagaagggcgataataggaataaaatttagtaaatactaaacaacccagttactcagtgactaagtgagtacagtgcccaa

SEQ ID NO: 215745 - DNA, 592 bp, Cannabis indica
ggagaatccacgttgcaagaataattttccaaaaaagtatgctccagttacgtctgtcagaaatgactgtttccctatttataggcgttcaaataatggtgtgactgtgaaggtcagggggcaacattagacagtcgttgggttgttccatagaacccatatctccttgccacatttgattgccacattaatgtaaaattatgctctacagtgaaggcggtaaagtatctctataaatacatttacaaaggccatgaccgtgttgcatttaacttggtctccgaatcaaacaatcaacaagttgtgaaatacatcagtttcagacagctcgatggattgctgcacctgaagcaatgtggagaatatacggatttattgtaaatgagatgtccccagcaatatatagcttgcagtcttatggcgtattgtcagagcaaacccattagaaggcgaaagatattttttgcggatactgctaaatcacgtaaaagggccgttatcgttaaaagatatcaggacagtacgtggcgtactggcgccaacatatcgtgatgcaaaaacaatgcattgattgctacagagagatagttgc

SEQ ID NO: 215746 - DNA, 676 bp, Cannabis indica
gtgcatatcaatcaatctattgtcttgatatccagttctagtgtagtgtatttgactaaacccaaattactggaactgtaagtctgtggtaagttactactttctcaaccatcacttcatttgtgttcataaagcattacgcaacatcattttctatatgcattactcctctagggatactgaattctttattgtttattaagtgcatctgaatatacagaagacatgtctctaattatatccaaaatggaatagaggtaaaacaactaagaactttcttcagttgaataattttctagtgctttacaaaagcaactaagttatgtagcttcgctgatggagcttaaattattatagatgggttttcaatccttctagaataattcctccacccctagagtaaccaccatctctaatattctgggttggtgtagatataaggattctaatattcacctctatcatctaacatataggtcactttcatagattctttcttgactgtctcctattgttccttgtttgattacatcttagatggctcccactcaacagtaggagtctggtgaaattcgtacataggagtacatttaacctcttactattggttctcagggacattttgttgtgacatattatcttagtctaacactataagttccttctaggctaagtc

SEQ ID NO: 215747 - DNA, 964 bp, Cannabis indica
caatttgactcaatcaaaaatagttccaagcaattattgttttagttacaaagtaagcacaaaagaaatttcaatcataagaaaatgtgaggttggaattacacatctcatcatcacacatatataataactaattaatgtcctctgataagagataatcaatatctaaatctgtaagtaataataataataataatacatatagattaatcaaaatcttgcttgtacattacatggttattttcatcaaccaatcaaaattgtatttggtattgattacattacaacaagtaattaagcaaattaagagatcgaacaccctttttggaacagcttaagtcaaatgacagaattagttacctctgtagagttaatatgtagttaatatgcaaacatttaaatataatcggaattaaatcattaaatacgataaaccattctagacttggttgaaaaactactcaacattctcatcagtaagtacgattaatattgcaaaacaaagaattaaatgcagcaatgtaccattgatatgatttatagtaattcaacaaatatttaataagggactttgaagactttgattcaatattgaataaatcttttaaacaagtaggacagaagagaagagaagagaaaaagagtaatacctacctatattttcttgtcatcaacaactatagacaatcattcattgatccttcttcccacaatatggtgtgcaagcacttagctttaaataactcctcaaattccttagggtcattgacttttgcccatctccttcttattgttatttgatggttgaaaaaatgacattgagattagatctttgaagtacttctttccaatttcttcaattctgactcccttcttaggaagtaaaagaccttcggccatccacaataagatcatatcttcttcattgtattcataatctttaggaaataaagcacaataagag

SEQ ID NO: 215748 - DNA, 765 bp, Cannabis indica
ttttcttgtgtaataataattaacaatagtattttttgggttaagatctacatatatgaccttattcttatataatttcaacctattaaatagtttagtattgacactatcactgtagatgtttagcggtcccgtgacacaaagtacgtagtcaagttaggtgtagtgcatcagagtcactagtttcatacgaaatcactaatcgataccgaaatagggttctacttagtggtgtcgatgtacactcgcagtagtgacactaccactgtagatgtttacgggtcccgtgacactaagtatgtaatcaaattaggtgtagggtatcggagtcaccagttttgtaacgaaatcactaaccgataccaaaatagggttctacttagtggtgccgatgtacactcgcagtagtgacactatcactgtagatgtttaggggtcccgtgacacaaagtatgtaatcaagttaggtgtagggtatcatcgtcactagtttcgtaacaaaatcactaacgataccgaaatagggctctacttagttgtgctgatgtacactcgcagtagtgacaccatcactgtagatgtttaggggtctcgtgaaacaaagtatataatcaagttaggtgtagggtatcggcgtcactagattcttaacgaaatcactgacgatgccaagatagggttctacttagttgtgctgatgtacactcgctgtagtgaccccatcactgtagatgttcagggctcccgtgacacaaagtatgtaat

SEQ ID NO: 215749 - DNA, 595 bp, Cannabis indica
cgttcattttaataacggagtgctgacgtggctcctattatgcaccacccagcaggagaagaagaataacacccccacccaccacaagaagacgaaaaaatttaattattataattgaaaatagattggtccaattgataaggttttatttaggggtgtttatcaaatcgctcaaaccacccgcaccgcagaaaaatgaggtttgaaattctttgtggtgcggtcgtggtttgagtttttcttaaactgcacggtgcggtgcaatttgcggttttgacttgttaatatgcggttcaaacaatatcgcaccgcacattataaaaataccaatttttatatctatttaagtacaatatgtgaatgtccagcccaaagcttactaattattgtatcgttgaaactttttcatatttattttcaagccttatggtatttttgacaagtgttgctcaagtttgttgtatttgtgatagtttaattatttggtgatagtacaaactgcagaaatcgcaaaaattgtactgcaccgcactattttttgcggtacaatttttgcaattttctaatttcgcagtgcaggtgtaatttgagaaat

SEQ ID NO: 215750 - DNA, 572 bp, Cannabis indica
atttttaaatattttaatattttgatttatttttgagtattattatagaacgctaaagtgtatagtatttttatgatatagtattttataattaattaatgtattttttataatctttattaaagtaaaataaataagatctcattaattataattcataaaaatactagataatatagatattctttagcattgctatgtataagtcatgtggggttggggataatacgaattaagagagcatagcaaaaacaagaaaaatatgtacatatataattaatggatcagtgtggttactgtttagtgaatcatgattatacaaattgttgcacgaaatcatgactggtagtgggtacgtgtcattattgtcaaaatgtcaatgatgtgtgctttctttttcttctctttttctaatctggtcaagtctaatcgaaaactatatatgtgtataaaaagataataattataactcatattcccaattaagattagttttttttttagagtagaaggaatgtcatgattctatttatttattgacgataatctgttctgcaatgcaatggacattg

SEQ ID NO: 215751 - DNA, 670 bp, Cannabis indica
tttgagacggccctgtttttgatatagtataaaaaatgatattttttgatattactttaaattaagtagttaaactaagcatagaaattcaaatttctcttttattattcgttattagatcaaaatttgatgatttaatatttttaaaattaatatctatattaaatttgtttagtaaccattcatggtatacccattaaaaaatgatccatatatatatattaccgagaatacaaaactctctcggaagattactgaaaaagaatgaggagctcgatgaagtttggcgatggctaaaaaaataaatactatacaaaaaaaaaataaatatattatatatacatatttaaacaactaagaacctttttgacaatttaaataaaaataattaacctaaacaaaatattttacaataataatttcataaaaatttaaatcaaaataaaactaatatctaaatgattaatataaatcaaacatttcttgtaatacctaaaacccatacttaaacaattaatctatacggaataattttttattacctaaaactaattataactaatcaattaatctaaactacaattttttttataatacctaaatctctgaaactaaacaattaatttaaaccaaatattttataatacctgttaagttatttttagtatta

SEQ ID NO: 215752 - DNA, 527 bp, Cannabis indica
ctcacgcaaccaaaactgactcctaagtaggctcgatggcaggaattcttggcagaatttgacttctactttgagcacaaggccggacgtctcaatcaggcagttgatgcctttagtcgtaaagcagagttggtgccactaaaggtgttagcgggcatgtcaactagccaagtgggtacaccaatcaaggagcgcatcaaggagaactaggagaaggacccagttgcaaagaacatcatggctcttccaagaaaaggaaagacaactcaatttttggcagaggatgacctcttgtgggccaaaggtgggcgtttgtttgttccaaatgtaggcgatttgaggaggacgctgctgagtgagtgtcatgacacgtgggcgggtcattaagggtggcataggatacatgccctgttgaagcatgggtactattggctgcagatgcgggaggatgttgtggactacacaaagacttgtctcgtctgccaacaggataaattggtgagacacaagacgccagggttgttaga

SEQ ID NO: 215753 - DNA, 1110 bp, Cannabis indica
cttgagttctgacttttctttaggcacaaccgttctttaatctgttgagtactactggtcggcatatttgcttgtttattgtttgatattccgtccaacactcatcttatatgttgtcttttgtagatgaactcaggtgagtcttgggaactcgggcatcaaatcgaccaggatctgcttcaacttctgcacgaggatcatcctcgtctttgttcaagtcctccttctagcgaaggacactcttctgaccttgtacccagccataggatgatggctcgtacaaagaacaccacgcgtctggtcaacgcttctgatcctcaagtggctcggcttgccactctgcccagcgccgaacaggattcaaccgtcccgatagaggaggatcgcgaaggggacgctgaggtccaagaggttgaggagttggatgatacgcgtccgggcagtccttccgaggtggagggagaagaagaggttgaacccccaaacttcggggagtacaacgaggctgggcagccagtcgatgttgatggagacgtcctggttgagggcgtggactacgtcagtgaggagcttgcttcggcggttcgtcataagaggcagggtgccttgggcgccaggtgggtaagtcctccgtccaagattttggaggcgcgccttcgcactctcgaccaggacgggtacctgggcgagctggactgttacattcctgcccacgacaaccgtgccacaaaccctgataagggaatgtgcgcctggtgggggcctcatggccagcagggggcactgattcccctacacaagtactttagggatgtggcatatttctttggtctctgcccgactcagatcactgctaagggcatcaagtatttatccgccctcttcgtcctttacgcttcccaaggatgggatgctccttctccccacgaggtcgcctggttctttgacctgaagtctacccctaagcaaggcaggtcggggtacttctacttctctcagccaggcttcaagtggttgatcggcacggatgccaaggccatcagcaaaattgggcgctttgctcatgagtacttcgtggtgaaggatccgagtattacccggactcgattt

SEQ ID NO: 215754 - DNA, 716 bp, Cannabis indica
tcatcaacggcctcttgccacaggtcagcatctaaggaaacaaaggcttcttgaggttggcaagatcctcctctaaggtgtaagcgtaaaaatatgaaccaaagtctttatctattctagctctcttgcttcttctgggttctatttcattactctcaatgtgctcattattcctaattgtaggaacattgctagtagatgcgcccccactgtttcttaatttaaaggaaaatctatgttcacaaaaatcagcatcattagattccactataacatgtgcattcagatcatagaatctatatgttttgctattcaccgcatatccaataaatacacattcatagactctactagctagttttattctcttaggatcaagaatcctaacataagctaaacatctccaagttctaaaataagacacatttggttacctattttttaagatctcataaggtgaaattttgctcttagatttaggaactctattcagaacataacaaacagttaataaaatttcaccccaccaatgagatgcaacactagaattcaacaaaatagtcacaactaattcagtaaaggttctatttttctttttgctttacctttcatttcagttgaatatgttgcgatcctttcgtgtattataccatgtgaattataaaattcaataagcaagttcagttcatatcctaaacatgtcaagtgcatcattt

SEQ ID NO: 215755 - DNA, 515 bp, Cannabis indica
ttacttcttggtcataggttatcttcctacgagacagtggcgtcaactctacgtgcaatattacttcatagccataagctaaagcaaatggtgtttgtccggttgctgtcttctcggtagttctgtgtgaccaaagtacctctgggagcaattcaggggaatttcctttcatcttgtttagacactttttcagagtgtccttgagggtcttgttcacaacttctacctgcccattcatttgaggatgagaaacgaaagagaagcttttgatgatgccatgtctgttgcaagaatcaatgaacatgtcactgtcaaactgcttcccattgtctgacacaatcttctgtggcagtgcaaaccgatatatgatatttttgacaacaaagtcgaggactttcttgaaagttattgttgccactgaaaacatatatataatcaatactaccaatgaaggagaaaattttaaaaatttaaaaattacttttttccttgctaaaatcaattacggcggttgt

SEQ ID NO: 215756 - DNA, 526 bp, Cannabis indica
tgccttgaaagaattcacacacaaccaccaactttcccaaaatcagaggaaaacccttacataaaattaactacccctagtagtttcatggttagcattttattaattttctctagaaaacacaataggaaaagttatccatactttgtttgaattcaaaagtaaatgagaagatgaagattaaaaataaatgtattaaaaagttttgggaaagaacatgatacctgagaaagtgttatgctgtgtgagagtttctatagtttcaaaggtgactgattttttataatacttgtaaaatttaaatttatttatagaaattaatataggttacaagtaaatttaataataatgatataaattttttttttctaagaaaatgatataatattttcaaaaatattattaattaattacccttttctaaaaagaatattattaattataaaattactctttttacgttacaatattatggcactcaacatgtgagttgtctatgactggtggaaacttattagagaatgtt

SEQ ID NO: 215757 - DNA, 572 bp, Cannabis indica
atcataaattaatcgttgacattaataatatgataattatatcataacttaattattattggctatatagcatatagtaaagtaaataataaaaaatatgagatcttttaagtaaaattttattaagtgtcatgttttgtgttatacatcaagatagtgcaactattagagatggtcttagtaaaattttacaatcgaatatgcatcgattatagagaccgaagacaatatcatcaagtgataatagactgtgctctaatgcattaggggtaaaattaattttatttttgataaatatgtacaaaactcatattaaatatataaatacatgtaaaaagttattaattattttaatgaatggcaaaagagtaaataaaatagtaatatttattgttgtataatatagtaatatttattgttgtataaagtacttatacactatctttatatcactttattagaaatgttcaaataaatttggatcaacttttgcacattattaaaatattttgcaatatgaattatattttagtaatagataactaatttacatactcttactttttattttt

SEQ ID NO: 215758 - DNA, 1632 bp, Cannabis indica
ttttgagatggttaggttctggcttaaatgtattgcatgtgttctttaacttgttcattatagctgactagtaggattagccgaatacttatatcttgagaacacggtagtgcaagtgagtgggagcgctaatcataaatatagaatctatagcttctataaatatatacttagaagtgaaatgatagtttccttagagcttggctaaatgagtttaaatggtgaagtactcattttgataattatattagtttcataaaatatcatttacaagtagccaagtattttaaggataaaatgcattggagggtaaaatggtaatttagtccctactcgatgtaaaccatatataaaggatcattgattgtttagattaaaataatgtgtaattcatagtgtatctattcttagttaatagagcattctatctaatcaagagtgtaattttgaatctatagtggagtcaggagaaattaataagatagagaatttatttggtaaattctataagtactacttattaagagcttgattatataggcccatgatccccacactatctgagataatattatcttgtaaactcaattaattggttttaatatttaataaattaaaattctaagtaagactatgtattaattatgagttaactaagcaaaggtaaatttgaaaagaaaaggaaatttaaggtttatttgttaattaagagactttgaaaagtctaattaataaataagttaaatagtaattttatttgataatttttctataattattaaatagaaaaaattaaacatttaaaggcttaggactacaaataattatagtattgagaaaagataagtcatggcataaaaaagcatttttgtaaattcattgggcctctatagagttctgcaattgttgtttctaaaggtatgtttattttgtttttttaatttccattttaaatgtctaaacataacccttaaaaaaaatgctataaataaaaaataactcttaacctaatatgcaatagctatatatatacacactatacattttacataagatagcacagacaatattattgtcatacacacctatacatatatatatatatgttcatatataaataatataatctagagagatctctaactttctttatcaaaaaagaaagattaagagcttatattattctatagtattatattttcttatagtttgcttcattcttttttaagtgccattagtgttgaatatatgcccacacatatcaagacaatacttaaatcagtgtggaagactatgtagtctctcacagcctaaagaagattcgaggttctattcttgattacactctgtgattaaaacgaacaagggtgagagaacaaaatgaaatgagatattaatttccactacgatcaatgtaaggatttcctaaactccttatatgtttaattcaatcattttagaattcatgtttggtttgttaatttcaacatactttagtagtaacataaggtcctagttaaataagctttccaacagcatgaatctggattaaaggtaagaaaagtatatttgtactacattgcatatcatattaagatacggttattactgttatgtgatgaaaaggttgtc

SEQ ID NO: 215759 - DNA, 507 bp, Cannabis indica
ggaatcatcatcaatatcttcaactttccttttctccttatctgtaactctggagcgagccctccttgcaagtgataatgtccgttcataagcatgcatttcaacttctagcttatgcatgtcgaacgagctaaagttgttgatcatgtatggtacaacaaatttattatactcacgtgaaaggctactgagaatgaactgaacccattacctcttttgatagaataattcccagaagatctgctttctggaattttaagttcaccgaaagtaagtgtgatgtgacactctgactagaaggtatcttcacactatagagttcatttgcaaagacatataataaatgatgattggggtgagggttgttcatttttgacgctacaaaatataaaatagaaataaattacttagttcaaaaaaattcatacacaaattcagaaaataacaagtacagaaaataagtttgcaaaaatacaaaaaattgaaacatattcaattattttccaa

SEQ ID NO: 215760 - DNA, 738 bp, Cannabis indica
ctccctcaaagtgtgataaaggaaattgagaaactttttcagggcttcctttggggtttgaaggttgatagatctagagttcatttgataagttgggagagggtttgccttcctaaagcctatggtggtcttgggtttaaggatggaacaaagcttctttagctagatttatttgggacttgatgaacaaaaaagacttgctttgggttaaatggattaactcggtttatctcaaagggagtgatttttggtcctataagatgagcatggatacaagttggtattggagaaagctttgtaggctgcgtacaacctataacaaagctgatatcattgcagcaggtggtgagaaattcaaagtcagcaagatatattgtagcatgttgcaccaagttgtgtttccggctgctggtgtggagtcaatattccaaagcatgcttttcagctttggcaagcagctcaagctaagctgttaacaagggatctgctttgccgaatgaacatccctattccaaacaagaattgtgtagtctgtgacattgaacccgagaaccactgccacttatttttcaagtgcattttgctcaacaggtgttgtcctctatctttctttggctaggctttgaaggttggtccaagctctttgaaagctggatggtttggctgggcaacacaaggtcggtcttgattgacaggataagagtgctaatttgggcagccgcgatcatcatttttgga

SEQ ID NO: 215761 - DNA, 534 bp, Cannabis indica
tccgcacttagtgcggatcagatgcactatgaagtaaaatagtgcggattaaatttaatgaaacactacctaatagacactaacaaaaaatattacttttagtcacaacaaaatttgtgactaaaagtaagaaagttgtgactaattataaactgtcattcttgcattgtgactaaaaagtcagttgctaaaagtattagtcacaaaaattacagtttgttgtgactaaatgtgtttttaattagtcacaatacttgttgtgactaaaactaaattagtgacaacttgtaactaaatattatgtttagtcataagtaatttttttgctatgactaaaagtcacatttagtcacaaattttttttcgttatgattaaaaatttgtcactaaaaatagtcttttttttatagtgagaaatatattaatgaaatgaatttaagtttaaaattaataaaagaaataatatatttttttttattatcaagcattagaatgatttttttttagttttttctatttttactactttaaaac

SEQ ID NO: 215762 - DNA, 754 bp, Cannabis indica
ccaaaacaagaaaatcacactcgactaggatactgaattcaatatatgtcgtagggatagacaaatggtttggagtatcatgtgcataatgatcgtattacaattacatcatttccatttagttgaatttatcaatacagtaacattactacaaaatcccaaaacaaaaatcaaatttttgaacaactacacacctcattcaaagtaaaagtacctccatttcatctataaaaaactaaactttacgaccaagtatgaattacagtatttttcatatttaatcaaatctatcaattcaataacattctaaaattccaaaacaaaaattaaatttctagatatctacacatctcattcactattaaaggacctcagttttcattcatcaaaccgatcatgacaaaattgactaataataataataacaactaaataatcaatgtaaaagtaaaaattcactattttcaaacttttaaatgatacgatttttgatagtatatatatatattggaatacaaaataaatataccttctaaaaaccaattggagaaggaggccgaagatggtggttgggtcaccgcccgattaagcagcagatgaagaagagaggaggtggccgcctgggttaagtcaccacctgattaagcagaagccaaagacgagaggcttcgtcctccatggttcgattaagaagaggagaaagagaatgggaagggttttgaagtggatgagatgggggttgagttgctgccag

SEQ ID NO: 215763 - DNA, 603 bp, Cannabis indica
ctagaaggagaatcaaaggccaaacgagccgcgccagcaagatgatcaagaagaggcctcagaagtgctgcgagacatctgcactgtcattagaggaccaggagttgggagcaatacccgcaagggacgagaaaggtatgcacgtgaggcgagacaagatccctaagtttagagtctggaacaaagcccaccaaaaagttctaggggagagagcggctcaataacattcatggaggaagatgcgcggggggtgcacttccctcacaatgacccatcggtcatcgtgatccagattgccaacacaagggtacattggacgctggtggacaatggaagctccatagatatcctttactttgtggccctcaagaaaatgggtcaaggtctcaaggacttgaaaccgtgtgcaacaccaatctatgagtttattggagactcagtccaaccgctgggaacgattagagtttgcgctcacggttgtagaaagcccccaaacacgccgcggtgatggtaacatttttagtggtgggctatctggctgcattcaatgcagtgattggacgaccctccctcaatcgattgaaggctgtaacctcagtgtat

SEQ ID NO: 215764 - DNA, 673 bp, Cannabis indica
taaaaaaaaaattgaatgaaaattaatttctttccatcatactttattgtcaccaaaccaactaaaggcaaccattggtgttataaataagaatacttgtaatgaaaattcttatttaatgatatttgtagtaggtaaaaaatgcatgttttttacagcacctctaaggagactgcatatatgttaaatgtcgtgcatgtgccttccaacgaagctgtatttcttgcagcattttgtggttttatttatagtgcacgacatatatatcgtgcactgtagtcactgcataatttttttatatataatttaattaatatttatatatatttatatttagattattgtatttgtaaaatcaagaattaatttttagaaaattttacaatgcacatttttaaaagtgatgtacgaatctactcctatttgtttcggcacctgacagagttttttagtctattttttttatagtagtgtatattatagttatttaagatcattctgtaaaatttagaaaaatttaatacgccgaaaataatgcacttctttaaaagtggcgcactgatatactcctatatgtttcggcattcgagagatttgtttagtcttttttatggtcatatacattataattatttaataaatcctgctaaattttgaaattttttaaaaattt

SEQ ID NO: 215765 - DNA, 841 bp, Cannabis indica
gttatatataagtgtcgttttcatatgattaggatatattttatttgctagtattgtttttagaaaaaaaaaattgttggagttatatttttgtatctatatttgttttggaattttaatgtgattttgattctacatccttaatggttttttgtctttatttctttaggattttattgatgtttgttcgaatgcatttttgatattgtataccttagggtttatttatttatttatatgttataggattgtatagagtatactatatatattttgcatttgatttactttattgatcttacattttaagtaattaaaaataaaactttaaaaattaccacaatgtatacttaaacataaattatattgattattcatgcagaatatactatatatatattagattatatataaaaaaagcaatatatatatacagatttattgaaagataaatttttttataaaaaagtaacttttagtataatattagtattattagtaactaaaagatttaatgtgaaatactcaagaaaaattaaaaaaaattagagaatttgaaattttttcttattttttattattcaggtataagtttaaatcaggtatatatgtactgatgtggcacggtattttaaaatttatttaattaatgatgattttatgaaaagtttcttttaaaatcattttttatgtattatttataatgattttaaaattatttgtaattttttttctttatttaattaataaaaatatttatataattcacatttaaaaattatgagtgactaaaacgtgtatgatatatatacttttaaaaatagtttactaaaattagtag

SEQ ID NO: 215766 - DNA, 534 bp, Cannabis indica
ttttacaataacataaacaatataaccaaatctaattacaaaatattacattacaaatcaaataagcatttagtaaatcattatataaaaaattggaaacaaaagtaagaaaaattaaaaataattaaatttgttttttgttttttctaataaaataaaaataacaaaggtttctaaatgaaataaaaataacaaaggaaaagagaaacatgggtgtgggactgattcgttgtggtccttgacggatggaggttgttgttgagtgccaaatgagagagcaaagagagtcatgggatagagtagcgacgttggcccttgcttaaaattattccggcaaaccaaaaagaaaattgagtgcgattgctattgagaaaggtcatctataaaacttctagcaaaggaaaaaaaaacaaagattagagatataacgtaccttatttgcacccttgcttgagtttttatggcagaaaaacttgtcactggtggtgtgtgtgcgcgttagggaagggaaagtacaaagttgatacaaagaaa

SEQ ID NO: 215767 - DNA, 537 bp, Cannabis indica
ggccaagtactatcatggctcgttctcggctgaggctgttgaggccttgggggtcaaggaagcactcagttggctcaaagataaaggttggaatatggtagaggtggaaactgatagtctactcactgtccaagcagtctctagtaatcaacaaatgtcttctgtctttggtctgattactcatgattgtaaaattctcttatcctctctacctaatgttagttttcgttttgttagacgatcagcaaacaaagttgcccacttcgtagctaggcgctcttgtttctattctgatcgtagcattcatgatgttgatgttctggcagactttcctgccaatttgtaatttgaatgctttatttcaatgaagttgatatttcatgtcaaaaaaacaatatagttattattattattattaaaatacatgtttacattcattaatttgagagactctatttaacatttttatatttttttttctatataaaagaacagagaagttttataaagcattcatttaataatttttattttata

SEQ ID NO: 215768 - DNA, 669 bp, Cannabis indica
attctttaagtttaaattttagtggtaaaatcttttaaattactgaactgatttcaaattaaaggtatcatccgattaactatcactatagactatttatgtgtacaatcttatacacatgacatgcttatattgatacacctaatattattatttaaaaattattttcaaaattcattttaaaatcaaataaaactacaaaataaaaataaaatatttttaaaaataaaaatattataaatttgaattaattttatatttttaaaataataatattcagtgtaccaatataaatgtacaaaagtgtatacataagcactctatattgattattaactctgaaaaatagatgacattttaattttactagcaattcaatagtttgaaggattttaccgttaattttaaacttataaaattaaatgtaagtggactgatagactgagagaatttaaccgcaaaaaactattattagacactattaataccgtgtaacactactcttttcatactcatttgttataaataaataaataaatatatacataatattttttaaatttaaacaagctcacactttaatttctattaatcaattaaaaaaataaataaagccatttttttatttccaacgatttgttaattactatagttgtgttacgacacaac

SEQ ID NO: 215769 - DNA, 533 bp, Cannabis indica
taaattacaatataggataacagagatacttatataattcagacagttatcatatataatttatttagcaaaaaagctatgtaggtagtcactaatttttatcaattataaaacttattttatgtttatattatttaagatacatttttgattatttctaatatttattttgaaaatcttaatatgccaaattagttacatttagattatattatatatcttataattatttaaagtgtattttggtaaccttttataaactaatgaacaaattatcatgctatcaaaaacttactatgtagtaattcaacatatcaaaaatacactttttgttattacttttttttttttaaaaaaaaaaaaaaaaattaacgaattagttgcttttactatttttttttttgtttattttcacttcatattgtgtgagataccttttagttactttaaaattgtaaatatcttaatatacaaattagttattaagttacatattagtcaccttcaagtttatttagaaactaataaattgt

SEQ ID NO: 215770 - DNA, 500 bp, Cannabis indica
taggggtggcaattcgttttcgcgggtcgtgtttgtgtcgcgtcgagacctgtataacaggtatatgctcgatccgaatacgacctgtttaataatcgtgtcagaaaatgaaactcgaacacgacctgtttataaacgggttaacacgacatgaccattgcaatccgtttataagcatattttgtttaaacatgtcaactaataacatgtttataacctatttatgacatgttaaagtattaaaataactttaaataggtcattaacgggttagcagtgttaatccaaatacgacctgtttattaaacgggttaaacgtgtcaatttgaacacgatccgaagctatttaaggtaaatccaaactcgctaactctcgtgcgagtttcgagttgtgttatcgtgtctaacttattttaccggcccttttgtctgttagtatagttcttttattaattggtttggtgtggtctctttttgtatgtcattacataaattatgtg

SEQ ID NO: 215771 - DNA, 627 bp, Cannabis indica
aggggtagacgaattttccccaatggtgcaacacttcggctggagaaaccatacaccggttgggtacagaggatcagatctttgagttggagtcctatcttttcgtatggtgttttgaacaagatgtttgcagaagctccattgtctatcatagtccgggccattattttattcaccatcggtacttccccaactaaaggatcattgtacgggaagcgaacgtggatagcatcttcttcagtgaaggttatagtgggttcccctacccgtggcatttttggcttcctttcttttacagccaaaactacttccttttctccatgctataaagttcgggcatacctctctcgagctttgctcgaatctccagcgatgtgtgggcccccaataatgacttgtaaatgctcattcactggtggtggcattagtaggtcttggttgttgtctgcttgggcggcctactgattctgatcagccttgacgtacttttacacatgcgggttagttttccctatcaggaattcaatttcccgcttcaggttgttgcactcatttgtgtcgtggccatagtcaccatgaaaatggagaaatttggcaaatcccgcttgcttatatcctttttcatgg

SEQ ID NO: 215772 - DNA, 494 bp, Cannabis indica
tacagttttaacagcaacccacaatctatgcttcttgggattaaaaccttcgtctaatgcaaccttcggttaaccacccgacaaccttcgtctgatgcaatcttcaatcaaccacccaacaaccttcaccttcgtctgatgcaacattcggccaaccacccagcaactttcgcttatgcaaccttcggccaactacccagcaaccactcagtaaccatcatctgattgtgtgagtgatagtgtaagaggtattttggtaattaaaagtacataaaaggtatatatattgtccacaccttataaagatatttttgtaaacaaagtgtcaatttatatttttcatgtaataattcctactttaaatctaaattattttttcataaattattattagcataggatgaattcatttttttttctcttatcttcttaactaaatgaaatataaccacagggtatatttgattttttcccttttggtacggcctttatac

SEQ ID NO: 215773 - DNA, 892 bp, Cannabis indica
ctaattttgggcaagccgaggtttgtggttgggagtgttaccccgagactaacatatgggggtcggggtacaccccctgaagccaccccactggtgattggggggtaccaccccgagcctacctttgtctcctttttatatatatatataggctaaggttgttggtatactaatcccaagtgggggtcggggtgagtctcctcgagaccaccctatgggggttcggggtgtaccacctcgagaccactcatgggagatcggggtgtgatgctccgtcacaaccgtaatgcggcttcatgaattggagatgattgttttttgcctacctctcgaggtcttaaatatatgcttccatacgcttgtttttgcttttcacacttagttagaaattttaagtgtgtgattgccattattgcttcctccatttagctacatcaatggttgttctctcgttgtaattttttttttggttatgcactatgaatgtcatagatgtatgccttcttttttactttggagctatgtgactctattactatatgctactatgtgttaacttgtctggcatgtaccacactatgcgtaagcattttttttatagttaaccatgtaccacatataggttgctcaagacattgagcaatgcacaaacactttagaatttgaaaagaaattttcaaaattgtaaaatctatttaagtgagtgtgttttatgcttactagtccatgtatgagcgtgtttgccccccaagtgactaagtaggttcacctcttgatcacttgttaagtaatcagggctttcacataggaactgttattgtcacgggtttgccaccataatttcatacactcttgaccttagttaggcttgcaatttgattcaataacaatc

SEQ ID NO: 215774 - DNA, 641 bp, Cannabis indica
agttcttttttttaaaaaaaaataatgaccaaatatcaatttaataatttagacaatccccaaaaaaataaaataatgaatagtcatctagcaaaataaaataagttgttaatccattcattaccatgtgctttcttgttatagtattcttcaaaagttccgcaattgggtctctcaatgtatctcttcctcatccctcaatatctgtcttaatgggggccaggttgagtcgattaaaccctcttacggtcttcgacaggggatcctttgtctccttacctatttatttaggctactgaagttttatctaggttgttagaggatgctctgagtaaaggcgatattaagggtattaggctcagtaggggaggtccagttatctctcatatcttttttgcggatgacttaattcttgttggcaaagctaacttgatggaagctagaaactactggcattgtcttgagagattctgctcttagtcggggcaacgagttagcaaattaaaaacctcgattttcttcagcaaaaatactttcaatggattgaaaagagggatcaaggaagctttggggattggatttcctgagggtaacattaagtacatgggtcttccctttttccgctctagacagaaggatgc

SEQ ID NO: 215775 - DNA, 724 bp, Cannabis indica
tttttaaggctctaaaattttatcttaaacccccttaaagcttgaagcgatcgtgtttcaaatctttactttagataatcagagaagagacttattatattatttttactatttaagggatgtaaaaccttattcgattatctttaaaaaaacatgaatttgtatccattcaaaaatgaaattagagtttttttgtttctaaacctaactctagaaacattgataagtgactatagaaaatagttacttatttattatttagttgaaataaataattaatacatttaaattttattttagaattatactacgagcattaaagtctttagttaatttttcacacttaagattaacattaaataaattttattgaaaaccataaagtgttcaaaataaaattaatttaaataaaacaaactttaaatgtgcaactaaaatttggaacaataaattcaaaattttaaactaaagttgactttttcattgctcttttaaaattttcttattccatcatgaactttgcaaaagtcgaacttcttcgaatcatcttcgtcttctgtttacaaatctacaagcaagagagaaacaatgtgagtggtttagaataattcaatccaccattattaaataaaacaagaagaaaaactaaatcatatttaccttcctcttcagctttgtaactctgtcaaaatgtccatcttcttaggatgagcatttctctcat

SEQ ID NO: 215776 - DNA, 1070 bp, Cannabis indica
attcgttgtttattcgatttatattttttgttgttggatcttcactataaatttttttgcttttagtcacaataaaacttgtgactaaaagtgaaaaagttgtaattaattataaattataattcttacgttgtgactaaaaattccgtgtggctaaaagtatagtcacaaaaatcacaatttgttgtgactaaatttatttttagtcacaatacttcttgtgactaaaactaaattagtgacgatttgtatttaaatactatgtttagtcgcaagtaacttttttgttttgactaaaagtcacatttaattagttacaaaaaaaaatgttgtaactaaaaaattgtcccaaaaaatgacctttttttgtagtgcttgattgtgtaatctctattgctataaataaaagacttagctaactcatttgagttaatacttttatttattttctttctcaattgttctgatgttgatctttttctattgttctctaactaaacttacagaacattcttcaaagctaacttttatatatatacacactaggtgtggtagacatgccacacgcacgtacctctcgtcaaaacatgtaagttataattatatatcttatttttcgtcaattatatttacacaaattgttaaaaaaaaaaattatgtttaaaacaagaggattcatttataaaactaaggtcatcaattcatcttatttatatgtaagcatatgtaaaatttgaaaaaagaaaaataataattaacaaaaagtatgaaaaaagtaaaataataacaaaaaagattaatcttatatgtatgctcatataattctctacgcaattatatatttactaataagttaataaaaagaaaaataaaaaaaaaaaaaaaattgaagaaaaaacaggagaaaaaatggtaaaaaaaatatacagaagattgactaaagtattaataattggtccaaatatgaccaaaaaaaaaaaaaagacacacgcacataagaaatccttacctatgcggtgcacaacaagtaagaaaagattgacaaagttatgtatgattgaacacaaagt

SEQ ID NO: 215777 - DNA, 579 bp, Cannabis indica
atttatataaattatgtgctagacttgagtggagggtgaggatatattggacaaactacccacaaaagtgggtacatttgaatgaaatataatatgaaagtattttagattaatagatacaaaaagcaggtatttctcaacttttcccttattgttaattgtgcagtaaatgtggattggcccaacccgacacaatccacatttctatgctttttcaaaaaaattcacattttatcatatttaaatagcggattgtatgcttcaggtcaaatcctgcccaaatttgtgcctatacattttgcttagtggagctcaaattcgtgcccactttaagcttatatttgatcttcttcaaatgttctcattactttactaaatttattttgtagattaaattatagatatttcagtatgactttcaaaaataatttacaaaaaaatattacacacctgtgtgatgaagattataataaaaatattacacacctgtgtgatgaagattataattcttattattttttaattagtgggactcatttaaagtaatataattggccgaaattttttgttacaaaagtc

SEQ ID NO: 215778 - DNA, 619 bp, Cannabis indica
tatatatatttaaattaaatataaataaaattaatcttccaaaaaatatataataaaattaattaatattttttttaaggaattaccttatatactgttttttttttttaacttttttgaaatttacgtttgggtttctaaagtgattgcatcgctagttgcaataggggtttctatataattttttgttgcaatttaggttgcagcgctatagttgcaatacagatttctatgtagaatttcgtaaaaatgcaaaaatgcaaaaatgcaaaaatgcaaaaaaaatgcaaaaaaaaatagacaaaaaaaaaaaaaaaaaagttttgaagtgtaaaaatatgaaaaaaacttttttttttattaaaaaatcaaattgatagttaaataataatattcacaacattacattactctaagtagttttattatacttgtaacattctcaaattactctaaggctaagatcgagttatctaaaaaagaaaaaactcttaagtcttctattatcgtaaatgtgcaaaatcattttttttttaactattcttgctgtaatggtaataaatcttttttgtcattgtcgaccaaatgctccaaattgtaaaaataacatgtaaatatt

SEQ ID NO: 215779 - DNA, 737 bp, Cannabis indica
ataaaaagactgtattttctgtaaataaaataaaaaaatcgcaaaaatatttaaaatttcgtaaaactgtatctttgtaatgtttttttgttgtttatgtgtatttgtgtaataatccaataataataaaagtatgaattaactcttttataaaattcattttgggcacatttggaaaagtcgagatagaattagaattaggtgtaattgaagctattatacaatttatgtatttaagtttgaccacgcaattacactgtaactgtgtaattaaggtaatttggaggtctcaattttacactttccaattcgcataacacatgaatattggatgtactcgatgtaattaataaaaactttttattttaaatactaagtaatgtgtctggttagtttttttttttttttttttttttttttactattaaagttttattgtctaaacttactgaaagcatctctttctcatgttagttgcaattttaattgttgtcggctcatgaattagcttatcacgtcctttgggtagacgatgagctttcttgaaagaagctcctcctcccacatgtaactctattcctatgcaattctaatacaatattgtgtttttgacaaaaataaatattaagaactaaaaggtattatttttctgtgtaatcaggcccgaccttgggcataggcgggctaggcctgtacctacggcccacctggccaaggggcccaaaaaaaatatttcc

SEQ ID NO: 215780 - DNA, 739 bp, Cannabis indica
tcgtccagtacctctactaggactaagttcaacttgtcaagatcaaattgagatgccagtttcactaaggcatctacattagagttttgttctcttggaatatgttctattttgaaaaaatcgaacttttccaagttcctccaaactttctctaaatattaggccatcttcatggccatttgcttggtactctcccgagacttgatctactattaactgtgaatcattgaagcacttaatgttcttgactttcagtgcctcagctattcttaatcctgctaacaaggtttcatacttttcctcgttatttgaagtttcaaactgaaatctaagcgcataacgaaatttaaagctttctagcgagaccactattactctagcctcgagccattctcgtttgaagccccatcaacgatcagtttccatgtttctatttcatttttgttccaaagtcttctcctgagttaattccttctatcaaaaagtcagccaaagcatgtcctttgattgaagtcctcaggtggtaagttatttcaaaatttcctaactcaatcgaccatttaattaatcttcctgatgcatcaggtttttgatagtacttatcaggatggttgatttgtttaggaccttaataggatgcgcttgaaaataaggttgcaacttatgagatgtatgtatcaagcagagtgcaagtttctctagaggcgagtatctcaattctgccccagtaaccttttac

SEQ ID NO: 215781 - DNA, 753 bp, Cannabis indica
atatttttaaggattataaggttgggcagcagaaaaataaaataacaatttgggcctttttttcagggctcaaatagcccatttcacattcaaaatttgaggcgcacgcctcttacctctcaacgcctcatgcctcatttcagcgcctcacccattaaggcgtaggcctcttttctcctcagcaaggcgcacgccttggtgcactctttaaacgcctcaacttgaggcacgcctcaaaaacgcctttttggtaatagagtacgatatatattttttttttcctgtgtttctgttgtcaaatttttaattggagtttgtttacaacttttatatcgctttttatgttctctgtttctggcagaaaaaatatatctctatgttgcaaaggattgagatgaaactattttctttaatttgttttttctaaaaaaaaaatgtatccttgatcttattattgttcgtctagttggtttgttttgcttttggttttatttttaataagagatctccacacctctattctcttttttcacaatattttttgggcaaaacaccaactttcaaaagatcattctacttatctcatccaaatctaactatttatttgttcacattatatgtattaaattccatattttcatcctacttatcattgttgaatttctgtcacactctacagccaataaataatgacaagaaatgttgaataatgtaccacctgaatgttttttttttaattgagtgctgaacgta

SEQ ID NO: 215782 - DNA, 985 bp, Cannabis indica
tcactctgaaaaatcatcttcttctacccttgctttaacgcttccttggttcccttacacagcaccatgatctctccgataaggggctcactcacagccaaccggaaggtaaagcaattgatgaaactcccagcttcatttctgaaaaccgcagcccccgcagcctggtatttcccaatagatacatccgtattacacatcacccatccgggagggcgggtgagccattcaaagatgccaacttgttgtgttcgcgcatcctccgtgatttttataaatcttgtattgatgtgttggaggatggtgtgaagaggggtaggcattcccccatgagacaagttgtttctttcacgccatatgctttcaaagattatggcagccctgccaagaaaaagatgcagttgaagcccatcaggacgattagaatctgtagaaaatcaatctaaccacctttcccaacagtcaatattaactgaattcgttcttatctgccaccagtagccgaaccacactgtccttgcaaaattgcaataccagaacaaatggagtgaggattcaacttcaccatgacataaggtacacgtcaggtccgcgatagagaataaggagttcaaattttccttagtaaggagacagttggctgaaattttccaccataacattttgagtctttcatggatttttgaaccccaaatgatcctccacttcttgtcacagtcggccatgacatctacattcttgatcaccttgtaagccgatttgaccgagaagttcccattgcattctgggagccacaaccatgtatcctcacgcggtgtacttgggagcgagatatttaagatgcccttagcatcttcctcaaggaaccattatcgaatgagtggttcattccagccaccttgagaaatgaagttgcgcaccatactcattccagcagaggcatcgaacctgggttggggttgaagtgtcgcccccccgccccacc

SEQ ID NO: 215783 - DNA, 568 bp, Cannabis indica
aacttacgctggagaaagaaacattagcacaaatgatgcacacactaattaatccaaaatgatgaattggacttctgtttcctatgtggtactgccattggcagagaataaattgatgatgagaggggctttccaacacaatgaaagcatggctcctctagcgtgtttttctaattttggtagcttaacgatcgtgatgactgcggacttacgagagttgaaggcaaaaattgcaaaataaagccaaaaattagtctgccgaagtttgtgcttttatcgttaaaacataaatatctaataaattgggattctgttaacctcagcaaaaaaaattattatttttgataatttttttttttttaaaaacagtcacccaataattttccataaaccaaattatattttataatcacatttttaatatagaatagatatatatatattgttatcagttaagagacaaatatgaatacaaaatcccttaaacttaaatgaaattgcatttgaaaattactactattatttactgattcaaatcaaatttcaaaatacaataatcaatatatat

SEQ ID NO: 215784 - DNA, 561 bp, Cannabis indica
ttttatttttatttttttatcacgtaccactttttttttgagttcacactatcaatattcacatataattcaaaaaaaatatatttgaaaaaataattagtatacatgaccgccgctcttaccatgtctaagttaaacttgcgcaatgttcaaaaagataaaaactctaatatatatattttttttaattaaatccaactttttaattaatatcatatattatttttttccaattttttatttttttttattatttttattttattgtattgaaatacataacaaatttaataaaataaagacttttcatatttcataaaatatataattatatgacaatatttaaaaatattatttataaattattttttttagaaatttaatttttaaaataaaaaaattggattcaaaatgtttaagattgcctataaactaaaacaaacactacataatcatcacgaaatcatcaattattaaaaattaaaataccaaaagataataaatgacgattaataaagaagttgatttcaattaagaaaaaaaaatattcatgatgataat

SEQ ID NO: 215785 - DNA, 889 bp, Cannabis indica
ggacgtcgtggttgctagactatcgtgtacacttcgggcaagccgcgaaacgtcttaaagaaagtgacattgtctgcgactcaactagaatcttttatcggtaattcgttccagttttattattttaaattcggtaaaacaattttaagacgtttagttctgctatggctgctaccgatgaattttctgattctgcttctaacgatattaacaagcctttccgttttgagggattacactttaagcgatggattggatttatttccatcacttaaagtgtaatcactcaaaacgaaaaggcttgttaatatcgttagaagatgaaccagaaaattcatcggtaacagccatagcagatataaacgtcttaaaattattttaccgaatttaaaataataaaattcgaacgaattaccgatagaagatcctagctgagttgcggacaatgttgctttctttaagacgcttcgagactctgcccgaagtgtgcacgacagtctagcaaccacgacgtcctcaagataaaacaacctctgtatacgatatgttatgtaccgaattatatcgctcgattacatcctaaattttgctctgagaaaaatcgtaagaaagaattttttttttttttttgtatgttgaaaatgatgtattcttttgttgttctgatacaacttatataaagaagtcgatccaagattaaacggtaagaaaacgttaatataatcgtggaggagatggatcatgacagtgaaaaaaggatcattgattgatcgctttttactacttcatttaatgttaaaattaattaataaataaataaacattttttctttaaaataattaagtgacacctcaccgccagctcagatgaaggcagcgcgcatgtgtg

SEQ ID NO: 215786 - DNA, 585 bp, Cannabis indica
ccatatacatggagattttttaagaatagtgttttatataaatggagcataaatattaaatttaaagaatcttttaaaataaagaagaaagtttagagtatatcatctagtctagttaactaagcataaataatttaactaagcttctacttttttaataaatataaatttgatgatttaaaataatttaactatgcatcataatacatcaaattataaaaacaaaatcaaataatttaaaatatagagtttatgattcaaacagtttcactacaacaaataaaggttggaagtgcgatagtatcatgaacatgtcatttttcatattgataggcacgactaatgaactcgtttccagggtcggtcctgaaaatatataggcccacgaattaaattttaagaccctcaaaaatataataaaaaaaaaataatcaaaagaagagtgttatgggagttgaacctataactttgagtattatatcatccacttcaactaactaagctatgaatatttgttgattataatacacttaaattttacttaaataaaagcctaataaaattttttattttttttattttgga

SEQ ID NO: 215787 - DNA, 569 bp, Cannabis indica
acaccacaatacaatattaacaaacccaatatcaacaatatttttttccacaacacacaattattaccacccaaaatctataacaagtgaataaaattccttaaagattgaaggaagtgatacttacaaacccaaagaagctttactccacctccattgttgaatgttcttgaaagcttgaggttgaagatgaagacaatggtaatttttggatttggggtattatgggtaatttttggtgtggtttttgatggtatgtgtagattgatgagtgaaattgggtttttaaatggattgggtttaagaaattgaagaaaagatgaaacgattgaagatttaggaaggaaaatttgaatttttggaatgaaagaggctagggtcggctgagaagaaagagtgatttgaatttttggtgtagggttgaatggggggaaaaattgggatatttatagaaaaattgtcagctggtcgcgacttgcccaaaggctggtcgcgactagcttaaattcaaaattctgggggcttctggaaaattgggtagtcgcaactggggtcgcgacttggaaaaa

SEQ ID NO: 215788 - DNA, 789 bp, Cannabis indica
acttctattggttattacattcaaaatcatacttatcaccgtatctaacttgtatcaacactaagtttaaaactttattattgaattaaagattgaacatacagtatctaactcaatagaagaaaaaagtaataaaattgttgaaactatttttattttttttatttttacattttaaagttagttttttttttttttatattttcctaaaataaaatgatacatatctttaatttttagttttttattttttaaaaagaaaagaaagtaaaaagaaaataagaagagagtatatcctaatccaattaattgcaattaattaagattctttacttaaaataagaaaactcaattcaatagtacgccttgcccccgtttcaaaattatttcttctatcgttaaatgaaacgtttcttgctagttgaggaggctaaaaatcgaaacgttttttttgtacgaggttaagaaacacgagtgtgtgaagaagagagagagagtcacatttcacatcacaattcacaacaacccattgattttttagataacgatacgaaacgaaacgaaacgagaaacagagccatggctggtggtgcagccaagcccgagcccaagcgcgcgcgaacgaaccattcaatgcaaaaactaacggttctcagaacgagaaaagaaaaccattttgggattttacgaagaagaaacaaaacccactcttctctctctccttcctctttctctctctatatctctttctagggcaaacttttccctcataatcgtcgccttcttctt

SEQ ID NO: 215789 - DNA, 670 bp, Cannabis indica
aataataaaataataaaaaaagtgttttataatcattagtaggaactataactcattaaatgtatcactttttattttttatgcaaacatataatattacatatatatataaataattaaatatacttgtaataaaaataatgaaacctaagttttataattttttttatacctacatatatatgctaaaataaattatataaatgtaaaaataaatgtaattagtactacaagctaatagataaatgcaaagatagaatatattatatataatagaagtaaaatgtgaaaaaaaaaaaacttagaaaaactactaatcgggttgggcagattatttcagtttaattggacaggttggacctatttttaacccgcacaattaacaaattgggcggtttatagttttgtcaagttttttcgatttgaattttttgtcgagttttttcgatttaatttgaacggtttactaagattttatattatgtacatcccctactactattaatatatattgatagaactaatagacattatgtttagttctattcggtataaaaattaattaaatttgaaaaataattattattttagaatttttttaaataagctctgtttttttaaattgtacaaataaaataaaatagttcgaaaaattcaaaaaaacaaaaat

SEQ ID NO: 215790 - DNA, 449 bp, Cannabis indica
tttttttatgtttttatattttcaaataattgaatcaaaaaattctccaaatattctcttacttttttattttgagattcccaactaattacaagttcaatttgtttaaaactcaaaaatattaaatcacactacaaccaatcatatttttaaaataattttttacatgcaaaattcaatttttgaaaagtatagataaaaagcaattgtaactttattgcgagataaataattgtagctaaaggtgtacaagtaacgaagcggactgatccaatctgtatttactaaagctgtcccatttttataaatgaagtttggcactgtctgtataagaaatatggcgcgttgtgttttgtttgtaatgagccctaattatgtccgtgtcgagctatactaggctaacccgtttttgttaagtggtccgggccctttttttttagtagggctat

SEQ ID NO: 215791 - DNA, 770 bp, Cannabis indica
ccgctaataatccccaattcgactgctataggctattagtgcgacaatcccctgctattaaatggtcgctccgccgctaataatattattagcgacgagcattagttagcgacggagtcccgctgctaatgcccgcctaatgcgttttaatggtttttttttaatttttattgttattagcagcgggatctgccgctaataatattcgaactgtaaggccagaaattttctcacccacatattagcggcaaactcccccgttaatagtatttgcggcgggcaatagcggcaaatccccctccgctaataattttttttttaaaaaaatgcactattagcagcaaatactgtggactgtggtcccccactaatactgccattattagtagaggatttggtttgccactaataaattcaccgtaaattaattaaattgttgtagtgtgatgttgatgtagtaattggtcaagcagctatgttatcattttgtttgcaacatgtgataaaatttgacagaagaattaatttacaatactatgaatagtttaaggacaatttataagaggtttaaaaattcaaaaggtacaataatacataggtcatagtttagggacaaaaattctaaaaatatattatttacaacattatttagagtgtactgtatgtagactacaccattattattttaataatataattatgatttaataaatagttgaatagtaaagtaaatattatattttattgatataataataatttaataaaaa

SEQ ID NO: 215792 - DNA, 506 bp, Cannabis indica
acgttcataaatatgatgtactaaggtgtgcataagacctaatctaacgacaactaattgattcaattacaatcataaatattgaatattcaattgtaatcgaatttaaattaaatattatttttaaatatctgattgaattagatattaaatggggtgttcacaaattcaatacatctaatatcaaatcaaattaattaagattttcatttagtttgaatacgtaattaaattttatattgttaaacgtaaaatatatatgtatacgaaaattcacattaaaattttactcttttttttatttagatgaatccaatgcaatccaatacatactgaggttaaaatattagattattaaaattaattagatcgaattcaattgtaaaatttaacattcaaatttgtatatgcaaaaaaaaaaaatattaaatgtggttcaataaacacccataaatttatacactcctaaatctatacactttaataagtagaaattaagacatgat

SEQ ID NO: 215793 - DNA, 895 bp, Cannabis indica
atgtctttgcaactccatatcgtgtaacttgggattactacttccgagctcgagaacatacacttgagtttgaagcatgggaagggaaagctgagtttgaatatgtaagtttctagtattgctaattctcaacttactaaatgttcatgtttctagaagtatattggttgcattatgacccttgccctgtacatcaggttaaacgaaagggagtttcaatttttctcatgcaagcagggatgcttggaaccctccaagcgctttgggaagtatttcctctatttacaaatactggatggggtgagaactccaatcttgcatttctgaagaagcacatgggggctactttcgaacaacgtcctcagccatgggtgacaaacatcactgttgatgatattcactcgggagatttcctcgcaatatcgaagatccgtggacgatggggtggttttgagtctttagagaagtgggttacgggatcttatgctggtcatacagctgtttgcttgagagattctgaagggaagctctgggttggtgaatcgggacatgaaaacgaagaggtagaccgtagacatataatagtagctaaaatagatgaagtacacaagaacttagtattttatggatttccaataatctcttataatataacttttgtctaattatctaatatataaacataaaaagtttcacatttatgtttttttttttggaactaaacaaaaaggacgttcaataattaatttgaggagtggagggaaggagtgtgggggttggggataaacttatgttaattgaagattggcttgtgcttactgcaaatatgacttttggaattccttttgtagggagaagatataattgctgtgttaccatgggatgagtggtggga

SEQ ID NO: 215794 - DNA, 878 bp, Cannabis indica
aacttttaaaaaaagtaaaaaaaaattagcaacactactttagaaaaacttactctctttttttttcccgttttatcttttttatctttttttcttcatcaattcctgctgccacgactgatagtattttggccataactctctcgatattgctacaaaattaaacgattaaagatgtctagaaacttaagaacgagatctaaaactttcatattgagtgccaagttcaattctgcttttaagatcatcaaaactagaaattaagctctgccttgtaaaactgagctcgcaaacttccacaattttccaccaaaatatgttaaaagccctccaaaagactctaaatgcatgaatagtctttaaaatatacctaaaaaactaaaaccacactaattaataatttaaagaatcaatttaagaatattaatacataaattgattatatttataagacaaatatggactcatcaggccctgatgtgatgaaagccgggcagtggctgacagttattacaagaattttgaattttatgggcatcaccggtaatgatagattggcttgtgccacattccaattctaggaggatgccctggtttggtgggacatggtggccctgactcgggatgttaccgatgttacctgagaacagctccagagttgtttaatgccaagtactacaacgaagtagtcagaagtgcgaagaggaaagaatttacccaattgacccaaaaagagaatatgagtgttaccgagtacacaactcagtttgattgattggctaggttggcctcgggaatggtgccaactgacttcagtaagaaagagaagtacctagatgaattgaacccaaaaattaaacatgaccttatgattacca

SEQ ID NO: 215795 - DNA, 652 bp, Cannabis indica
ttatgagaaggcatggaggtgcgaggacaatcttatgcgaagttacctaattacttgtacatgctggaactaaaaaatatgagtactatgattggcattgtgatagaggatgataggttcaagtactgattctggtcactggatgcttgtaggaggggatttaagttttgtcgtcctgtgattagcattgatgacagattcttgaagacaaagtatggtgacacaatgttagttgttgtagcgtgcgatgcaaacaactaattgtttccgattacctttacaattgttaacagtgagaatcacgattcttgaaagtatttcttgcagaaattaaaggaagtgatggggaggttaaaaccttaatgtttgtatcagatatacattaaagcattgaacatgttgttgatgtcgttttcctcgaagcatgccactgtgcatgctataaacatattactatgaatgtcatggtcaagttaaagattgatgtatgtcatacacaaatatagctggcaacttacaaattttcgcagagagaatatgatagaaattttgaggtgcttaaatggatagatcttgacatcgttgcatacattgagagtataaaaattagaaaaagtgtgctcgttcttattgtcctaaagcgtataggtac

SEQ ID NO: 215796 - DNA, 768 bp, Cannabis indica
gaataaaaactcttacttcatatttttctgtttggttgagcttttttggatttcagcttctcaagaaaaacttatagagaaactaatatattagcttaatattttttatatttgttaaaagaatgttttagagttagaagttaaaattcacttattactcaaacaacaaaagtatgtttacctaattaaaacactaattcaactgcctcgggatgacttttctctagtgattagttacatattttatgattgtgtgaaaagttttaactactaagttattagtccctatatataaatttatatatatatatatatatatatataataactactaagttattagcaactatcaaacttaacagttatttaattagaagtaatgaaataaatacaatgaaaatgaaataatttttattttattttttgtttagttgtattttaagtattaaaatagtagaatgattattttatttgaaattaaaataaaaagactatttaatgctatataagaaaaattcaataattttctattaattttttcatgcattttgaatttaatttaattctattcatattcttattattattctcattctcatttctattcttatatttttattctttttaagtccaaacacccacttaaaattaacttatccccgaattcctagcttgtcacaacatttgaagtctacactgacaaaataataagtttttaagtaagatactaatactacaattacaatgtcctcaaacttttctttgttt

SEQ ID NO: 215797 - DNA, 583 bp, Cannabis indica
tatggagtgtaataattaatatagaaatagctaactaatttaaaatatagtaattaagtgcatttacattagtaaaaaaagtctacatatataagtatctcggctgtaaattaatatctaaatttatttttggcggtaataataattaaattaaatttctaaaactttgtaggtattttcagttaaatgtcaagttatataactaattatttttttattgatatatttaaattaatttttttaaaataaaaatttaatgacctagattaattgtcacatgacaatttacttaacacttattaataaaatacttacagctaagagttaaacttaaataattatacattaaattactttaatatagatgacactaccttctattaacaatattccgtcaaaattatcttcttaccaaatacttaattactcacgagtagcattctaatatttctcaataatataataagttttatacttttttttcttttaaaattaataaattttataccttatttcttacacatatactaattactatcttattccatagatattatatagtgtcagctacgtatgaccaata

SEQ ID NO: 215798 - DNA, 624 bp, Cannabis indica
tagtcggtttgtaacggtttttcgatttttttagattttcatgctcagccttagccctagtcctatttcttaacactaaattcatttcactataagttttttcattagagacataacaatactctaaattcaacatgtaatctgacatttgcttcaatcttttacatgacagattctaagagaagattttgtgaaatggagtgttcttgagcagctagcttcactcggttcccaccatttttttcacaccgagcttcggtttccgaatatcaatccaggcaaattctcccttccttattctatctgtgaatctattctctactctacctgtatatttagatctgatagggagttagtttctttctaacccttttttgttgtatgtttttgttccttattctttgaggccaaaaacacaatgaactcttcttcttaattcccattaagtcattcaaaatgtgtaaagatcctttttttttacctcactacatatctcaacatatttttttaagtatgatagagaaagaatattgtaacttttgattttggggatatgaattcaaatttaaaatctctgtgggagatagatgtgtaataccaattggctatgttatcataaataaa

SEQ ID NO: 215799 - DNA, 592 bp, Cannabis indica
caagtgaagagaagttgaggatgatgatgagatgagagtgaactgggcggagaagttttccaggttggttgatttttgggttggtgttggtggggaaagaagagaggagaaatgtgattgggggtctggataatgggggtttctagcgaatgggaggtggagaagggtagatggtggtcagggtggtcgtagttcatgcgaggggaaggaagagacgaggtggctatggtggttaggatggaaaaagaagaagacaagaaaatagggtttctaaggaaagaatgtttggggtattcgagactatttgggtaaggatattatttgagaaattatgttttggttttgttttgttttttatttttttcttaaaaattccttcacagctcgcaaagaatcccaacttacgcctgctgtagcaataagtcttaaaaaattcagtaaaaaatattgttgattgctcctttaacttgtaccacatttgctaaaattttgctaaaatattgctgcagcaggcgaagttctccaaatcaatgacaaaagctttttgttcatgcctagtttcgctgcaacaaaattcaattaaaaatctagc

SEQ ID NO: 215800 - DNA, 1123 bp, Cannabis indica
attactggcatattgttggttcttctattactgatgtagtgttgggggtcttcaatcatggtatggacatggatttaattaataaggcgatcatcacccttgttccaaaagtcaattcaccaacagtcatggctaatttttgcccaatcagtttatgcaatgtcatctacaagatcatttccaagatgattgtgttgagattcaaagaagctctccctattgtcatctctgagactcaaaagtgcatttctttccaaccggttaattactgataatgtgcttgttgcctttgaacttgtacacaacattcaacatagaacacggggcaaaaaaagtttctcagcactcaaattgggtatgagtaaggcttttgatcgtgttgagtggacctacttaagggctatcatggataaaatgggctttgtaaggtcatggactaacttaatttttaaatgtttattatcatccagcctcaccttcccactcaatggagatactacgggccttgtgcggcctaccagagggctgagacaaggagatccactatcgccctatttgttcctaatctgttcggaaggactttcacgatcgctacaacatgaagaagctattggtaacctacaaggactacgtatcatgagaaaagcgcctttaatttttcacctcctcttcgctgatgcagtctactattttgtgaaggaactaactcttctgcattggctattcagagagcccttgatatatatcataaagcgtcaggtcaaatgctaaatcctcaaaagtcggtaatgtcattctctccgaacactccaatggcaacgcaattacaatcaagcgctacttgcaaagcaagcttggaaaatttttgacatgcctacgtccttactaagtcaacttctaaagagtcgatatttttccaacaagtcatttttggaagcaagaattggaaactccccatcacttacatggcaaagcatccattgggggcgtgaactacttcttaaaggccttcgatttaaagtagggattggctttcacattcaaagtggtcttcacaaatggatccccggccatacggagttttgtccaatcacttatacgggagatccatccttgccagttg

SEQ ID NO: 215801 - DNA, 652 bp, Cannabis indica
actgagcaactacaacagtacaccattctacctaattggggtacgaaattttcataccatttcactttaaaaaaaaagtaggagactaactttaacaccattaataatattgaattttgaattttgaatttatatttaattagtgcataatttattttttattcattctaactcttcaattaatttatttataagtaattataaactaattgttgacaatttttttttgttcaaaaaaattgttattatatcataaattaatattgactattaacgtaaataataataaatttttgaatagagcgttgtctgtcctttcattatttgtctttggtggttttttttttttttttcaattttaaatgttttgttgtctttctttttctctctattcttttctgtaactgttcacaatctattctcttcaccttcatctttcctttcttctagtggaatatttgtgttatgttatctctggtttgctcttggtttaattatggattccttattgactaatgtgtcgttcgctcttattgaacaagaaagggaagtgactaatctttctaatatggttcttcctcgctcgcgtccttctcactgattgctttgtagagtcttctcaaagcatggttatattccaatacaattgaag

SEQ ID NO: 215802 - DNA, 657 bp, Cannabis indica
ttatgcctctcctcacaccagcaaccacaaactattccctagggccaaagcttgcatatttattggtctatcctgataatatgaaaagtttaacaccctattagatattgaatccaacaatattttccactccagagatgttatcttctatgagtctatctatcctctcaacaaaaccagcaaccacaatgtcaatattgacaccttttttcctactgctacaaaaccagcagctacaactttcgataatccctcaccacatgactacaatattattgccccaaaccagcaaccaatacacctactgattccataccagcaatcaacatacctcctgctccaattgcatctccaccagcagccattattcctccaaaaacggcttcagacacagaccaaacaatgtccaagataggtaaaaacatcaaaaaaccactatatctacaagattacatatgtagacaaggttgctcatacaacaaattatcccattgctaactatgtttcttaccatcgcttttctaatttttcaggaatgctattcttgcaactcaatcattaattgaaccaaaatcctatattgaagcttccaaatatgctgcttggttaaaggctatggatgctaagacagatgccttagaaagaaatgacacatgg

SEQ ID NO: 215803 - DNA, 841 bp, Cannabis indica
ctctcgctcggaagttcgaactttacgctcgaaggtttgccttttttgttcagttcgaattctctctgttcgcccccttttttgtacaaacagttactcaatattttatttgagaatatgtacatgttgataagatgatcttatatgtttctaaacacggagaacttgtttaattttagtattgaaaatagatttcaatattggtactctctcaatcttagtattatcatttagttgaattagcatatttgattttaagtgatggttcttttactctgtcacctctagccattgaagatagcttggaaagattcggtagcagtgtagttgcggagaggagcttaaacttcttcaatcgtctgaacgaaggtataccgtcacgttcttttcgattgttatttattattttcttttgtttgggagttgattgcatttagggtttagtgattttatttgaaattagatattccagaattaagtgaaattctgcattgaattaacaatgatttaatatcatttatcatgtgaaattatggaatcatttctttgatattattattgcatattcactgttttagctatatgatattattgcatataagtacgctgttgtttgatattattgcatatacactgtttaaataaaaaggcatagtgaataattgtttaagttttgaataattgtttggttgtaattacatattttaaaattgagtattgagagaaagtttctcccatttaggcattaccccttatttatttggcttttaataattttcagcacacctgaggttttattaattatttttattctgtgtaaacaaccatatgtagatcaact

SEQ ID NO: 215804 - DNA, 700 bp, Cannabis indica
tgaatcctagtatgaacagtttttaaccctgaaaaactaccaaaaccagatgagatgataacgatacaaacgaatcaagtaacagatccacactatgtaacaaacatgagaaagaagaaagtaacttactgttggaagttagggcttggggcaatgcctggaaatttcgtctgcaaaccttcgaatgaagcatggatcgctttgagaaaatgaagtcggaggaaacttgctggaaaaaggtcaaggacaaggatggcatgcaagtcgtttgacggatttaatggtgatccttgacgaagaagtttaagggtttttctcaaactttttgaaatagtgcaaaggtagttccttttttcttattttatacccatgataatggtttcgttagattagagaaagatttgacccaatggacatgattcgaagctaaggggaaagatggtcatttaatttttatgtacctcgaaaccacacaaccgctaaaattagagggaatgcgtcttttcaaaaaaagaggaacatgacgaaaataccctttgtaatcattaaaaagctcttttaataaaaagaacttttaagggcaatgttacactcaaaatgtggtaagcacatcagaggaagatatatgtcgagctgggaagaacgaagaactcaatcacgcaaacaaaatgtatacatagcatggaacaactctttggaa

SEQ ID NO: 215805 - DNA, 544 bp, Cannabis indica
aaatttatttataatttaatgttgtgacatttaaaaataaaataagaaaatactttttagtaacttattaagttgtttggtacattaattttgtttaaattaaaagattaattacttaataaaatttaaaagaaacaaaaatattaaatttgatttcgattatcttaaaatattttttaaaaaaaaacttgtaaaagaagagagagagagagagagagagagagagagagagatgaatacatgaagttagaaatttatctataaagtttttaaaaaatacaaataaaataaaatgagagagatatttagatgtcatgtcattaagagaaaaaataacaaaataaataaatgaagttgttgatgtttgaaagaaaaaagctcaaaaataaaataaaaaagaaaaggaagagagtctctaaactttttgtttatgttgttatttaatgtaaatttaaggtgtcagttatatattactattaaataataactggattattactgtattgatttggaggctttattgttatatatacacaggtgtata

SEQ ID NO: 215806 - DNA, 814 bp, Cannabis indica
  modified_base (610)..(610): a, c, t, g, unknown or other
ttgtcactgcgtcgcacattcaccgtagatattctttgtttttgaggacactgcaaaagggccagaaacttgaagagcaggaatgtgtgttggccaaaacggatgcaacaaagagtagttataatatgtcggactaagataaggaaactgaccaaccttacaaagcctctcttctaaaatatcatattcatataaatgatgacattggtataacaagaataccacattaggcttgttgggatgaaaatcaatcatacgctttcttgtatctctccatatatcctttatagctttaatattggtgtcatgtaccaaattccagtcattaatagtatcatttaattcccaaattttcaaaatacaatcattggattcgaaataattttgcgaaagccttagacgaccttgaactaatccaagacgaaccataccttgataacgacaacgctgcctttgattaaaatttgaaggaaacttaacaatatggtgttggtcatcatgagctaatattgtatcagcattgttattgaagacattaaaagaaataattttagaaatataatcgttatatgtgagtagaaaatataaggtgccgttgtaagaaataggngaaaaaaagtttggggagtcaatccgagggactgaaaacaagtagggtttatcagtggtccgatttttcagtatcagagaaaatgttatagcacacaatttgcaatactagtaataacattgtaagtatgcgtcccatactcccaataactttgtatctgatcatttggtgaggacgtatgatcgattattaattccacaactt

SEQ ID NO: 215807 - DNA, 656 bp, Cannabis indica
ttcttcttctcccagaagcgaactagggcttcctcaggcttggggtaaaaattgagtttgatgctctaggcatttgttttccaagccatgaaaacgccatcgtcgaagcgcttggtgcaatgcttgcagacgacaagggctaggagctcatctcttttagccttcttcaaggcttgatctctgaagtccctcagctccttcacctccacggtcaaattggccatcgactgcaagtctgcttggtgcagctcctccatgaatttcagcttagcggtcagctcttccacgacctccttggcttccctcagctcgcgcttggctttggccacatcctcgccttgaacctttagctcctcccggtgcctctcctccacctgagcttccctctgttgggcctcctcccaaaatgctttcctctcggccgccaagtctcgcagactcttcatggcctcgtccatgccccaaaattcagacatgacgtacccatggtctatgagggtctttgagaggcgaccggtcttggcagtgatctggaaaggaaaacaagtgaagtatgagagatcaaatgccataagataaatcacaagtaaaaagggaggaataaataacaaaactcaccgcggtcacggcaccactgatgtcctgaacttgataaa

SEQ ID NO: 215808 - DNA, 766 bp, Cannabis indica
gaacataaccgacccgaacctgactatacccgcacacctgaacaccgcgttcggttgtacatttccaatacccaaaactcgaatacccgaacctgaaaccccgaaaacccaaaaacccgacccgtgtgcacccctacttgttagtaaatctagatcctggtaaaatatttccaacaactggcctcagagcaatggtaatgatttactttcatgtaatatggatttaaaacgatgaatagtttttattgtgttgattaggatgtgttcatgttggtttacatgttatttgatgaatgtatgtgaattacgaaattttttcatgaaaataattttattttctttttgaaaatattttattgggtttccttgtgaaaaattaagcaatttttggttcttacggaactcgattctgataaaaattgaaaaagctgtgaatgtttaaaaatttgggtgcacatgcctcaatcgcacgcactagtcactcagacaaggtgacgtgcacgcgcatgaggcagacaactttagtctgaagctgtgtcacacccagccttcagacacaatgggccgcacgttgatgctgcaagtgactgagattgctcagtcaaacacactgttgcacacccattttgcgcacggatgaggctgcgtggagcctctttgtgcacagcatgggtgttttaacccaaaatttcgagatttttggtattttttctatttttttttttcgagtttttccaattttcaaattctaaaataaaaataaaat

SEQ ID NO: 215809 - DNA, 813 bp, Cannabis indica
aaaaagtcttgcattatagtggtagacaaaggtgcttcgcccaatgttaatgggagctcgattattccttgactggtgacactatcacttataaatccacacagatttaccatgcaaggttttaattttgctttttcaagtcccattttcctcagtgtatccttataaaggatgtttactgaactttcgttgtccaccagcaccctttttatcctcttattggcgagctggatggtaattaccaatgggtcaatgtgaggatatctcacatgtttttcatcttcctccaagaatacaatcggaggctcttcagtctttactcttttagaaggttctagagcaaaggcagactgctcgttgttcacttcctttacatatctcttttgggcattgttaatttcccttgcaatatgcagcctttttgagataaccagaatatcttttccttcaagacgaggaggttgtaatccttggttgtttgggttattgggcagatttttccattgccttatctttcacatattgccggaagtgacctcacgcgatgagactctctatctcgtctttcaacgacgacactcctctgtcgtatgcccaatgtccttgtgatacttacaaaatttggctgcatctctcttatgtctcgcatgcctcatgggctcaggtttacagaatgcgaccctgtgctcatgtgcgagatagatgttttcccgagtttcattaagctgagtataaacggtgtagattggcacgtatttgtcttacttcttttactttttcttatctttgactgactccttagagttatctttc

SEQ ID NO: 215810 - DNA, 788 bp, Cannabis indica
aaaagaataacatttctaaatttgataaaataggtttgtgattgcgaatttcattcataataaaaataaataaataaataaattattaaaaaatatataatttaaaatgtaatgaaattgtgtgaaatgttgacataataatattttttaatgtaaaaagaatagaaaataatattaaaaatatcaaatttattgctaaaattatgcacatttaaatatataaatataaaaataaaattaataatcttcacaatacatagcatattttatattatatcactaattcagtacaaaaaaattagaaacttgaatgaatgacaaatattgtctaacaccgcgcgaagcgcagattagtttcctaattttaaatagagcaatgttattgggtattagtgacgtctgacaccttctagatgttgttaactcaaacttttagatctccttgttttgatgattaacaaatatttgattattatttgttactaatgatttattgattttgttagcaaatttaaaagagaaaataaatattatggtaatttaccaaatttttgtaaaagtcaacactaaatggaattcaacaagcatatcaagagcaaaagaattcatcaagggatcaaaaaactcaaagatcctattcaaaagaggtcgttcaaaagctcaaaatcaaaagtcaacccgaaagtccaaagtcaaagtcaaagtcaaggtcgaactgtcgggaaaagtcgaacatgggatcaaaaacaatgaaaatacaagctaggatgctcatctatatctaagac

SEQ ID NO: 215811 - DNA, 897 bp, Cannabis indica
aatatcaacacaagatcattgccaacaagagcgagcaaagagcagccaacaagagcatgaaaaattgtttcattgctgctgttgcacagctgacagatgctactaatcaggacatgtcttgtaaccaactgagcacacgtaggtaacacattagaagcagctctccaaataattttaatatcaaggaatcttccattttaaattaaatttatttcgtcatttattgttcataaaattactatttgtattgtttctaacatattataatattccttacaaaaaataactcaatgttataattttattatatttgttactattacttccgttaactaataaatataaacatgtggaggggatcaaatacattacatttatttattttattttaaaatttaatatttaatataaaaaaattaaatgttacttatttcaaaaaaaaaaataagagagatgtaaaattaaattttaaaataaaaaataaataaatgtaatatatttgaaccctccacgtgttcatatttatgagttaatagaagttgtagtaacgagtgtaaaagaattataaaattgagtaaaaataaagtatttaaatgtatactcatttattattttttctattttaaattttaccttttttatttacttgttaacttatacctaattttatggatcatattctgattatatatcaagattctaattttaataagctatgtgtaattatatttaatctttaatttataaaaaaaaaatattaaatacgtatatatttaattaatgttgtaataaaaaaaaaataaattactcaaacttattcttctttcttcttcttcttcttctgggttctctctcagaacataatatataagacatcaagaaaaagtacttatatat

SEQ ID NO: 215812 - DNA, 669 bp, Cannabis indica
tttttcaactatactaacagcacaaggtagtttggtattggtaacacaataaaacaagccaaacacaatttcacaacatcccaagcctgacaattcgatcaaatagtgtagctaagaaaatcatttgtataacagtaacctgtccatcatcttgaccattccgatatcaaaactcaacaattttactatcctatgtaaaatcccataagcaaaatcagtacaaacaaaataacatgtgatgaaatgtaaactcagaatgtatcagtgaaattcagttacagcaaagtattcactaggcagtactcaccatcaggataaatagcagcagcaccaccctcataaaccaatcaatctctttctttctcagtagaaagatccctctaaggactagtccagtaaccttaaaatcagaacatgcaatgtacattcaaaaaccaaaaactacaaaagaagggggaaataaaatacaaccttatccaacaaactatgcaccttatccggatgcgtttgactataagcaagggcaagtgtgcttccccacgacccaccaaaaacctgcataagcacagagaatacattctcttacaaaaagagccttttttgttttttgaaaagtaatgaccaattctcctcttcaaaacaccatataacctgccattctgggatttt

SEQ ID NO: 215813 - DNA, 610 bp, Cannabis indica
tttttaaaaaaattatataataataaaattaatttatataaatttactatgcatattaatatattgtaagtataacgaataaaaatattatcattaaatatatacaacaatatttaatatactgtagtactgaaaaattaatatatcataataataaaattatatactaaaaaaaaaaatcataataaaattaaagttagtatgttaatattcaaaattatgcatattaatttaatccatatatgatgctaataaaattacgcatgtttgatacgatttttagaaaagttaaaaattactttttgaaaaagttgtaataaaaaaaaaatttggtaaacaatttaaaaacaacttattaaagaatttataaaaaaactacactcaaaagttaaagttggtacaacctaacttttaaaaaaaattattttaattaaaagactaataaatttatttgtactaaaactatatttacatatttttatatatttaaaataaataataaatgatatactatatacaacaaaaaaaatatagaccatacaacaaaatatatatacctacaatataaaatatgtatctacaaaatttaaaaataatataatattattaa

SEQ ID NO: 215814 - DNA, 555 bp, Cannabis indica
agcattacagtggcagtgatttactcttcactttcataatagctcagtctttcctttctctactatgcgcccttaagtttggaatattcctcttctttgctgcctggattactctaatgactatctttgttgttgttttcttgcctgaaaccaaaggagtgcccattgaagagatgactttcttgtggagaaagcactggttttggaagaaaagggtgccggtttcatgaggaggaaaaccttatgagacatgtagtttagtcattgtttaaaaaaaaatgatgacttattttgtagctttcatttgtataatgtggaagaaaaagaagcccagtggtttgtacatggagggagaaaaacagtgcaaggaaaaatcatttctcatagttattgcttctgtggagatttgtattcagtttcattagaattttgggtctttttcctttttcttgctcatgatgattcatgaaaagctaagctacttcagtatgtgatccatttggtccatttatagtatgcaaagtaaggaaaataggttgacaaacatttttcatg

SEQ ID NO: 215815 - DNA, 537 bp, Cannabis indica
ttagggttcctagggttaaaagccacactcaggttcaccaaagccttaacacgatctggtctgaacaagcaaaggtaccaagcaatgagagcaccccagtcatgtcccaccacaaacactttctcttcctcagcagctatagcatccaacagcccaatcacatctccaaccacatccatgcacgtgtagctacccaccgaagacggtgcatcggtgtccccgtagccgcggaggtccggggccacagctcggtagcccagggaagccagtgtgagtatctggtggcgccacgtgtaccatagctccgggaagccgtgaaggaataagatagttgggccttgtcccttctcggctacatgcatttttatgccatttacctctataattttatgctctatgctctccatctctctctatagctttgctttggttttcagcaaagttaatatgttgatcacttaaaatgaattattcttatatctatatatagaatgagtgagagaattagggttaagtaatagtacaaatgttaaaaga

SEQ ID NO: 215816 - DNA, 516 bp, Cannabis indica
tgttaccaaacggtacttaaatatttgatactaatctattcttttctttatagatgttctttggtggaatggaaagttagattgttttgtatgatgttaaaaatttaattgtttttttctatttaagtatctatatatctatacaaagaagaagtataacccgaactggtgaactcgctaattttttttttaaaaaaatgttcgggcgggtcgggttgaaccagtaccctttgcgctggttcgtgggttgagtttttaggagtaccagttttggattgaacccgaaaacccgcccgccaacccacaatttaaatatattatatatatttttatttttttattacattatatatatatattaaattattaattaaaaaataaaaaaccctaaaaactaacactttcactgcacaccagaccacctcgtcacctcacggctcacccccccacgctcgcacagtcgcacccacccacccccacccccacccccaccacggtcgacgacgagtgacgacc

SEQ ID NO: 215817 - DNA, 621 bp, Cannabis indica
ggaattaaatcataaaaaacagaaactaacacaccttcacttttatttccacgatgttgtgagcggcccaaacgccacggcgttaagggtcgctcaggcagcaacgacgaacgtttctgcggtgagtttcgggtacgtggcggtgttagacgaccctcttacggtggggccggaaccaagctctaagaagataggaagtgctcaagggatgtacatctccacttctcagagcgatcttcagcttcaattggttgtgaattatgtattcactgaagggatttacaacggtagcactcttagcatattgggacacaacgccatactcaccccattaagagagttacctattgttggtggaactggagtttttaggttcgcaacgggttatgctcatctcacaacttatatgtttaatctcactagtcttgatgctattgttgagtacaatgtctatgttttgcattactagatctaggtaatatatatgtcgtttatattttgatatttttcgactaattatgtgtacctctaatgtgttacataatttagtaataataatgttactttttattttgaaacaataataatatatatagataaataatataaataaaagagaaa

SEQ ID NO: 215818 - DNA, 548 bp, Cannabis indica
ctaaatttttagagaaaaatagagttaattttgttccaataaaatttagttgatacaaaaattgaatttttaatatattttttgttatatctaaatagattttttaataaaaaataattattttttaaaatcacttaatttgtttaattttttttttaattttctcaatcattcaaaataatttttttaagatctaaattaattttttaagatttaccaaaaaaaaatgttaaatctttcttatttttatttggaggaggtacaatttgatagttgtaaaaatttaggaggtaaagtttttaatttacaaagacatgccaatatttaaatgaaataagaactagaggtcctcattgatgcggttgtcaccgccccaacggtcacgataatatatatctgtgaagacaagtaggggaggtcatgagaaaacatgagtgttatgccaatgcgatcacttcaacccaaatataagaagctgatcatgtcagtccaaatacattaagggtgtctcgagaggtacgtatatgatactttaaaagctatttttt

SEQ ID NO: 215819 - DNA, 579 bp, Cannabis indica
aaaattatttaagttttttaagtaaaagtaaaaaatttaaaaataagttttaaaaattttatcgacaaacactaataaaaattttaaaataaaaaaaaactgttttctattctcaacttttaaaacctaaaaactaaaaacacaaggtaaaaactgttttctattctgttattgatattttttttgttgttggatttctcgctcgtctaatgaggttactcactgtttaggcaaatgggaactttttttttttgaaggaacttaatcataattgtaattgttttgggaacttaatcataattgtaattgttttgctttgtttttgggaggtcagtctccatgtactaaccaatattctagtttcggtttaatgaattgtgcaattaatttcagcaatgagagaattaaattaattcaatagttttaaatataggatgataaaaaggtaaaaaccactagtgatgattacatttacacatatatctcaatcaaattgtaggaaagtcaaaaaatcaaaagtcatatgtaaaagtctgaaagcacacacgtaagtagcagtcatatgtatgtatgacaata

SEQ ID NO: 215820 - DNA, 1177 bp, Cannabis indica
agttcatgtgttctaacaggtttcagtcattgatatagagggtccaatcttgttatatcagcaacatattgaaagtgaaatctgcactggaatcatctcactgcagtttcaaatctgcagcttacatggtttcgagaagaatgtgctagcagtggggacaaaggattcatctgttttagctctagatagtgataccggtaacagattaagcgctaccgctgttcgtccaaagaagccttataaagctctattcatgcatattttcggtaatgtatttgaaagcattgtaatatatataatcattgaactggcttatagtgaaataaccattgaaaatgttaaattagatgggaatgctgctgaggatgcagtgccaaagcaaccattactgttgttatgttctgagaaagctttgtatttatattccttcactcacatcatacaggttattattagtcttctaattcagtttctaaagtaaaacttagacagatttcattatgtgttgtctttggcttttggtctttagggagttaagaaagtcatttgcaagaaaaagtttcaatcttcttgttgttgggcatcaacattctatagttccactgatgttggcctcataacccttttcactaatggaaaaattgagataaggtaatagtcagtttttaaggaacaattatattactgaggttcatatttctatgattgcaagtgaaaaagtgtgtatattgagcctaaacatatgtttgtaaaatttaaggtcattgccagagttaagcctactaaaggagagttggataagaggtttcacatattccagtccaaaaccaaactcactctccaacattacaatatgctcatcattagaaggagatattgttatggtaagaattgtgatgtatagctctgtcattagtagttactagttgagtttcaacattaactcttttctttctctatgtgcagatgaatggtgatcaggaaatattcgtcgtctcggttttaagtcacaagaaaatattcaggtgaaccttatctacaaatctcaacttcagtttcaaatgcatttaaagcctctaactttctctttgcttaattttagacttttggagcttttagccaagtctaccaaaagatctagtggtttcgcaaggacttgtatcagcaggacaaatca

SEQ ID NO: 215821 - DNA, 516 bp, Cannabis indica
cccagaaacgattcaaacacgttcaaattcaagatcgctcaagaacgtgtatgaacatgcatgaaaatggtgaatctcgttctgggtgtttttggactattttaatatgctcaaagcctttcttagagtctcaaaaacctaatgaaaactctcaaagtaacccagaacacgcccaacccgaagaaggaagaaaagaaaaaaaaaattagttgctacggtggttcgttacgctcccgacccacacactctctgcctttctcatgaattcttaaccctaggagtcgatctccatcactttaaaatgagaataaagaggatcgtttaaaccgaaaatttgaacgatttattctcacaattttagctactgtaaccgtatgtataaaaataataataaaaataatatgtgtatcaactataacatataatattattatataataatattattaatattaccatattatatctctaataaaataacaacaataatataacaaatatattacaccataaaaa

SEQ ID NO: 215822 - DNA, 832 bp, Cannabis indica
ctctaaagccttaaagcagctgttgcttccagctttagtagtagtagttactaaaaagaatatcgtctttaacgattttgacaataagggttatttttttttttatttttctttttatagaaagttaaaaataaataaaaataattaatgacgacgataaataggtaatatagttccatttttgtttttttggttattatataatttatttttcttttttaatttaattggctggatggcattttggcgggttgtgttgtgttgttgggtgttggtaaaaataaaaagaaaaagaaaaaaggaaagaaagattttctcttttttttagtcaaggaagaaattattttgaaaaacagttgtaatgtgtttataggtcacataatattatttattatttataatatatatatatatggtaggacggtttcacgcggtttattgacaatgtgacgcgtcttcacgtgtgactttttttgattgctttgcgttcgttttcgtggttttgggtcccattttgtttagaggtctctaatttttggcttatggtatgggtcccaccttctcaatctcacagatatttatttagatgaacgttattattaattttttgttacaatctcctaatcaatttttacgttcgaaaatacatgtcaaaatattttattcaatatttttttatcgttatgcttattgcttacaatatcatctttatattaagaactctgttttcagtatcgtaaattattcagaatttttcaaaaatttataaagatgatactataaccataaataataccgctaaaattttttttcggcatgtgatttcagacgt

SEQ ID NO: 215823 - DNA, 693 bp, Cannabis indica
cataacttttcgctatcaacccttcaggatgtgctttatttcctatgtagttcttcaattttttcatgtaccttttaaatggatacatccacctcataaatacaagtccacctaaaatttcttcctcatgcaaatgaaagaccaaatgaataaactggaggaaatgtcaactctattttacacaatattaaaataaagtcattctgagcaacctccatgtctttgacatttatagtcctagaacaaatttgctcgaaaaagttgcacaattcagaattggtggtcgatatagatttcaggagaaacttatgaacactaacaaaaagtaatcaatgcgttattacatgaaaattgtgtgacttcaacttgataacatttattaaaggctaattaagattttttcctcttgaactttgactatgtaccaaatcatgtcccctaaacttttttggctgttaaaatttccccctgaactattaagattgttagatttaaggacatatttctaatttcatccaattttattgtttcaatgattgtttatgtactaaatcatgctcccaagactttgacatctaccaaatcatgcccctcaaactttgatatgtactaaatcatgccccttgaactttcatccatgttagaatttatttactaaacttagacaaaagatcttaaatctaacaatctcaa

SEQ ID NO: 215824 - DNA, 835 bp, Cannabis indica
atgtagaatattttctcttgctgcgtacactcattttaatcaattttgagttagtcaagactgcttattgaaaaggatttcatcagagtgatgcctgtcaaagaacaagctaacctatcaaatttctgctgttgttgaaatgaacaatgatgccttgagactacttatattcgtttaacaaatgcttgataatggttttcctatgcagtctctctggaaacaaaggtttatgtggagcgcctcctttaacagaatgtcccttgttttgggaaaatggtggcttatcttataaaggaaaaattgctgtgggagtatcaagtgcttttgttttctgcatgcttttgttagtggtatatgtcatctgcctccgaaggagcagacatgactatgactttggattacctcaagatttgatgtgtaagtatgcttcctaattattttaagttcctccattattctaccatttggtgttagtagatgaattctaggctgctcagcacgggctacgacaaagttatacatatgattctttgcatgtgatcctgatataaataatggggttcatttttctttcaaagcaacaactacttttggcaatttttgggaaaatagctcataacttgtatcagtgtagtggcagtggcatttttatgttttaggtgtcgtctaccttcttatctaatgttgcaagagagatgtcttgctcctttggttaggtaccctctttgttactacgtgattacctggtgaattctgcttggctgttaggcttagttacaatgcacaatctatttcaatctcttcgaactcttaaaaattgcactcttggcagctg

SEQ ID NO: 215825 - DNA, 503 bp, Cannabis indica
tactttgtaaaacttacctcacgaccaacaaacggtgaagtgttaatggaaaacgccattttaactgtcggttcttccaccttaatggcaggtaatggcttcccagatgatttatcagctattgtctccccaatctgaacaatcaattcaattcagtgtcatgataataagatcatgtaataatttcaactaacaaaatctgttaaaaagtaaataaaatgatctaagaaagaaagaaaaaatagagaattataataacattatgtaataatttcaattaaacaaaagtaattacagaaaatcgtcacctgaatatcgttgattccacaaacagcacagatatcacccgcttcaacgctttctacaggagcccttaagaatttgtcataaacaaaaagttcacttactcttgcaaatctgcaagaatcttctgaggtacatacctagtcaaaattcaaaccataagagaaaagggagaattgaatgtttcttttctatgaaaa

SEQ ID NO: 215826 - DNA, 561 bp, Cannabis indica
cccaaagtcatatataaacaccaccatatttggccatgttcatattaccttggatattaaaaataaaaaaaataacaataattaaaataaaaaactaacctagctacatgcgttgttttttttaccattttttttttaaaaaaaataagagaactaatatattatttttttttatttttttttcgtttaatttttatgtgagctttgttatgtatggagattttaattgtaatttaaattgttttctttttttttttttttttttttttgtttatgaatcaggaagtttttattgctcaaaactaatttgtacaatcaaatagcaccccaataaagggcctaaaataataacctgctatacaattaagatctttccacaccagatgccaccattttcaatataatacatgctttactctaatctgatacactctgtgcaatacaaacagaagctacaattacacaactattaaattttgaaaccagttggtatcatcagttgacacctttttcggccatattgcttgaactctttgaagcacctcacttctggttctttcg

SEQ ID NO: 215827 - DNA, 506 bp, Cannabis indica
gaatgttaatatttttctgactttcactaaattcagcatgaagtttatgaattcgtgagacaacaactgtaggtgaaaattgctcccgaccatgaacaatctgtgtacgctcactccaaacataccaagcggcaactaaaaataattcaaattcaccctgagataacacttcagacgccaaaagaatagtttgttggaaggaagtttccaaagagaaattttttaggaaactaaaattaagttgcttccaaacctttctaaaaccccggcacaaaagacagcatgcccattagactcattgctatagccacaaatgagacaattggagtgaggaaggatagatcgtttttggagcccttttgaagtcggaagaatctcatgaaaacctcgccaattgcaatttaatactttgtttggtaaatggagcttccaaaattttttccaccaaattgaaaattcatccttagaaggagaggtagcagtcaaatttaactgagaagccacat

SEQ ID NO: 215828 - DNA, 1104 bp, Cannabis indica
acccctatagtcatttataagcacatttatataatttagggtaaattagtcattttatcacaaacacataatacataattttaaatttctcattaatcataataacacaacaaataaatcccgaaaaatatattttgggctccgaacccgcttcgtcccaaaatacccgcttgtgactataccacgccgacttgttagaaaacgcctacagatagtcagaataaacatactatataataatatagcccataagtacgatatatcatataaattacaattttaccccttcttaggtcaaaactacaaaaatgtccctagtacaccaatagggacttaaaatgcaatttatcaatatagtttcatatattaaattatatagttatataattcctcattaatacataattaaactagttagagttgctaatccagtttcataaacattagggtattacactaacccttgtttagaagcatcacactaaatcacaaatttctcatcactgaatggcaaagttaacactagtgcagtaattaacctctgtttcaattcctggaaactactttgcacttgtcagttcaaacaaagctacaattctttcgagttaattctgttaaggttgtagaaatctctacaaaccctttaacaaaccttctatagtatcctgctaatcccaagaaacttctaacttcagttgcaaacttggctcgaggccaatcccgaactgcttcaatatttattggatcaacaaggataccatctttattcataacatgccctaagaagcttacttgaggtagccaaaatttttatttcttaaatttatcataaagcttacgctcccagatgttgaaataccatctgaagatgtttctcatgtgccttttggattcggagaagatcagaatgtcatcgatgaaaataattacaaaatcatccaaaaagtcctagaacactcggttcattaagtccatgaatatcgctcgagcatttgttcatctgaaggacgtcaccaggaattcatagtgtccataccaagtacgaaaagttgtcttgggaatatcctcctctctactcctcaattggtgataaccaggttgaag

SEQ ID NO: 215829 - DNA, 719 bp, Cannabis indica
aaataatgaaatttgggtatttgccttgcactaaattctcctataaaaatatacaaaaatggtggttagaactaatttaagcctgttggcgatcgctttcgagatgattttgtagattatgttgcacaggcttatgggtctaaaattcttgaccgaagagggttgcttggtcttagggatgagagttataagagtggtgttaaggggtgcaatgtccccatctccattaaggaagctaagcaccgcagataacacatcttccctgacaagcggccagtttgctgtgtaaaaattagagttgaaaccgtcaaggccaggagctttatccaaagggagctgagagaacactttctcaacctcctcaattgaaaaagtttcatccagaaaggatttgtcgatatctgacaaggaacagtcaatgccttccaaagcaatttgcatgtcagagaacgatgaatttgtggaagaaaagagcgaatggaagtaggtttcgatttcatgagtgatgtcttcctctgtggtgacgattcctccattctctgtgtgaagttaaaggattttattgactttcttcctgtgggaggcgtgacgatggaagaacttagtattttggtcgccttgggctagccattgagttctggctctttgcttccagtacgtctcctctttgtagagaacgacatcaagccaggattggatatccttgatatttccaatcg

SEQ ID NO: 215830 - DNA, 826 bp, Cannabis indica
acatgtcaaagttcagggggcacaatcctgataaatatatattttttttttttgaaaaatatactatgttattaaaatgatttttctgtcactgtctagtaattaattatgttaattaatgatgcttatcatgtggtattaatgtggccttacatagagctaagttgtcattgccacacattgatgctaattaaataagttcgtattactaaaattacatatatatgtatgacaattaaaaaaaatatatatatgaaaaattggaaaaataaaaaaaaaaaaaaagaagcattttttgctactaataacataataaaatagtcactctatctagttattataaaaaatgatagaattattatttattattttttaaaaatataaaatatgtttttttttctaaaaaaagcaaatatatattttgttaaccgattacttttttagggcagtgattactttagacttagagagagtggtggcatccatgcacgagactagagagtagatttacactacgaggagtgctactgtcaatctcctgttaaaacctcttaatcaatcttcacgctcaaaaatatatgtcagaatatttttttttcttcacgggggtgttcgttatgcttacaacatcatccttgtaaaattttgaaaattttcaaatagcttacagtgtcaaaaatacgttttagaagttttttgaacgtcgcgtggtaaactgaaatatcaggaactctgtttctagtactgtaaatattcaaaaaattaaatacgagtttgtaattagcattcctctttaactctatttcagtaacctaaacagatagag

SEQ ID NO: 215831 - DNA, 611 bp, Cannabis indica
gtatttatatacaagttgtcactaatttaagtttagtcacaacaagtattgtgactaaaaatacatttagtcacaatcacaataaattgtaattttgtgactaataattttagccacggactttttagtcacaacataagaagggtgatttataatttattacaatttttttacttttagtcacaagttttgttgtgactaaaaataagattttttgtagtgaatgaacaatagtcactatataaagaatgtttattctcattcgaatatgaatgacaactataaaacttttttaccaatcataaaactttcatggaatttattaggtgatttaaagttatttgaactgttgcaaccatttccattgatcaaaatggaataacatgctgaaaaatatggtaacagttaccagttacataccagttaccaatttgtttagcttttgttaattcttctccaaatgttccaattcacttcacttgtatttcaaccattcatacactctataaatgataatattaaatatccaaatactatattttaaatagctactatttaatcacattcacacccaattagtaactcattactaattgtaagactgataatga

SEQ ID NO: 215832 - DNA, 535 bp, Cannabis indica
gcgtgaaatagccgcagtcagggtggcagaagagaatagttcccaaaattaacatgagcttggaaatagagattcgcgaggaaaacctcgcaactcgcaaaccaaggggtaggagacaacccaaagatattcctaaaagtctcaggagaagtagccggaggaaactaagcaaagtctagggacacagcctgggacatcggaacattagtcagagatcaccgaccctctctccaagttcataagaaaggagcttgcgcaaacccctatagggggaacgaggtgaatcaaacattaagaggaagagcaaaacgagaagaggtgagggataccgcgaggcgtacaatatctcataatcgatcaatgcgaggaagagaagacacccgcctcatacaacatataggaagggcaaggtccgatggatgtcacaaccaatgtgacctacgagaacacttcaacttgagaaaacctgatcttcgccaatgacttggtccaaaataaaggaatttacttcatttctgaatggacgagttgagat

SEQ ID NO: 215833 - DNA, 1000 bp, Cannabis indica
aataaatcaaagaacatgaatagcactcctgagttgagcccaagcatatcaggatttagattcttttaatcttaagatcaactactgatattgacttggaaagatatgtataacggtaagtttgtaatatcttaacttagttgcaatatcggtccagtccaatgtatactccatacattcgaaactagtatactttactaatgtcctggaaagaacataacacttactccaagtgtaagtacacatcatcgctgattatcacattagtgtaaatccaataacactgatgaaacagggaccaaaacttttgattcatatgatcacaatcacattccactgtgttgacgatactgtaattgtgaataaacatatgatctggatttaactgattttgtgtgtatgaatgtaataaacatattaaacatattaaaccattagcatgtaaaattcatgcaaacatcaatcacttcaaatttcttatattgataactaatcagattgtaaagagttttatttagggcataaaacccaacaatattcgcacctcagatgttgaacaggcacttcaggctaacattatcgcctcaacggaggactggtacgagaagtatctctttaggagggaacagaagttagcttatatcaaggctcaagccgctgccgggagggctctctgggtggaagctagtaaagagcaggtgccttcccggcctaagctactactcccggttcccagcactggggctcctgacgccagcacttccggatccggtaagtctcctttcaatgttcatcatgtccattccgctcaagattattcttgatgtaggcctgtagagtttgacgaacgtctccttagatttagaatgccccctacccgatggggtaatcatgccaagggtttccaacttaggtcattttctaggccggtcccggatggggtccgggcctcccacgcctatccttttggatcattaagcttatctgtcttccagctggt

SEQ ID NO: 215834 - DNA, 520 bp, Cannabis indica
ttaaagaagttaccttccacgaatctcgaaccaagaataatatcaaccttaaaaggaaaactacatgattgaagatcaaataattaatgcacaattaattatcaacaatcaaaagacatgcatggcatgaatagttatcaccgtgatcaacctgccaagttagcatacagctactgcctcatgggttgggcttcacgcgataagctcaataaattcttcatgcaaagagttagaatttcttactcacaagcttgagaagagaatagaggaactatactcattgtaatccttttggcttttttagttttacaaataataaaactgactcctggattaagaatctttatcgccttaaccaaataaaaactctgagtactctatcttattattatttttttgaatcgtttttctttagtttttatattaaatatttcattttttaaaaatctcaataaataataattaatattttctaaacaaagataattaatttattgatttaacaatgttaatttagtta

SEQ ID NO: 215835 - DNA, 653 bp, Cannabis indica
catttagaacagtgaacacttaagaccttattatcaatagtttatttcatatgtaaaatgtaattttaagcattttatggtatgtaatgttaaattatattataaaatacatataatctcaagtaacataatttttttattactagaatttacttggggtcatactactagtaatgaccaaatatttataaccatgattatgacatggatgaaaggtaaatattaatatataaatgccaataattttttgcaataaaataggcaagataacctcggtcaaactggttcaaaacaatactcactattataagcaaaataatagtgaaactacaataaaacttcaggttaattttgaagtggtttaaaaaagctaagtatgagaagatgaactaattggtcgcatacaataaacaaaaaatatcaaaataactaagttatcaaacaagttatgcacgatgtataagtttttattacttagggatataacaagtaatatacatatatatatatgtgtgtgtgtgtgtgagccattctataaaaagtagtcacattgggagattcgtgagctagatcaagtctgacttcaagaaatctactctttctcatatacacttccttcgatgagtatcttgagaaaaagagttcttatagga

SEQ ID NO: 215836 - DNA, 518 bp, Cannabis indica
catctcaaacttgagggtgattcaacaacttcaagtttgtcaattaagaaatggaatttgtatggagttaaactctttgtcaagcaatctgcagtttggtcacttgaaggaacatatctaacttcaagtttcttgttgatcaccttgtctctcacaaaatggacatctaactctatgtgttttattcgagcatgatacacaggattggcagccagcgcacttgctcccatgttgtcacaccaagtgtcaggagtggaagataaagggaactcaaattctttcaacaaggcttgtatccaagcaatttcagcagctacatgtgcaagagccctgtactctgattctgtactcgaccgagacaccaccgattgctttttagaggaccaagacacaagtgtctctccaagataaacacgatatccagcaatgctccttctatcatctggacaacaggcccagtctgcatcagagtagcctgtgatggcaagtctatctgatggtttgatgtgaagaccatg

SEQ ID NO: 215837 - DNA, 544 bp, Cannabis indica
ttttcttttctgagtcgatcaaatagtatgtgaagtaaattaatctcgattgagtacttatatagtcaatacaatacatcaggttttaaattttgattttattttaaatatgtagtcttttctttttatcataatatctactaaatatttatgtttctgatttttttttaatttttttttgataaagattttaaattttatgatacaaataaaatttatttttctagccataaatctatatatctatatatatatatatctattaatttatgagacggtgacatgccgctttaaaatgacttcattctactttattttttttctcattttttcacattaattaatttaaaaaaaaactaataaaaaaaatctaatacactaatttatacgcagttacacattattatcatattaattaatttaaaaaaaaaactaaataaaaaaatactaatcactaagtcatagtttcatacggctacagtctaaaatttttacaaaaaaaaaaaaaaaaaactaactaacaaacaacttaaataattacact

SEQ ID NO: 215838 - DNA, 747 bp, Cannabis indica
taatctcacctaatccctatgatccctacagcataggttatgcaagtcctattttgtatctcttgggaacttgtgctcatacattactggcactcaaagacaagttatcccttttcaactatccttaccaatcgctacaaatacccctgaacaaaatgggaaaggggatcgaaaaaatacaagagagagggagaaaaactcaccaagaacattctctgtataagaactctcattaataacaaagaatcgtggactatggctcattaatgctcgaaccacgtaaaactcacctgcattaattatctcaatgctctcatcattatctcatttaattggttgccgaaaatttgggtaaacattttggtgctttaattgagagctgtgggaagcattgttgaggaccaacagtcaaagaatcaatggtgaaaactcgaaacaacacacgcgaacctcgtccccctaggatccttaaaacccagaaggcgaagaggcggcttcacgggtaaatgtaggctctgaggaacgagatgagacgaacgatgaggaatatgaagaaaacttctaagggtacgacgtttacgacgaaggtaggtacactaaacttgctggtcctaaggcaaaaagcagctaatcaatgaggccgaactggccgccctaaaaagaacagaataagaagatgcaagagataatggttgccatgtaaaaagatatggaaatggctggaatacatgtgcatcccaaggccat

SEQ ID NO: 215839 - DNA, 562 bp, Cannabis indica
ctaatgtaatataatacaacgtatcaaacgaggtcaaaaaatttaatcaataattttttgtaaaaaaaaaaaaaaaaaaaaaaaaacatatccaccaaacaagatctaaatctctacatttaataaacacaagctgtctaattcaataaaaatagattgaatgattttggtgacaaggaagagaacaaaaatttagaactacaatgcaatgaatttatataaatagatttcagattcacatttgaattatttgtgtgggatccacatggattattactatatcatatccaaaaacactatacatataatgttttattgtatgaatttatatatttcatttttttaattgttattattaaaatttgaaatttcttaaacaaccagacaaacaaggtactacttatgtggatggatggtgactattagtgagaaagaattactctctttcttttgttgtttcataaataataagtagttattatcactatcacttgaaataagaaaatacataacggtggtcaggcacggcaaggccggctttttaactgcactaggctatgtt

SEQ ID NO: 215840 - DNA, 885 bp, Cannabis indica
agactgcttaccttacaaagcaaagggagttaagagagaacgccgagaagcgaaatcgaaaaatgctgagagagggagcaagcatcaaaaaagcaaaaggaagattccacacttgaatagagaccaaatggagaaagagaatcaaatgtttaatctatagattacagcataacttacccaagtttttcagtaatatttgtttgtaaccacctattttgattgatggtggtgaatggtattagtattcctctttttgaaacttgtgcttttctgtgtaacatattcaattttgcatctattgaaagcaaatcatctcattgttgagcttaaggtctcgaggagagaactaaaacaatcgcgacgactattggaatttttgaatgctcagatgaatgagttacgcaagaaatgaatttgagaaattaggcttgctcataattagttcagtactcgagtgttgtggattttgaaagaaggaaacatgatcaaattgcaggtagccaattcaaattaaatagtacaattagcatggggtgcaaaattctactatgtaaacaaataatattgttttaaactctaattaattagtatttgacatttatatttttgtttttttttttttttgtaaatgcgactttttattcacaagaacaagcaactacaccatgtcggcttcatctgctatgacaacagctgcagcaccatgatccgtgaccaaaccaagtttgaagaaggggcagcccattttgttattgaatgagctctactatattactaaattctttggagaaaagacaatgtatgtacaaccaaaagaatattcaaagctttgatatcatcaagaacaagcacccaatctcaaaattcctcaaaccatgggtggca

SEQ ID NO: 215841 - DNA, 942 bp, Cannabis indica
gtgtgagtttttcttttgtggatgctcttgtgttcatcatcaactacttcatcacagaccaacaccatccggctataaggttattaattttacagtaataaattaatatctttattttttttacgtaacatttactattattattcctgtaacgtaagcttattcatacgtacgtacgttaattaatagttttatttattttattctttattccaaagttatttaagtttccgttattaatatattttgggatgattttgctaattactaaaaatagatgtaacgatacatgtttcttttcatctctttgttatctgcatagttttatttcttaaaaaaaaaaaaataataagttcatgtatgttaagatatcatgaaatttttttgaaaaaaaatccaaattacttatcacaaaaaaattatatgtatttatataaaaaaattagaattataaaataccaaaaatatgaagagagtatattgatatatatacccatatgtaacatgtttaaggattccattctttatacattttctttactaacttatgtttattatggtatttatcattacagaaaagttttagaaagctctattagaggtagggaactattaagttcctcatcatcagcacctaggattattcatactactcaaagacacaaaaaggtaaatcttaatttatttgagattattacttctatttttttttttaaaaaaaaaaagttttaaaaaatttgagttctttattttttgtcttgatttttttattttatgatgtattcaggtgattgtcttagacaatggtcttgtacaaatcagtttttcaaatccaggtggtgatgtaattggaattaagtacaacaacatgaacaatcttcttgaaccacataataaatatagtaatagaggtaagtaataatcaatatcagttttattata

SEQ ID NO: 215842 - DNA, 805 bp, Cannabis indica
attatcacagtagataaaagctggtgttgtttgaggaattctgagatccgtgaggaggtactgaagccacgttatttcactggtggtggctgccaaggctctgtattctgcttcgctgaacttcgggagatggttggttgttttttagttttgtatgaaactaagcaatctccgaggaagatgcagaagcctgtagtagaccgcctagtgatggggcaagaagcccaatcagagtctgaaaaacctctaagatgaagagaggaatgtggagagtataatagaccttggcccgcatggcctttgatgtatctaagtagatggtgcagggcttgcaaatgtgtgctgcgaggatttctcatgaactgactaaggcaattgatagcgtaagttatgtctggccttgatagagtgaggtagagcagtttgccaactacttgtctgtagtaagatggatttgttagaggttctccctgttgatcgtctaatttggtccgtgggtccatgggagcttttgcaggcttgctgcctgcgtattcagtttcttcaagaagctcaatggcatacttgcattgagacagaaacaagccgtcttttcctttggcaatttcgaagccaaggaagtaacgtaagggtccaagagctttgagtttgaatctagagtgtagagattgttgaagttgatgcagggcagcaagattgggtccagtgataatgatatcatccacgtagacaagcaatgatatgaaatcatcctcgttgcctctagtgaatataaggtgtaatctgcctgagattgattgaatcc

SEQ ID NO: 215843 - DNA, 1055 bp, Cannabis indica
aaaaagagtacaggagctcactgatgtgatggaaggactcaaaaaacttctcaaaaaccatgaggctaagattaaggagttgaccaaggctcttaagcaaaaaagatgaatcctctttgaaggagaatattgctctgaggaagcattggttgctgagcgggaggcacatactaaagatgttgagtatcatgaagaaatcattgcagaactgtttatgaattctagaaatctaacctcgaggctaactttggctatcttgaagatgacacttgtgaagacatgctcgagtattgcgagatgaggaaagctgaggatgaggtagaaaaatttgtcaagacaacttatgaggaaaataggaaatctaatccttcttttatcatctagaattcagaaactttggttgctcatcatgaagagcctaggataacgtggccgaccaagcaacttttaaacttggtttacttttatttatgtttttcttaagacaaatagatgcctgggtagcttttaagccttgatttattctgcttctttatcttaatatgaatatatttggcttttcaattttgtccttgaattttatcatttttttctttctaccgatgttggtgtaggtgcacccaagtgactgagcagacttttgactcttggtcacttcaaatcaacaagtttcttatttgtctattcgactcttaagtctaagcgaacctttttgcatggatgttaggtatgacttgctataattttttaatagaaatattaaattaaaaaaaattgaacaataattaatctttattcatttattggtcggtatgcattgttactgaagtaacgtacatttattgaattataaagagctattacatgatctgttctaatctttagctaattaaaataaaaaagacttttgagcggtatatctcatctgtaatccctaacttttgtccactgaacgtggcatgtccatgtaagctaagaccaagtacacataaaatgtagtcacaccaatagtaggacaaatcgccttacaatgtatggcaaaactgtaaagcagc

SEQ ID NO: 215844 - DNA, 968 bp, Cannabis indica
caagctcaatatatatatatatgtttagttggttaactatatattcagagttaacagatatatattttttatttatcttaattctatcatctatgaaaaaaaaatacataattagaacatatattttttttatgattataataggaaactctttaaataaataaattaaataagagttgtgtcaccggacttattaaataatctaacggctcctcaaatataaatcttccaaagaaaaaaagtctctaaataattaatatcatcataaatctaagaatacaaagaggagaaggagactatatatataagggtgctatcataaaagaaaaaaaaattcaaaaatgaaaagtcattgtgtctactagtatcttctaatatatcatacgactattaatacaattaaatattaaatttcttataatttatatattaatctttataaaatattaaataccacctttaaatagtgctagccttaagcaatatatatcctaaaaaaaattaatagtataaaaagagttactaaaagataccattggtacttaatacacttttcagtgtcataccgctactgtaattaagtatcgagtctcataaaacttaataaaatattttttaaagaatatatcactaaccaactacaaaatattatctataaaaaattctaaacaccactaattctctataacaatattctataataaaataagcttataaattatagaagccgaatattgtatacgaagttacgaactttttaagtttgacacttgtataaataccattgataccaataatataagagctttaatttacatttaagtgggtctaatagttaaaaaccactcaacaacaagtaaatatatatgtggagttgaggagttgaggatatcacgtttaacattcgttattctttaatatatataatatatacactgttcaaacaatgaaaaaatatccactgaaat

SEQ ID NO: 215845 - DNA, 918 bp, Cannabis indica
gctgccccgcgtggctcgggagggttttccaatcgggatggaaagccttttgcttaagaacaaaatgacttatttaagaatagaattctgctatccatcccggtcacaagcatgctcgggagccacatgggctgcgggattgatcagcagacccgcaaaagcttcccagcgtggctcgggagacattttcaatcgggatggaaagcattttgcataagaacaaatagatgttattgaatatgctcatgcattatataataagctcatcaggttcaaaaacttctacatcaactcctaaccaacagtaggaggccaggaaaaacgaacgaaaaaccgaagagccagggctttctatagccacttgcaacccatcttaacaaaattataagatagcaaaatggtctgagtctcatcatatccataaagagatactctatgctactactgcaactactcataacttaacagtatcaataatatttgaaaacggagacataacaagcaaaaaacaaaacaacaaaatgctttttgatcatccatggctgctaacaaaatcacacagacagcacttcttatcaacggacgatctagaaacctgaaaaaagcattgtcgatgatccatcacatggcaacgggcatgcccaacaagaagacatcttcgtggaagcttgaaccaggagagcttcctgcagaattatggtaacttctctccgcttcttcttccaatatctcctcggggcagcaatcaaaactgcaaaaggcttgctcacctctgttgagagaagaatacatatttatgtcaggtatgacaaaaaataatataaacaccaagtgaagatttctatagacatatgagaaggagaaacctgctcatgtaaatgtcttcatcagtttccagccttttcttgcaggagtgac

SEQ ID NO: 215846 - DNA, 607 bp, Cannabis indica
ctcctctatatatatatatattatattattagggttgctctcccaaatctcagaaccatggctagacaaaagaaaaagaaaaatttgaagccatgttttacagaaaaaaaagaacaacaaaaagaaagaagaagaaaaaagaatcctggtattagaggttagtagtccatcaagtattttctcaaaaaaagaaaaattacatcaaaatcccattacatattatctttttttttccttttaaaagataattatccacaatgctcctcccgctgcactatataagctctttaaatcaaaacttagaagtgtttttctttgttatagaaaaattagattagataagaagatgaagcgagaagaacaagacattaaggagaagaaggagtaggtaaaaatctcagtactatttctctgttttacattatacattttgattttagtgatagactctttcattttcttttcgtctattatattccttggattttaattatacacaagtcaacaaaactattggaagtagttgaatcagaattgcatgtttcattttctctgtttgcatgatctattttcctccttcttctacgacttgttcttctcgcttcag

SEQ ID NO: 215847 - DNA, 756 bp, Cannabis indica
aaccaaactatgatttgtaattcgtaattttttaaatattcttttactaattatgtttactttaaagtttataatacataaataacaatgaaagtaaataatcttaacacaatgttaagatattatcaatattaggcttaaaattgttgccatatcaatattcaataaaaaaaattatattaagtatatatcaagaattaagcggtttggtttggtttgaactacatgtgagaattttaaaattgtgaccgaaccaaagaattataaatggtctgaattgaccaaaccgttgacaccatattcatttggtccggtcttaaataatttggttcaaattggttagattttgaaaccacgaattgtgaattatatgagcatacctagtaaattttaaagaaattttcaaataaaaaaagaagtttaaaatatttgctatagcatgtttttagtacggattaaaattcactgttaaaaattagtgttacataatatattaaactaatctaattttaatacattaattagtttgagcattttaaggaaaaaaaataatgtatagataattaatggagttctaaaaaaaaataaattttaataatataaatttaattagttgaattgtcatacttaattttggtattggtttaatagaataccaccagttttttagaaatgatcttaattccagtctcttaaatagtgataatagttatgctaaaaattctaattatgttatgttcaaaaaaaaaaaattct

SEQ ID NO: 215848 - DNA, 670 bp, Cannabis indica
atttctttttctgttacaagttagttacttctgttatttttctttctttctactgtaactgtgtaactctcctactataaatacaagtcctttctctgagtcttgcatctttcgcaagctcaaacgtttctttcatttcatgctctgttttctccttccttgtattgataagattattcatctctaacctatcccaaatattaaaataattttcacagttcctaattttcttatgaaagatcattctctttatgtgtttttttttttttttttgtaggaaaattcttttttatgttttataacaagaaaagtttactattatcaaaataaaataagaagcccctttttttgcaatgctatatatttttctttatcaaaatataacaaatttttaagtgctatatatagcagatacaacaaccacttcaacaaatcactcactattattcgatcggttgttgtattttgccattgttagagagtcccacattaccaatatgtggaaaaataatagaatatataagaggaatgggctcctcccattgccaattggttttgagatggaacctcattcactttattcctcaaattctaacatggtatcagagcaaaacaaacaaaaaaaatctccacctgtcccattcaccccatatccctagcgggctttcga

SEQ ID NO: 215849 - DNA, 697 bp, Cannabis indica
tttaatactattttatatatatatcaatgtgatgataatggactcaatttatatttctacctttttttttatttaattttagtttcattattaagaagaatggaaacaaatttaatttaattatttattttctctctcttaggctttttagttttttaagaattagtgtgtagttttcaatattaaaaaatattaacagtattactaaaaattaatcatattttgtattgggatattatatattagagaattgctaaaatgtactattcgtgcatatcactctcttcgctgtcatattgttattagtgtaattaagtattaggtcctacataacttaaaaaattaatttatagaaaatatcgttaaccaatcataaggcgctatctataaaaagtgttgagtatcgttaatactcaataacaatgttctatatattatgaagttataggattttatagtatttgcaattattattattattatttgtaataaaaaatgcaacataattaataggtattttgttgtattagttaagaaagaaaaaagcattttattttattcatataaaatcatatttaattcaattaaaatagtgtatatgtgtttttttttttctaaacattaaaaatgagtaaacataataaacacacggtaacctaaaaaaataactgaaaaaaaacaacatcacaattcaatt

SEQ ID NO: 215850 - DNA, 708 bp, Cannabis indica
ctcacccaaactcaccccaaacacacctatctctcagaatcacgaaatagagttgctagcaaatatcagagggtcaaaaacacatatctcatgcatcaaatccaacaataaacttcataatttcagattgtaaaatcaactcaacatcatgcttaaactccaaaacttcaagctcttgaacttgagcttaaattccaacaaacccaaatactttcagcagcaaccaccataaaacatattgaatttaagacataaggaaaaaccctagaattctatcaagagctcaaataactttccccaccaagaattcaagcaaaacataatcaaatcaaccaaagaacattacttcatgcaacaaatacttatcatcatcattaccatcatattcatgcattttcaacactaaaattcaacaagcaaaatgagaatcaaagttatgaagactacctcaacttccaattcaaagcttagcacaattaatccttaagcatcaagctccaaaacaagccaaaaatcaagcttttcttctcaaaaatcaagtttgaagaagaagagggttagagaggatgagagggtcgggtgagagaaagaaaagaccagaataattcattcatttcatcaaaattcacttcttttactaattatcaaataaaggtcaaaatgaccaaaatgccgttagggccaatgcacacacattcacatatacat

SEQ ID NO: 215851 - DNA, 651 bp, Cannabis indica
agtactgtctaacgtgctggccagtgcagacaatctctgccaattctccaacaatgagaatattggaggcaagtgcaacaacgatggcgctgaccaaaacaatggaaaaaaagggaaattcaacgattaccttatgccatgaagcctatgggagaaggaggagaagtgggtatgcttcactctcttacaaaaaatcccaaagcaatgcatgcctaccggccatggtgacatgtgtcaccaaaacctgaaaatgcctggctaaccactcaagagaatcattgaggctcggccaatataaggccacctgtcaaccaaaaatggccataaaaggccaacctctcgctagcctcatggttaaatataaaagctatctccccaaatctctcaagattcaggagaaaagcaagagctatagaagaagcaagaataagagcaagacaactcaacctagaaggtgcggtggccacctacccgatacaagcatggcacttacacctgggggcaatggctgcacaggcaacaaaggtcaatttcaaagcttccaatagcaaagctgaatatgaagctctgattgctgggctcatgctaccacacgaagcgcgggttgaatacctaaacatatatccataactctcaactagtcgtaggtta

SEQ ID NO: 215852 - DNA, 1292 bp, Cannabis indica
tatatttcatttcatgtaaaagtgaccctattattaatttcttcttctatttcaaaacttattgatatttagatatagtaatggaagagtaatatatttaatgtgaaacgatgactttatttgtactatgtatgtttactagttcaaattaattaatacttccactcaagaaataataataataataataataattattataatgacaaatataagttaattttaaatttttgaatatatactttcatgagtattaatgtatttcaaatttttttttacattgctttacgagggcttaattattataaaaaaaaattatgtttattttaaattaagaaaaattataattactttctagtaaatttatttaattttttaagaatttaaacgttacaaaaaagatttatcaatttttttttactattttaatacatgattatcaaatagaaattaatatttttaagttagcgttgtctttgagtgtgtacaaacgtcgttaaaaacaatatgacgtcactaatttactcactaataacaatgcaataattttaagacattttttagtaagaaaaaattgaagcttgttagtaataatatattgaataatatatatatcaagatcatcaattgaagtttttttattttataaattataaaatattgattatattctcctacttaattaatctttagatagatttacttatgaaagtaatatattcaaaaatttaaaattaacttaaaattatattttattttatagtaaaagaagtaagggatgtagcttagagaaatagagtatgtgattgaaaattgccaaaaatggatacaatagcattactcttttatttgctcttttatttttaagaagttttaaaaaaaagaaaataaagtaactaaaactatatattattgatttatttttctttacttttttttaatcatgatcatttatgtttactcgaagtagttagttgtaatatgtaaatagccctacttgtgtttgtaccataaaagataagataaggtaagaaaatgaagtgttaaaatatggtaaatattattttaggtcatgtcttttataaaaattattaattttattttctattttggtaaatgataagttttttttttttttgaaaaatagtacaatattaaacttaaacttaattttttgtgaaattaaaaacactacaaaaaaatcttactttttagttacaacaaaatttgtgactaaaagtaaaaaagttatgactattgtaaattatcattttagtgttgtgactaaaatg

SEQ ID NO: 215853 - DNA, 710 bp, Cannabis indica
tttttatacataatcgaaattaaaagtttttatatttatgcgggatacataaccgaaattaaaagtgtttatatttatgtcatcgccttaaatgacttcggttgcgatttttaataaaatccgaagataaactggcctaaaaaccgaagataaaggccctttctctagtagtgtggggagatatgaaaaatagacctacattgccaatagtgatttaatttagtttatgttgttatttttcctattattttatcaaaggaaaatttaactttctatgtatttattggattaaaattatttctctaaacctaagttaacccatatgggtagaatcgactaatgttttataaaacccaattctgcccctcccatttcaaacacttgaccctctctcttcctcccttttctctctcgctctctaaactcaccccaaggacttgacccataacccaccacccacaacctcggtctcttttctccacgactaccgcgaccacaaacccaacgacccacgtgcccaatgatcactggacccaacgacccacggacccaacgacttctccatcaactacgacttctccatcgaaaatattgtcaaaggaataaattatatgatttaacgtctgttatctttgagttgatgttagatttagcatcgaaaatggtcggaactgagttttgggtagaaaattgatttttctgccaggccc

SEQ ID NO: 215854 - DNA, 243 bp, Cannabis indica
cagtacgagtctagaaagacaagtgaaagagaatcaatgcagattcatgtagaaagtagaaacagccattacctgcaaccggttacgaatagtagaaagagtagtcccaccatataataatgcactaacatcatcattaagctgctcctcttttcttttttaacagtcgtctgcggtttttattatggcactttgacaaattttccagcaccaattttcttaattccagtttctcacgcattt

SEQ ID NO: 215855 - DNA, 709 bp, Cannabis indica
gaatatactcataatattgtcaattaatttttagcaaaaaaatccatcaattaatacttttacactatttttttcttacactcattcattattttttatctatcatgatcgtatagatgaatattattaaacaaaaaattattatttttatctattttattttttcccactacaagaaaaaagaaaatcatgcatcaatctataacggacttcattaaaaatagttacaataatttatagttaaaaatagttgagttgtgtcaaccaagcttcactgcaaatatatattcttattttttaattttttaaaaatcttaatttttaatagtaaagggtccaaactaatatgacaattaagagttttaaaatataaaaggtctggatagaattttaattttttattattttcaacaaaaatatatggttaaaattttagtttcacaaaaatttactttatatatataaataaaataaagactttaaaagaataaaagctaaaagttagtgttcaaaatagtattaatttttacttaacataattttttcaataaacatagatttttcttataaattttttaatattttgattaaatacaatcttaaaaatattttttagatatatattgatcaaaatacaatatttaaataattttatttatcaattttaattttttaaatggagaattgagacagtgatgtagcaatctaa

SEQ ID NO: 215856 - DNA, 634 bp, Cannabis indica
  modified_base (624)..(624): a, c, t, g, unknown or other
caaaattgaaacaagaatcatcaaaacacaatgaccattgagtagtcgacctccacagaaacaagtgttcctctattaactcaagtcaagccctttatcgttgttcacttctttatacacataacaaaggataaaagataatttttaggttttttttttttggaaaatttacaattttcgttacattaataagaattattacattttatatacaataaacataaggaaatggtgtgctttacaaaaaaaaaaaaaaaatggtatcaagttttgatttatatagcatagaaattcaattgcatcaaatataacaatttaaaaaaaaataaaaaaacttaaaaatatatatataaaaaaattcattatatataatagagaatgtcataaaaaaaactttaatttttgtttctttttcaaaaatgaaacattgaaataaaaaaaataatgtcaattgtattgtagaagctattttttttgaaactgaagcaatactaaaacaattttattataacaaatgtgaaaatgaagaacaaagagaatcaatatattagaagaataaaaattgcatgagcttacacttgagtcttgccaaagaaattagcctagaaaaggcattgctttacnccaaaattat

SEQ ID NO: 215857 - DNA, 751 bp, Cannabis indica
ctttcattttattttatttttcacgtgcagtgaggatacttttgttttctctacaattgttcatttttagtttttttagatttttgctaaaagaaattattagcaaattacacccataaaagaccattatggtggttttgtgatcataaatttacacggtgtgaatatttatacttacaaactcttttcactttttaaaaacaaaaaattgattttaaaaactaataaagggcctttggtcgaatttttaaaaaataatattttaaaaattgaattaaaaaaaaataataaacaaaatacattaacaatcctggggttagagatttggattcgagatttgggtaaagggtctaagtcagggttaagggttcgagttcattgtcaaggctttgagtctgtgtccaggttcgggtttgggtccaggcttggggtctggggtggagccaactcagggttcgagtccaatgctaggtttcgggtcagggttcagttcctgggctgggtttgggtcagggttcagatctggtgccaggtttggggatcgagctgggtctggggctaaaaccggagttcaggttcaggttcgaggtcaatgtccggagctcgtatcgagtaaggataaaaattgcacgcgtgacggaaaatcaacccgtggatatggaacccgctggtacccgcccctaatgggcggaaattctccatttaaatggggaatgggggcaggaatgggggacaactttctatccctaaa

SEQ ID NO: 215858 - DNA, 536 bp, Cannabis indica
ttatattatatttatattttttttccagacagtcaatattcattggaaataattaaagttttatacattatagagaaaatattataaaaaatctatccaaattaattcgtcatctatcttgagtgcacgaactgctaataaagcaaacataaattagaaatgctttaagaaaattagacaacaaactaacaatatcttaaatcattataagattaaaaaaaataataataataataaaaaaaaagaagatgcaagaggatgcaaaatcaaacctattattaaactccaactccaacttttttttttttagaaaagaaacgtgcattgatagataaaaattagacctcgtggttataacaaaagatgtttgctggaatggaagagacaaataaataactatactgattgtgggtaaaggcccactttatcacattatgggctacaaaattacaagtctaaaagtattagaaaatacacaaccaacaaaataaggagaagtcctttaacaaaatgaagagtagttcacaatttcccat

SEQ ID NO: 215859 - DNA, 792 bp, Cannabis indica
attgaaaaggattagacacttttttcttgtactatcttccaatgtaagtatgttatatttatataactagtagaactagttagaggcataatatatagtatattatatatcaaatattatccaagatttgatgacaaagtgaaaaaaataaagatagaaaagaaagtagtgacttgtaagacagggtgttattagcttgtttgtatgttcctatgttattttaataatgagttatgtgttgaaaatttgtatgtatatacaatgtcttatttagtttgaaactaattaggatatatataatgtgacattgaaatgttcttaaggttagagaagagcgtaaactacgaagatgctggttttgtctttaagtaagatgtccaaagcatagttggagaccattgtcttcttatggagttcactattagaatctttatcaaatttgattctaaaaaaagttgtttgggtaaatatcgttttgaacttgtgtttttataaaaatgatagatttgacgctctttattttgttatatgtttgtattttttaaaatagtacaaaataatacactaagtacaattttgattaaaatagcatttaataatagcttgatcttagaggtgttatgactagactgattatattttttttatctatttatgctagaagttagctttatgttggttatattaaaaaatcgactaaaattgagctcacgatattattttgtactattttaaaaagtataagttcaattgttatgtaacaaaatagagagtataatcgatgatatatgt

SEQ ID NO: 215860 - DNA, 652 bp, Cannabis indica
atttttttttctgtgttttgttttttttatcattattttactttaaatatttacattacattatatatccttttcactactgtatttttttcttctaccttaaataatatatataatacaaaatgattaaaatattatatttttatgttagtagggtaatcaaaaaagtcaaaaagaaaatattaacaaattttattataatgatgtgaacctatatctatatttacctaatgaatgaggtaaatatttgaggtattataaataattaattaatttagcttttctagtagggaattgatgaggcatcataataagtaattaattaatttgaggttacaaagagtttggggtaaacaatatcttcaaaaaacatttcatttaaaagaaaaaattgaatatttttaatttcataaggaaaaatttgagattttagtttattaaaaaaaaaacagaatatttttaattactaaggaaatttttagattatagtactgtaatatgataaaaaaaaaatctcaaaagttaaattagtaaccaataaataataaatctacagttataacacaattaataataaaataagtaataacttttaaaaggaaaataattattaaatttaaacatacatactaaatccttttaaaaaaaaaaa

SEQ ID NO: 215861 - DNA, 663 bp, Cannabis indica
  modified_base (97)..(97): a, c, t, g, unknown or other
gatctactaaatctgattagaaacttgttgctgcagaatacagatttgagtcactactacaaaattgagcattcccgggcctgtcggtcctcaaaanaattttttccgagaatcatcgctcttgttaagtgagtgtttaaaccgtcgggaaaaattgagttttcctgacggtttagaacactcgttatgggaatccgcgacgggttaaggtaaaaatgcagaatttttacggggttatacccgtacgatttaaaatcgttggctatagaattgtcgggtatactatagccgacagttttaaaccatcggttatagtaaacgcgcgtgatggtttaaaaccgtcgggtataacctagccaattaaaaccctatcttcttccactgaaccctctttcttttttatttctctcatccaccgaacccctctctccctcccaacgccgatcaccctctctctctttcgatctccgcctccatgtctcgtttatctcgccacccacaaaacccaccaccaccagtgaggaccaccgcctctttctctcctttgtctctcttcttgcctccctttccatctccctcttctcgtcttcctacccttcgcacgccgcgaggaccaccacctcctcctcttctactttttaaggtatatatatatatttatat

SEQ ID NO: 215862 - DNA, 929 bp, Cannabis indica
catagagtcgaagattaagacagggagaggatacgcatttcaaattgggaattttacagagagcacaaaaaagataaattggggattttttgttttttttttcagctatatttgaaaaaaacaagatgggtcacgacacgttccgtagttatcggtactgcttaagtcgaagatttgaagctcagtccgatatttcgaatcacaactgacccaccatgagtgaggcgcatacaatggtgactgtggtagctacggaggccgacgtgaagtggtagccaagagaaaatggagggttccccttaaaagactctcatcaatttctttactttatcatttaaagtatacccctaaaatctaactttttttattttacctcaaaattttactttacaccatacatcttaatgtacattaccatattttttaaaaattttaatacattttattcatttgaaaaatataatattaatacgcatacatgtccacaaataagaagaaaaattaaaatttaaaataattattaaaatatattattagaacaattaacagtattctttaaatataaaacatgaaaagtaaatttgaaaaaaaattaaaataaagaaaatatttagaacatttcatatatagtgtatttttagtttgactttgtaaataatttaaagcttctctatttagagcatgtgttgtgagtactgttctctaataaagaagtgaaatgattgagttccactcttatttaacaaataatataaaaaattatgaaataattataagaggtagcccctgaagatgtccaaaataacaatgtggaaagggatgaatgtatatccatatattatcaaaaaataatctatttcctcaattatgaactattatattaaattagatgatccgatcatctacaaaatcaataacaagatatggag

SEQ ID NO: 215863 - DNA, 1021 bp, Cannabis indica
ctcggcttagactttataatatttatgataagttctagaaacaagtgttttgggtttccactattcgcatataatgccacatggattgtggcagtgtcccccaacacccctcacttaactacactactcaattcctgagtaaagtgtaccaatctcccttgtaagctaattttggacccaataacttcagaattgggctatgactatgagacacgcttagatccgacttgaaattatgtttccaatgcaagtttaaccaggtcatgtggataaaaattgagagagttatgcctattttactaaggatagtttatgatgttttgtcccagttacgagcactgacatggccaaatggtcaatgctcggccatgcatgttctcggaccccttggggtgtgttctaacttattttttgatggtgagtcatgttttgggggtcccgggatcccaaaatctcatttcaatgtccgaaaccctaacgagagaccactgtcaccagttggagccagaaagtggcagtggttggccatagcttatggaaatccatgtatggtgtttcttgcttatttcaatcacatggattctagaaaaccagtttggtcacattggttcttagacaatttcttaggagagcactgccaccatttttgccgaaaaaatggggcaatggttgcataaggggcttatgaagccttgggtgacttttctcacttttttttgatacatagatgttggaaatataatttgtccaatgaaactcctcctcttatgtggtggccgatcactgccaccaattgtcccaaaagtgtggcagtggtcggccaagtggtttccacaccacttggttttgacatattattgatgaaaatacatacttggcaagaaatctcatcccccttcttcatggccgaccactgccactcattgtgccacaaagatggcagtggacggctaggcttgttcttggtagaaaatggtttctttcacatgtaatttttaaaataccttgtttgattatttat

SEQ ID NO: 215864 - DNA, 525 bp, Cannabis indica
ttgaccaaaatcaatctcaaagtatcatcaagtttattttgtaaaacaaagaacctaaaattaacatttaacaaaataaagatgatcaccaataattttataaaataaaactctaaaattatatttattttattacaaaaccgcgcaaagcgcggttatgtttactagttagaatataatttacttgattccaagagtattcttgaatagaagttctactgtaattgtatgtaactataaactattattgaaaaataatataaaaataattaaaattataaatgcacatatattttattaatttactcatcaattgcaataaaataaaaatataaagtacgaatttaaacccgaaaaaagttgtctatttaagaaaaacaagtcacccacataaatcacaatataaatctagcacaacatgatactaccaagctttcgggtatatacgctgtgctgcgcctactaaaattgttacacatctatatttttatgcacgactctaatttttttatggttaggctctca

SEQ ID NO: 215865 - DNA, 849 bp, Cannabis indica
agctgcagagcgtcgccgttagtgggagagtgatcttaccgacatttagacgacgaggaagttaaaggaggacagtttgttagtgggtcttagaggcctgggacttgatcttacccttccccttctcttgagtgtctctggctttggccaaggtggcggcaatttttgttactcaacgacttcaacatcctagattctggagtatctacacacataactgcaatataagcaaactataaaataaaaaggcaaagtcaaagaaaataaaagcacaatcataaaatagaaaaatccactaaaaatacttgtgcatgggtacaattattcagtgagctgctataaggttccttacgagcaaaagaattatatctccttgatcaaggaagctgccatattccttcaaattaggcaatgacatgatcgtgaaaggatcaaccctaacactatttgaggatgccttcagattactagggctcctaagaattctgtctactctatctatagaatctttcatgggatatctatggtggtctaaacttagaaagtatttatcaaagtgctagctctcggagtccctacgtctagatatgcaaaagcaaatctctcagagatttcctcctccccagatagggaatttggatggtggatcagccaatcagacttcaggggtttctcctctttggaagcctcaatgataacgacgactagatctgttgcaatggcttttttcacctctataagagcctggcattatccccagaggttaacaggattaatgttctaaaactttgtaattatgctagacctacatatcaattcagttgtgaccaaatcctcaacctttaactg

SEQ ID NO: 215866 - DNA, 623 bp, Cannabis indica
agttcagttgaagagaaagcaccctttttacagggaactcagaggaaaagaaccagtactctcgaagatcatgagtatggtcagtgtggctaactaggcagtaagagcccgaacacttttccaaccttaagaaacctaacatcttcttgtttgccctcatggggttagcctttagactgtaaaagtaaaaaatatccttcaaggaaggtacttccaacttgttcatcttgcagaagacataccacccagtcagaatacaatgaggggattaggtagaaaggagctatcgcaatcttggacatcaaattcataaaataggcccttaagaggagatgtactccattagaaatgtgggaccagctgtaagcactgaatccctctatacaagtggacactaattctcttgttgtagacaatctgtgccacatcaatcttggaatgttgcgaagaccaccaccatcgacataggccgtcaacattccataggagcagaaacacctggccttctgatccatctccaagatggagcattgaaagcttgtgtagttggggggtctttgccctcctttttcctttggcttttgcggatagtccttcctttatgataggttcatcctttggta

SEQ ID NO: 215867 - DNA, 822 bp, Cannabis indica
ggaaaaggatccatgaaatctatccccagacatcaaacaactctacctccaagatacatgtcaaaggcatttcgtttcttctagaaatattccccattttctgattacgatcacatgccttcacaaaaccattagcatctttaaaaagagtaggtcaatagaacccgctttgaagaaccttagcagcagttcttgtgccactgaaatgccccccacattgtaaggcatggcagtggttcaaaactgaatacatctcttcttcaggcacacatcttcttattatctgatcagcacagtgtttgtaaagaatcggctcttcccaatagtagtgcttcacctctgaaaagaactttttcagctgttgatgagacatctcagggggtgtaacatttgtagccaagaagctgacatagtctgtgaaccaaggcaccatcaagctttccctcaaactaaagagttgctcatcgggaaactattcatttatgtgcacctcttttgcgttttggctctcttctaattcaagtcttgacaaatgatcagcaactaggttttcagtcccatttttgtcttttatctcaatgtcgaattcttgaagcaaagcaccaccgaatcaaccttggctttgcatccttcttggtcataaggtctttaattcaaagtggtctgtataaacaatcaccttattcccaatcaggtatggccgacacttgtcacacgcgaacacaattgctagcatttctttttctgtggtggcataattcagctgaacatcattcagggttctattagcatagtagatggtatgaaacacactatcaactc

SEQ ID NO: 215868 - DNA, 802 bp, Cannabis indica
atgaataagatataaattaggtaaataccattttagacccagtgatttgtaaaagttacaaattagaccctctattttgttaaatgataaaatggatcctgtattttctaaacttgtacaaataggactctgaactgatttcttgtcaaaataaaacttaataataatttgatctagagatgttatgataaaactggttacattttctgtatctgttcgtattagaaattgtcttaaagttgattatattaaaaaaaataaaattattaaaaattgtgctcagagtcctatttttaccattttggaaaatatagggttaattttatcatttaacaaaacaaagagttcaattagtaacttttgcaaaacacgaagtctaaaatattatttacccatgtaaatttcgtttgtgattttttttagtctcttcttaattaaaatataaacaaaagttcaaaataacatcaagattcatattaatatacgtttaattgatttttgaataataagtattttctctttaatttttttacactattataaattgggtttcctatgatatacgacttgttaataatattagggctgaacatttcaacccaaaaaatccacccactcggcaaacccgcccgacctgaacccgtaaaacccaaaagaatagggttttaaaaaatagtgatcaggttcgggtgtaacctgaaattattaccggccaggttcgggtttgattaagttgacacttgaaaaactggtttacactcagacccacccaaaaacccgaaaatattattattattattat

SEQ ID NO: 215869 - DNA, 660 bp, Cannabis indica
agagtaggaagtacttaattcttatcagcaaaaaatgatgcatactcagaattaatacatgaatacgtttcaggagcaattcctagcttcaacatgcccgagatggcttcgaatctaccgatacgtcctcctagcacttgtacttcatcacaagttgccccctcccactcattacaacgatgacgacgacgatgatgatattgatttataatttgaatttactttaccaatttcagtgtaaatattactaatttttataaactataacaatgactttttacaaagttttacaatgtttaatcgagttttttcataattataatatgaaattctagttttataatgtagttgaaattatattattgtattattattcatgaaattttagatttaattgaaatttgattataatatatttatattattatatcaaacaaatatttagaaaaaaatgttagtgaagttgattgcgctagcaaaactttcgtaggatgtcaaaaattggcacgaaagttttgccagcgacttagttcactgataaaacttggcgaaaaaaccctcaactgacaagacaatgtcggcgactggatttatgctgacaatgtaattcatcagaaaaagtgattcttattggcgaacgaactaaattcaccaaaaaat

SEQ ID NO: 215870 - DNA, 539 bp, Cannabis indica
ctaaaataaacttataaataataggattaatagagataataattagatatgcttaaaaaaaaaaaaaagataaagaataatagtttgtgtggtatttttacttattatgtatacgcaaagcaaacacatattagtgtaattatttaatttaaaataaattatattattttaatatgaaaaatatagggaacttctctagtagagaaggaggataacatgaaaaaatattcaataaaccttatatatattatgtaattgcaacatcaaaaatttgtagagatcaaatatctaaaattaatgaacaaaactcatccatttatacaaaaacatatataataatataaactcatcttaatttcaactttactattattatcttcgtagccgctagctcatctctccaattagtcaagagggactccatgaaagacatgctaactaccaaaaaaaagaattcctatctctacaatttttttttgtgagaaattagctagatgggcatatgtatatataggtaaaaattaatatgtataggaaga

SEQ ID NO: 215871 - DNA, 741 bp, Cannabis indica
ataattatcagaatgaaggaattgctggagttgagaaagatagatacaaggataggcttgtagcgaagagattcactcaaaaagaaggcataaattatactaaaatatttattccattggtaaagtaaacctcaatacgagtaatattggccaaggcagctaagaataggcttgatgtagaacaaatggatgtaagaacaaatggatgagccaacctgaagggtttgaaagtggcaattcaggacaagtttgtctactttagaagtttctctatggccttaaacatgcacctagacaatagaacaaaaagtttgacaaattcattactaaaattagtaacaagattacatacttactctgtattttcctctgccatcttatatacatataactaagttaggactgtcactgttagacagttatgttagttaggttgttcctattctttaggataggtagttatgttggttattgttgtccaccgacctatgtggctgtgtatatattcttttactgtttgtacacaatgaattcattcaattcaataaaccttttactgcttcactctcttccgcaatatggtatcagagcaaggaagacatgcttcctttcgattctgatctggttcagcttatccccgccgtgtgttctcctctcttctccggcgacgatcacagtccgtaatgttgaattcatttcttcattgaattcttcatcgacttattcttctcttcttttctt

SEQ ID NO: 215872 - DNA, 847 bp, Cannabis indica
ctctaattaaataaaataaaaatacttaccgctaactaccccatagaggatgatgaccaaactaaatcatatatagaataaaatcatttgcagaaattacttacgaccttgtaaaagatttagtgaaagaaaattagttgggacaataaataaaaccatttgctaggtagtttttttttttttcagatttgaaaggttgtttgaataaggaggtagaaaatcttagatctgaaatgttgtttattatttcttttggtgaatctgacgacgtagacaaagtgaagaagaggatcgtcggtgccagagctcgacttcatctggacaatgccggagttagagttgggattcatcagaataataaagggatacaaaatcaattttttttattattattttagttagatttttagtattaatatttctttatttgtttttaattttttttgtataaaagaaattttctttttatttttaatctttaaatgattatttaaaataaaaaataaaaataaatccacttggaccaatcataacgtgccatgtaggtactgacctgtcacttaacgtccaggtacctacagaagttccaagaccctaacagaaggtatttttactgccaaaaaaataagttaggtatttatctgcaactaagagataaacttacgtatttacgccgcaaattactcttattattattttgaacatattggataacatagtaaaatttttatattgtaggttgtggatttaattagcaaggattcaatttataaattgaagtgaactgaagtttggtggtttattaaaagaggtgtgtacaatcactcatttctttacttaacgacat

SEQ ID NO: 215873 - DNA, 699 bp, Cannabis indica
atatatatttatatatgaacaaaagaaatgatatcaaactattacaacaattaataatatctctaatgaagcacccaagataagagtgatcaattatacattggatctgcaactggttttggttgccttagctatagctgttcttgcaagcatgggattaattttgccttcatttgaggggtatatataattgtgcacaattatcatttcttaatttaagtgtctctgaaatagtaaaataaaagaatttatagtttacaaattatatttagctcctaataacagctaacagatatttagttgtaataaactaatgaaaattgattatatggtcgtcattgattgacatatatggcccacaaaatcttgatttaaagtgtctagaaaattttgaatttacctcttatcaaatcatcatgagtttgagtaataatatatatgtatcgtcacaaagccaaaaggtaaatcactaaaagaaagcatatccactctcattaattgacatgaataaatacacaccacaattagacttcgtcatgatttgcataatttgatatatatttaactaactctcttaccattttttaggtaaagatgattttaccattgaatttacgttgactaaaaagataaaaagaaaataaaaataaggtgtatatatatttagcaatttcataatattcaatttaaaattaattt

SEQ ID NO: 215874 - DNA, 710 bp, Cannabis indica
attagccatggcacggtattcggtatgagcggaagagcgagaaatcatgttttgtttcttggatttccaataaattaaagaatctctcaaaaaaatgcaataacctgtgacaaaacgtctagtgtcagggcaagcaccctagtcagcataaaaatttttttaagttgtaccttattgagagataagttactctcggtataggccttgagttgtgtagaagtagagtggaagaataatccttggcccggggaacccttcaaatattaaaggatacgttgagcggcatgaagatgaggttgccgcgaagccaaaagaaattgacttaacctgttgacaacataagaaatatcaggtctagttatggttaagttaatgagttttctaatcaaacttctataagtggtagggttagaaagtaactcccctatgtccttgcttaggtgagtattaggttccattggggtggaagcggatttgacaccaatataacctgtatcatttaaaagttgtaaaataaatagtctttgagagacaaaaatactattggtggatctcccaacttctagcctaagaaagaacctcaaaggaccaagatctttgagtttaaatttggaatcaagctatctttcaaacaattcagcttcactagagttattgatagcgattaaaatatcatctacataaactaaaacaacaagaaaagtgttgtt

SEQ ID NO: 215875 - DNA, 672 bp, Cannabis indica
gtttacggtgttgtggacggtgggggcggcattttgggcggtggtgaagggccggcgctttaggcggtggggagggagattgggggttatggttcggtcggttgagagagagagagatagacgaagagagagatggggaagagagagagagatggggttgaattatgagagggatagtattggatttagataaaattgtcacatattttcaattttcatatgtattcaatgacaaaaaaaaaattatcgccaagcaatgcatagataatcaaatttcccctttttttggcactgttcattatatttataatatcattaaaaattttaacaaagaatttagacgataatgttgtaactgagattgtaattaattaggaaaaaaaaaaaaactagaaaaggagaaaggaaaagaccagtaaaggttggtggtgagctctttggaagacgaggagtggtcgatggcccagtctacatgacgacagcagttgtcgcgaactgcagcgtatttcaggctcaagacgaacacgttcccagggggcgccggactggtctttgatggactcgcttattcttgtcaatgagatcgccgccgtcgaagccgattgctccaaagtccctatcttcctatcagaaatgggtgattatagctgagaattgcaccggtttgaacgt

SEQ ID NO: 215876 - DNA, 519 bp, Cannabis indica
tttttttaataggagttattgtttcattttatatccatacataatttatttccttatttatttatttttataattatttgtcaaaaatattcatatccacaaaaaaaaaaaatattttttggtgtatatgatatgtacaacattttttttttttttttagcattattttttgacttcgccattaaagaattttttgagccttaacttctatttttcttttaaaagaaaaaaatatcaaacctcttagttttgattatagtttaggttttatgataagcaatttttaagaacttttttttttaaaagagaagtgaatgatattttcttttttttttaagagaatgatagtatttttaacaaataattataaatgtaaaaaaaaaaaaaataaagaaataatatttaatagacataaaataaataatgacacatattaaaaaataactctaacataaagtggtttttaatacctctactgaagcattatcctatatatacatatatatatatatatatata

SEQ ID NO: 215877 - DNA, 615 bp, Cannabis indica
tatatatatatatatcaaaatcctatcaacaaagcataggtttggataggcttccagacggaatcactcttataagtgagttcctaagaaagacatagagagtcacaagtggactacttaatctagtttcccatacatttctacttacgttgtgcgtataaccaacgctacttcagaagtagagcttccaaccttgataatctgacacaagttgttgggaataatggaaaatatttcaattccccttcaagataaatatttgcaggaaaatacaatggggactccaaaattcttttttgatgtgaaacattagtcaaagctgccatcacagagaatatttagaattgttggatatcttccaatgcaaatagtcctttataaataataatcaaagcactaaatgcttcccaaagattatctcgtggcaaataaaaagtacggtaaaccttttgctataacaataaaatgggtgaacaatactacactctcaagtattgacaaatacttgacgaatacactcaaaactctcacactcaatagtgttgtaatctcactatctctttacaaaatatttctcacaattttataggaactctcattttctcactctaaaat

SEQ ID NO: 215878 - DNA, 966 bp, Cannabis indica
cttacttatagtcacaataaaactagtgactaattatcattcctacattcactagcaagaaatgtcactttttccagcaaaaagtcaaagttttatcatcgcacatttgtagcgaaaaaattctaacttttaccaccgcatttacgtgctggaaaaagtcatttttgccagcacttttcattttgcgctaataaaagttctaataccaacgttgatttgccaactccttttgccaacacatcaaaagtagattttgttttgccagcacaaaaatgtgttgataaaaatgacatttcttgaagtgtgtttgtgactaaaagatctgtggctaaatacattagtcacaaaaatcacaatttgttgtgactaaatgtgtatttaattagtaacaatacttgttgtgactaaaactaaattaatgacaacttgtatctaattactatgctataattagtcacaagtaattgtgactaaaagtcacaaaaaaaattatattgtgactaaaagattatcactaaagatgattttttttatagtgttatattgctgaaaaaaatattaaatttacgaagcttacaaactcgaaactttggatacttatagagtgcttttatatcaaatgatagattaatttaatacccgttttacttaaaaaaaaaaaaaaaaaaaagaaataacaaatttgatgatgagttcctaatcccatttccaattcaatatgcatattgcataaaaattaaaatatatatatatacatatagtcttcattgatacaatgatacaagattcagaggagagcttaataaaaaatttgttagtatattgtaaaaatgaataccgtaaaatttaagtattgaaacagtacatgcattggctatgtacgtatgtgcgtatatatatttacactatagtacgtacgtagtagtattattcgaaaaaattgttcctacaagctcataatactag

SEQ ID NO: 215879 - DNA, 798 bp, Cannabis indica
cccgaccttaactcgtaaaatgtaacatatattacatgtcgtgtaaagtcatgatatcaatctatttttgactcgcgcttaataatctcaactctaacctataaaattcatgtttgatctattttattgcttaagttttaagttatttattttttatttttgtcatttaattaaatatatatacaagactgtaactaattacatcagcttctaaattaaagaatctgtccatatacgaaatatcacctattttttttttttcattttcccttttggcctatagttaataatagttttggatagaaaaagatgatgtaattaactataataaaaacaaaatagaattctaggtacctaaaataaattaatttatatatatattatggtcacgtgggctttaaatcctttgtaaatacacgtaataagtcctatagtaatgtacgtataacttctaattatggggcacgtgttatatataattggaaaattttgtaaattttaaaataggtcaaacactttaatattgaaaactagcactagacaactaatttttttagtttgatttgtctttttaagcatattaaaatttggtaagatataattacagtaaatgagattttatttcaaaattaattaattacgtgaagtatatagttaattttattgatttatttattaagtattatggtattaatgaagttgagattgataaagatattatgttattttaaattgatcacatgttgaaaataatttcttacgacactactgaatttattgatcatgccaatttagtac

SEQ ID NO: 215880 - DNA, 634 bp, Cannabis indica
gacgaggcggaataggaaggcgaggaagcggcggcttggtccttcctctccttggaagacgagtgagacgacgtcgtagcggccttcttggcagccaaggcttgttcgggagtgccatacttcctgggtcggcctctcttccgcttggccggctccagcggcgacgtcacagcggaggggacggagtgagacgggtagaccatgtgggtcccatcgccgtccgcccgagtgggtattgggcaaaaggccgttggtcggagatgcggcggccgcagggccggcgccggagctggggctctgttgttgttgttgttgctgctgttggtgttggtggtggtggtggaggtgctggaagtagctgagttggttttcattgggttccattcctttagagagagaaacaaatggtagagagagtgtgtggaatgccaatttttttttatttttttaatgaaaattctttttttttactttttttctttttttactctcgtacatatctatatataattcgtcttaaactcatctcggccgttagatcagattttaggtataacctttttcatttctttcattttatttattttgactttctgaacagctcttccgattttcctatatataattgtattga

SEQ ID NO: 215881 - DNA, 606 bp, Cannabis indica
atcttactcacctatatatactagtgtattccctcataaacattaccctcaaaacaaagactcaaatacccttttatttaatatatgctagcccaccatactaatcccaaggcctaacattaccggccgcccgaaattcaccttgtcctcaaggtgattgatcaaatcactcgagtctagagccctatgctgtgtgcgacctctgtcaaagaaccaggttagtaatgtggtattctgacatgtccttgatgcaccattggctggttggagtagtgtttggcgccctctatcaaaaacccaatgcttgaatggcactagcaaagcaccaaagttatacttctcatccaccaaaggcatcctcagcgacacaaagtcaaggaaagaaaacttgccaaacttcattacagcacgaacacgatccaatatccccaaagcaccattgccaaaacttagtagtggagtgatagtggcattgacaccaacatagagacccctaacggttgatatactacaagggtagacccagtacatgtgtagaaattcttctattatttcatgttgatgttttgctttgtcaaaaaatgtcttaaacatattaaaaatctc

SEQ ID NO: 215882 - DNA, 561 bp, Cannabis indica
acaaggcgggaacagttgtaatcagaggtatattcaaaatcaaaggaaggatttgaagaaaaaacagttaaaaatcacaagagatagttaaaaagaaataacacacacagacccaaaacagggcacaaccatatactttctagatagatatctttgttagtagcattgcataatattgtttgttagatcatctagcttatattaaggtattcacatatatatatatatataatatagaaatctttggtagtacataatattgtttgtattcactaatatatattaaattttttaaagtatttttaaaaataattgtgtaatttctcagttatgtaattattataactagtaattatatatgttagtaattatactctatttaaaatagaaattgtgtttggatataagatagtaataatatataaattttaatgtcttcttttgattaaataattagtaattatataaaaaaataaattatttagttagttaataataaatagaaaggtatttagtaattacactatattcttatggtatctcataataattaagtaattc

SEQ ID NO: 215883 - DNA, 784 bp, Cannabis indica
agaaaagaaagaagttttgtcaagccccataaacaagaccaacttgatgagcatttggatacagaaaagggaaacaatggaaagagaataaattaatagtgatcacttggtcacaaataacttgcacctacaacagcttctttatatattaagttagacttaataacattggttcaagactaataagagacttattagtagtcatcaattaaggactaatacacaatgactctcgtaaaatcctctatatctttcagtgttaatttataaacctcctctatcattttcattatgctcttccacaaggtccaggtttgttatcatgcttctcacttataaacctagtgcatgttatgaggtcgagattgcaattatatgtctcttgatgtaatagtattttacaatcaattaatagtttaatagtttaaaagtcttgagttcgaactgaccataacttttctctcttttttcatctttccctcactactaaactagccttagtggcttgagattgcaattatatatgctacttctaaactctttcctcttattttagagcatctcaaataaaatgcaataaaaagaattttttgctattttttccagttatatttttttaaaaaaaatgaatgtgatagtaaattcaaaatattttaaatttgattacatctaaaaaattatataaaatttgtctcttattgtaactctattttttatcttttgtcaccgtgggtgaagcttacaccatggcccccctacaaatcttttgcttaggaaaattaac

SEQ ID NO: 215884 - DNA, 604 bp, Cannabis indica
ggtccagctcttggaggtttccttgcacaggtatatgttattagggtgtgtttaaaaattattctatacttattaaatagatgatcctaagattaattgaaccttaggtagcaacaaaattattgaatcctcttaaaaaaaaatatagtatttttaaaaattaataaaaagtatgtgtattatttttttaatttttaagcccctcgactggatgggccttaagcgtgcacctaacctactttagtcggcttgaccttggttttgttttgttgtgtaaactgtaatagtaaatgtgcattctagtagtaattatcttatgtttgaaaataaaaaaatgtgttcagataaaaaattgtaattacaaattaattcttattattttgttggaaaaatagttagtaattaatattgtttagtaattaattaatatttaaaatagaaaggtttttcacatgtatttgctagaatatgcttatctcagcacaataaaataagcatatattctatttatttattatggatctaattacacacaatgatttatttatttatttttgtgtttaatattttaattatcattaaattgaattattacagcctgcag

SEQ ID NO: 215885 - DNA, 1143 bp, Cannabis indica
tacaatacaaaaagaaaagaaaagaaagttagagagtgagagtgttagactataatatagtatatgaaaatacagcaatataaataaaacgatatgtaaatgacagaaaaaactataaacccatatcgataatatatgcaatgaaagatcgatatacctccagctattgatctttgagcttcaatccctcaaaagctttgatctgtgaagaaaactgattgatgtgggtaatcgagcttcctcgctctctcaactctctttagatagaatttgctgaatggaatcaaaatgagtgaggagcgtcacggggactgagaccctatatttataggtgagatactccatcagtatctgcgccacattaattgtcagaatattttgacaattaattcagaaaatcaaatcgggtaatgaatatagaaatctgaccatacatagaatattacataattgatgttgtccagattcaatgaatataaaatattcatttatcagaaaatcaattatttatttatttccttaaatagtaaatttatttctttaaatagaaataaatttccttaaataaaaatattcttatatgagagagataaacatagagagggaaatgcattgtaataaactcagatgactagtcaaattacttgtgattaattggaatctgctttttgtaattgatgatcgttgaaaatctgatagtgaaaacgagccaaggcgagctcgaaagaggaagtacctagcaacatgtcggagaacctttataaaatctggtattttctcttccttttactttcaataattgtttattgcttgtgtgtgttatttcagatcgatttagatctgtagggatttgtgtttggtttgatttaatttttggtttgagcagagctttgagtttctcgaagctctgcaagggtttcgagttctttgattatgtgttgcgtattgtgggggatcctcgattgttcttgggagttttgtgttttgatcaaaacgttgtagttttgattggaggcaaacgttgttttgactaggagtgaaaggtaaattgtgaccttaattgaatacctaatttgatttttgttaggtgtagggatagcttcagaatttcctacttggcagggaagtacaacataaactaag

SEQ ID NO: 215886 - DNA, 548 bp, Cannabis indica
tataaaagaaatagaaagacccagcaatgaacaactttggacgggagaggggatcgtcttagttgcatgacagagagaatcttgtgcttgtgaaaaaacactctctcaaaaaagagaaaatgtttttgtaaagtctttttttggcaagttagttgacaaaatattttttcttttatggtaagattcttgtgcattcaaaaccgatttcttaccttgtttattcggattgtagttgctcttttccttgttaggaaagttgcacttttcagctggactttcttttatttggaaacttcttaaaagagaagcaattctcttttggaaagttgtcttttttagggaaactttgattattgccttttccttattgatttcgattgtatcttgatacaatcagaatatctaatctgtttttggcaggaatcaagcattaatagaggatcggacccgattatagcaagtttcccgtttctggtctgatctgctgcgtcagcatccgaatctgatgctgcagatcgtgttcttttggaaagtttttgtacagctgc

SEQ ID NO: 215887 - DNA, 740 bp, Cannabis indica
caaagcaatataaaaaaaatattatacaaataacaaaaaatcaactacaaaataataagagtacatcataaaaatacatcaaaagacagtattttatgtaaataaaatctaaaaaattgtaaaagtatctaaaatttcatacaatcattttttttttttttttgtatttttctaaaatgattcctttttaagtcctttattaaggaagtatacttctatataaaaataattaatatattataataaaaatatatatagttcataaatttatttatgtagattaataattttattctaaattgtaaaaaatatataaatatcatatttactcaaaaataattttattatgatttagtattaaaaattatttattattattgttgttacatttaatacttatggtgttttgatttttttttttagtgtgtctctatttagttatatctctgaattaaaatataattttcttagtcccaaatgtattcttaaataaaaggttctattatataagaaatagctataccaatataattatatagagtattgaattatatataattttaatataataattttttataaaatattagctaactattctaaagtgttaacttataatggtgctacactaatgctaacactgacatcagatattttaaaatagtgattctttaaagtatttaaagacaaacaattagaaataatgaagacatgaggaaaggacaaagtaagtgtgacaa

SEQ ID NO: 215888 - DNA, 986 bp, Cannabis indica
aacataaacataaatataaatattttcacctctaatattattgacaaataaatttaaaataatatttactaattaaattaacttataattataattaatattatatttttcaaaatagaaattatattgcatcaacaattacttttataacatataatagattattcactctgacatgcaagtctttacaaacgttgaattcattctatatcatgtactttcaactttttggcaaaatcatatcaattctatcgttaaactataattaaattttatgtttaattataaattattttgcaatgtgtctatatttattaatatatattatttgttatttttgaaattaagagtgtttataaaatacataatttatttcaatctatactatttaatctgtaaagtacggatattcgcacttaggattagattgaaaaatctaaaatttacacttgcacaaattaaatgttgattagaagtaactaaatcaattcaatttacacatttatatatattttaagaaaattatttatataattaatattttaatgtaaaaaaaataataatttataaattgaatacatacgatacaaatatattttaaatcaaatgtattttttttttaaaagaaggtatgtatatttcattcttatatataaagaaaatataatctaatacaaaattaaacaattctttctacatataattttttttctatctttgaatttgttattttttttaattttatttatttgtaatttgttatttggagacattaaacaacaactaatttattttattttattgctagttatgtaaaaaaaattatatttttttttaaattaatttcaatattaaaaagtaataaatctaaattaataaccgagtcaatccgcacagtgtggattagaattttaattcttgtagcagattgagttggatttggatccaaaatataaaatccgtaactagtacagatcagatgcata

SEQ ID NO: 215889 - DNA, 670 bp, Cannabis indica
ttattttcctttgtaagtaagaaagcaaaagtgtccgtccaagtcaatgtcaagaaaaaaagaaaaacagttgaaatggtgtcccgcggcggagagaagcttaaagggaagtttttgtagtaaacccaaaagatcgctcttataggcggacccatacagaaatgagagggcattttaatttaataaatataatattaattttaatgtaatggttaaactagattgaatgtatatgatagaatttttattttacttttgtccctattttaaaaaaaaaaaaaaaaaaaattatgccctttcactttaaattttgagtccgctactagtcgttctaataaaattctttttgttttgacgttgagaaattttttttagtctaatttattactttatatactgtttttttaactttcttttttttttaaaaaaaaaatttacggtttgggtttttaaagtggttgcaggattagttgcaataggaatttttataagattttttttgttgcgatttaagttgcagcactagttgcaatagggtttttttatgtagaattctgtaaaaatgtaaaaaaaaatatttagaagtgtaaaaataaaaatactttttttttataatcgtatattgtaactatttaaaactacttgttaaatttttaaaaaatttgaataa

SEQ ID NO: 215890 - DNA, 626 bp, Cannabis indica
tccactttaggtgtttgttcttctattctgactttgttctaatctctagttttatattgttctcttcttctcctctaaacactcttatatatactatcatatatattatatctctaatatataataataatatatatattatataacatactatatacactctttatatatatttgatatctctactatatatcatctattttatatatattctatatcatatatatactatattatatatatatatatatatactttatatagtttacatttatttgtatctttaagttttgagttgtaacacttttcttttatttgttattttgtcctttgaaattgtaactgtttatttaatatattgtccttataatatttttgttagagttgtaattgttttgattcttttattcatcttattttattcttcttacaatctcatttatttctaacatttttatgggttgtattttaaccaaacctattatataacactttattgtcccttttaatggtggtattggtgttctttatgcattcattgtgagttgtgatttgtgatttgtgtatctaattagcgtaaaatgagttgtgtaagctaagtttgtatttcatatagtttaaatgag

SEQ ID NO: 215891 - DNA, 661 bp, Cannabis indica
ccattagggaagtatcgagcttttaaaaattctccttttgaagcttttttctagaacaacttctttcgtaaacttttgttttttttttttgagatagcttctttggtaaacatgaactattaaagtaagacttaattgaaaatatacatgttagaggctaaatataggtgggtattaaccagaatcatacgtatttaaccaaaaccttcgggaaaaagaaaagaaggaaaagaaaaggataaaggggaaaaagagaactttgcttttgtttgtatgtgggccaagcaagcaaagttacacaagtcattataggtggatccaaaagaaaaatcatggactttaaagaatacttctttgaaaattctagctttgctttttggatcacttttatctcattagagccttcggaaaaagtatttgattgaggcatctaaaatttcctatttccaaagggaattattggaccacatttcacacagctatgttagatgccttattcgtctttccattttcctgggttatatgttttgtttttctttacataaatggaccctcataaacccaccaaagtttatacttacttgcccatatgactttttttttttgggctcataagacattcatcattcatccttgagtttcttattttttatttattttt

SEQ ID NO: 215892 - DNA, 584 bp, Cannabis indica
gccttctttaaggcttgatccttaaagtccttcagctccttcacctccacggtcaagttagccgtcgacaacaagtctgcctagtgcagctcctccatggattttaacttggcagcctgctcttccatagcttccttggcttcccgcagctcccgcttggccttggccatagctttgacctgaacctttagctcctcctggtgcctcgcctccgcctgagcctccctctgctgggcctcctcccggaatgccctcctctcagttgataggtcccgcagactcttcacagcctcatccatgcccccaaattcgaacatgacgtacctgtggtcgatcagggtctttgagaggcggccggtctttgcagtgatctaaaaaaaagaagcaagaaggagatcagatgccttaagacaaaatacaagcaaaaggagaggaatggatcgcgaaaacttaccgcagccagggcagcgctgatatcctgaacctggtaaacaaagttcactgagccacaagttgcgtatctcttggcccggaattgactcagatgggagacaaaccggttggtcatctcagaggcaaagggg

SEQ ID NO: 215893 - DNA, 503 bp, Cannabis indica
catcatagaagaaggataaaaataacgatgatgagctggaagacccaatatgcacaaaaaaaattattttaaaatattctctttatcatcccacaaaacaaaatttaatatttttacaatattttacttaaaaactcctcattttaattatatattttactaaatcaatagacaaagataaatttaaatatttaattatggaataaattagtcgtatggattatgacctatcatttcatcattacaaatttaacatccacataatttgttcaatattttatctaaatatttcatattgaaaattttttacttctaccatttttataagtccctcatcaaaaatagataatgttgtgcaatcctttttatattttgtcatcctacacacacttttgtaaagaagaagatatgcatttcaacaactatacaaaacaaaatataaaatctttcataaataacacataaataatttgtaaattgttatttttgctgaagaaaaaaaa

SEQ ID NO: 215894 - DNA, 594 bp, Cannabis indica
attcttaatacaatgttgagatattatcaatattagacctaagattgtcactaaatatcaatattcagtaaaataaatcttattaagtatatatcaagaattatgctgtgtggtttggtttgaaccacaaacaagaattttaaaaccgtgaccgaagtaaagaattataaacggtccaaattgatcaaactattgacatcgaattcatttagcctgatcttaaataacttgatccggattaattggagtttgaaaccacaaattgtgaattatatagaattttctagtataaataagagatccttcttaccacatctaataacttagttgtctatctaatatttataatttataatttattatttatacttaaaatttattaatttatcaaattaattagtgaagtctttttcaattccactaaaatttcatcagtacaacaaagattttctaacctactcaaattttaaacctgtaaataacactaaaaatagtctcaaaacagctaaaaaatataacacaaatcaataacatttacaaacacaaacaattttctttgtattaattccataaaaaacacaacctcaaagccat

SEQ ID NO: 215895 - DNA, 700 bp, Cannabis indica
ggatgttagcgcggttaccaacataaggatgtgttaaatgaggatcttctctttggagatgccccctgtatatatattcaattggtctttccccatggtgttgatgattagtagattgtgcttgatagggacaagtttgaatgtaagtattttccactggctattgttcggtgatctgatatgctcgcctgatcagcacggtagcctacctagaacaattgtcagttatttcttgttgagcacttatgatttccatttgttcatttatccatttttggaatgggcacctttgttctacaaaggaaaatttacgactacttgggtatcttgctgattgtaatgaagattgttgttatgctcttgtattttccctagtacgtaactcgtaaattttgtatttcagtgtcatcaccgatcgacctttgagaatttttagtagatggaattccagtactatggccagtttgctcaatccaagtattagtggtttcagtttcttggacgccttgagttaacccagccagaggggtggtcactccttgccctactgtttctgggcctattggtgaggattagttaggtcaggatctgtcctgaatggatctctaggattcgcaagtgtatgcacgttaggatatatagccattggatcagtagttgatctgtcctgaaaaagcttaaaaacaaagacttgtgcttc

SEQ ID NO: 215896 - DNA, 694 bp, Cannabis indica
ctcaccttagctctcaccattcatttcttcaagagggttttcgaggtaattaaacatattattattattatacaaaataaatcttttttccttttcttttctgaatcgttattacattttcttttcctaaattaatttttgctttgagttgaaattctaacaaggctaacattgaaattgtgtttttttaaatatgaaaaaatagttgttctcaaaaaaaatgaaaaaatggaaaagaataagaagctacatatttaatataggtagatgacattaattaatgcgttgcacatgtatatatggatacgatcatacgagtaacgatatctgtaaataggaacgttgactagttatgttatgtacattggttactgtactgtacatatcgggcaacttccatcataaaacttaaattaaccaacactaacaaaaaaaaaaaaaaaaacaaaaaaaaatacagcaccaaatattatttattctaacaataacactaaaaattattttgtttatcattattttatatttttaatataataagaatattaatttaatattaaacaaaaataatatatattaaagttactgtaaacactatttttttggtcccaccttataagtcggacacttaattaaaccacattaaaatattttttcgtctagtgggacactatagaaaaattaaaaaaaaattaaa

SEQ ID NO: 215897 - DNA, 687 bp, Cannabis indica
gtattacagatcaagattatgaccattacccaaggaaaagaaatgaaagagaaatttggtggtttggctttaagttttttattatgttgaaataagtttaaaaagaattaaggtatgggaaaatgggcggcatgaacaaggcatttacgattatgactgactatgagatttttatttgtttgctaaaatagagaaaagaaaatagctgtattgagagagagaagatccaaaagttatacctttatttttacaagcgtcgagcttgattttgtggtcagattcgaccaccattactgatatttgcccgtgcatctgggcagagatataggcgaagcgcaggtcgcgcatctgggcagagagagaggggaggcgctccatatgtctaggccgccagagaggaagaaagagaaaagaagcataggtgggcgaggtcgccgggggtggctaggagttctgcggcagctacaggagagagagaggcgagataaaagaagagaaaagttaagggtttttgttatgtggtctgatcgtttaagaagaaagagagagagaggtgataattatataaattattttttttatttgtatttttcaaattgtattttagttggggtcagataactttttgtttatttatttattttaaattacagctgtaaaaaagtagggtattgatatagtgacgcg

SEQ ID NO: 215898 - DNA, 384 bp, Cannabis indica
aaatcaaacttccaaatgagagccaccaacatgaaccccaacacgatacggattgtaatggaaactgcataaattgtgtaattcttcatcctttggaagattgctcggcttgtcaacacggcgctgataatgacactcagtcctggctctgtcaaaacaatgtcagatgcacttctagctgcatcagttgcatcagcaacagctataccaatatctgccttcttaagggccggagcatcattgacaccatctccagtcataccacagatatgcttcctttcttgtagcctcttaacaatctcatacttgtgttctgaaaaatatatcaaataagtcaatactagtaaataaaaaaatgccatgaattctcattatcaataatac

SEQ ID NO: 215899 - DNA, 766 bp, Cannabis indica
gccacaaatcgactttacaaaaatctgaagaaaagaaagaagttttgtcaagccccataaacaagaccaacttgatgagcattggatacagaaaagggaaacaatggaaagagaataaattaatagtgatcacttggtcacaaataacttgcacctacaacagcttctttatatattaagttagacttaataacattggttcaagactaataagagacttattagtagtcatcaattaaggactaatacacaatgactctcgtaaaatcctctatatctttcagtgttaatttataaacctcctctatcattttcattatgctcttccacaaggtccaggtttgttatcatgcttctcacttataaacctagtgcatgttatgaggtcgagatagcaattatatgtctcttgatgtaatagtattttacaatcaattaatagtttaatagtttaaaagtcttgagttcgaactgaccataacttttctctcttttttcatctttccctcactactaaactagccttagtggcttgagattgcaattatatatgctacttctaaactctttcctcttattttagagcatctcaaataaaatgcaataaaaagtaattttttgctattttttcctagtatatttttttaaaaaaaatgaatgtgatagtaaattcaaaatattttaaatttgatacatactaaaaattatataaaatttgtctcttattgtaactctattttttattcttttgtcaccgtgggtgaag

SEQ ID NO: 215900 - DNA, 941 bp, Cannabis indica
ggtgtggaaaatggagaagaagtaggtgggcatatagaaaataaaaaagaagtaggtggacacatgagaaatgtggcgagaagtaggtgacgatcgattttttaatgggcccttatacctgacggtttaagggcccaataaatttacgaattccaattaaaattgtcgcctattcttgtaattactgttataaaccgtcgaaaatactaattttttctgacagttgtaaacaatacttaattttttaagcgacagtcatccaaaaacaccgtttttaggaccgtcgcgaattctgacttttgtaattaatagtgggactaaaccctcaccatctttacttttggacatttttccaaaaatcctaataagtattaatgtagtagtgtccatttttatatacccactatatataagtttttttaatgaagaaaaagaagagcaataaaagaaaaactagtagaaaaataacccaatcttgaatctcaaatatgtttcctagctaggtaatttagagttgtgaaagtttagtaaattaaaacataagtttatttagggcatctctctcatatcagtcgcaactttaatgtttaagttcataaattaactaagcatgcccttataatagacaataaactttatagatagaaaaaaaccccacctcttgtgtaacttttattactttaaacttcatcagatacccttacaaaaaaaaatctgatctcgtattttttaaagagaatgctaagagacgtcaaacaccacaagaggtagcatattattattagtataaattaatatcgcgtcccacataatttcatttaattaataatgatataagaaattattaatcaatcgcatcatgctaccagggttggccctgaaatttagtgggtcataggaaaaaaatatttttaggccctcatttagaaaaaaaaatgtgg

SEQ ID NO: 215901 - DNA, 728 bp, Cannabis indica
taatcacaggtctagcccgccttagcctaggaccggcccttgtcctgatttgggctggtgtcgaaaccaaagttgaatttagtacaattttatttaacctatcaatataaatcaatatcaaacataatattatattaaataatactatacaatactatataatacaagagaaacatgagatggtgttgcagccaaagttgcaaaggttaaaccattagcataagcaaagaggatgctgaaattaattttgctatattgatcatatcattgctgataaaattggaaggtagcctcattcaacactagtgaaacattgtaatcttggccattggcatcgaacacgtgatgagaaaatgggaaaactcttagcctggtaagatttagtctagtatgcaataaggattaatatgtagataattgtacagaaatcagccaagtatttcaaacggtggtacccaaaaaaaagtagtcgaagtggttctactatcaattacaatcaatcaaaaatatttgtttcaaaaaaaatatgtcggtgtcaagttttgacatcaattcaagtatagggatacataaaagaaaaatattaaaaagcactagtagtacttagcacatttaagatgtcatctcactattattgtaattatgtattaatttcctcacaatttagtttaataatattataaatatgttaattattgttaagcatcacttcaagatagtgctaacat

SEQ ID NO: 215902 - DNA, 830 bp, Cannabis indica
aataaaaaaaaagtaaatatttaacaagtttatcaaatttactatatatataattgagtcacgtcaaaataaaggtaattaccaaaaaaaaaaaaaggtagtacgcaatatctaaagagccactagtatatgagtacaattcttcccacttatcaaaataataatatttaaaagtagattataatggtacaattctttagcacaaaactttgttaatgtagtgaaaacatgttttaaaaaatatatcaacattgcttcataaaataactagataacatacaattagtaactttaattacttatgaaataataaaatattttttaataactaatgaaattgattagtgtttttattttgtttaagcttaatttttttttattaattaaattaaaagaaattaaaaaattacttttgattcatgaattatcttttttttaatgccagtgaaaatatatatactttccacatattaaaataattacaataatcctaatggtaaaacacttgagagcaaataattaataatgtagttgatcattgaaaagatttttaaaactataggaaaaagagagactatatttgatgtgtcccatcatttttttcacaaaacaaacaataaacaagagattatttcaaaaaaaaatagtcttactattataaagtagacataattgtgtaatatttttagactattttaccctctattgaaataatattttcaaatttttcatttttttttctttccttactttatattggctatttcttttaaataaaacttatctttttttttttacctttcttactctatattgttaaaaaaagtaaa

SEQ ID NO: 215903 - DNA, 695 bp, Cannabis indica
tattaagtctatattatatttctgttttctttccttctttacaaaatctattatagtagttttttcaatctataatatgcaatatagtagtttttttcaatctataatatgcaattctacccgattttaaatgattgagagactcttaaatcacatacaatttttacagatgtgtaagtaattttaatcatacaattaaaagtgatgtagtctctatcaaggtcgattttgaatttagtgagtcataagaaaaaatactttaggtccttatttaaaaaaaaaaaattagtagttctaaaaattagaaaaataaatgtgcatttttaaacaggaataatttttttgggcccctgaactatgtgagtcctagacacaagcttaacccgcctatattgagggtctggcctagtccctattcaatgatataaatagtttatatttatacacatcattgtatataataagtgtgtatctagcattactcttgcacaattttacacgattttaaaaagccaatagagaattagatttgagtgtaattgaatgtaattatacagttttaattatttttctgaccacgtgaaattgcattatatctgtgtaattataggtaattactaactattttgtcaaataaaatattaggaattcataagtaattaccaatacaaaatcatatccaaacagacattata

SEQ ID NO: 215904 - DNA, 785 bp, Cannabis indica
attttaaatgcaatgttaaaaaaagtacttcatattatatagccacatttaatatatataaaatataaaataaaagatgaaagacaaaagagatgtatagtaaatttaaattttaatgttttaaaaaagaatgccaatttttgttatataaccacatctaaaatatcatagatgtatagatttataatttaaaaagaaaacgtgaataaaagattatgaaggatttttttagttgtatataaatactatttttaattaattaattaattaatatttataaacctaataaaaaataaaagaattaaagagataaccaataatattatttagagagattctagtgttatgtgaccgctttttaattatttttttttttttttatatataaatatataacattcatttactgttatttattttgttcttaaataacaaatttttaagctaattttttttaccacatttctattattttcttggaaagcttgtgaagtctaatgttatggatctttttctcaaccataatcatattagataaaattaaggtttagtatttgctacaattaataactttagttactattaatttatgtgaacaatatcaatcagttgaccattattattacttggccaagctactaattcagagggagagtcaaagtggtggaatattttctggcaacttcaccccaatgaaggctaatctttctaagagagggattaatattaatactgatctgtcttgccctgttttgtggttcccatatagagactacaactaatgc

SEQ ID NO: 215905 - DNA, 530 bp, Cannabis indica
caaagctcatacactgcctggcgtgccctcgaacaacgctatgccagtcagtctaaagctcgtattctccagatcaagtctcaactttcaacaattcagaaaggaaatctttccatttctgactatcttgacaaggtaaaaattcttgcagattctctgtcagtggctggtactccaatggaagaaaatgacttaataatgcacttgctcaatggattaggtcctgaatttgaccctgttgttgtgcatgttactagtcttgttgatgatctatctcttgaatctatccaatctttattactaacgcatgaaagcagattggaaagacactacaacttagctgattctagcaccaagatttcagcaaatcttgctgttggttctgccagatctgcaactggaactctcaatcgattctctgcaccaggacgagccaccaattctcaatacaacaatcgtgttccacaaagaaattttggccgaggtaccttcactacacaaagactaatctgtcaagtttgccacaaact

SEQ ID NO: 215906 - DNA, 531 bp, Cannabis indica
gggatttgctgctgaactttggagttttcagctagggattcaaacaagattcaagtggaggtaaccctagaccattagtttcatgtttttaagctttttctttagtttgaggttatgaaattgtgatttagtggctgttagggtttgggatgtttagggtttgatttttaaggttcatttgagttgattaagagtcctagcagctggttttagtatgtggtgttgattttatgcaagtttgagttttgaagtcaaagctttgatcattaatggcgagttgagtatgtggtgttgattttatgcaagtttaaactgtgattttctggttgaattatgttgtaaatacattgtacaggtatactggaaagtttggtagagtttggttggattttgaggtcatgggggcatttttcgggttcccagcacagaaccggaattccggttctgggggacctgtggtaaccggtcgaccggttgttgacccagaaccagacttctggttaggaaacggtctgccagttgggacagttt

SEQ ID NO: 215907 - DNA, 700 bp, Cannabis indica
tgagaattttaatccaaattacagactcactcacaagtttttatttttgaaagggtcatcacaagttttttttttttttttaggagtacagggtaatcagtcatcacaactcaagttcaagtcttagttattaaataactttttacgagaaatttaagaaagaaagggcaatttggtaaattaataatgtgtagcgccagatcccctttcagaaagattcaaatccaaatggcagtctcttaactttattaacaaacccaacaataatttattattttttcattttataaacactaaaatataatttcaaatttttcaaaaaaaaaaaaaatacaaaaatatttattatagtatttagtatttattatccttaattttattttaattaaaaagaatggctttcatccaatccatcttcctgcccgttaaagcaacggctgagatatacagttagctttgaacacaattcatggccccacgccaacctttctactaatcttctcttctcttcttcaaatggcttccaattaacattactagcctccacttttacaaacagctacaaccccatcaactactctcatttctaaactgggtttccttcttcttcttcttctcaacgttactgggtaccttctgagtttctcatttggggtcttgtttctgtgattttttttgcataactctgttcttctcttac

SEQ ID NO: 215908 - DNA, 580 bp, Cannabis indica
agagctaagctaagctagctataggattcgattgcttcgatttgcagtactgacagcttgtgttcacaaaataattaaattaattaataacatacattattaattgtagtaggtaaggtttatttattgtagatatgaaatatacatttttaaattataaatgctaaaaaagtattcgtggttttataacatcttttaatataatatgtaacattaatattaatatacagtaattaagaatccaattttatataatttattataataatttttataaaatattgctaactaatattataagacatagtccttaaatatggtacacactgctattacctattcattttaatttgtatattttataatagattacgtgcataagtcatccattaagtaatgaatatattgtcgtctatgcaaaaaaaaatagtattgtacgcttgtaatattaattatatacattgaacaatatttaagaaaaagaaatggtttataattagtttattattctttaacaaaataagtacatgaaaacagtattttgcttgtaataattaagtactacattgaaaattattag

SEQ ID NO: 215909 - DNA, 1105 bp, Cannabis indica
cttcatgtagttcagagattggtattgcaatcaatggaaacaagaatagcaaatacatggttcaatgggcactaaacaaatttgttccagagggaaatattaacatcaaattgatacatgttcatcccaggattctgactgttcccactgcaagtaagattttgctattttttcaaaaaaaaaaaaagtcctttgtttttgctgctatggttacatagagcagttttttcattctagcatctacctttttgatattctgattcagtgggaaatttccttcctatttcggacgtgagagaagacattgcagaggcttacaaaacggaaatgcattggaagacaattgaactcctccttccttacaagaaaatgtgtcttcaaagaaaggtattctgagtttttcttcttttgtttatgttgaaatttgatctggttttgtcattagcaagagtctaatctaatatacttatgttcctttaaaccaggtagaagtagaggttgttgtcattgaatcaaacgatgtgccaaatgccatagcagccaaggtagctgaattagccattaccaagctcgtcattggagcgccttctcgtagcatgttcataaggtttttttttttttaaatgtcataacaatttattcactttgattgttatgctttatagctttgatttgtaaactagtctcttgtaacattgtgcttgatcttgtaggaaacccaagggcctgtcaacaaagatttcagaacgtgccccaaaatcttgcgcagtctatgctatttcgaaaggcaagttgtcatccgtacgtccatcccaattggagagagttcaaagtgtctacagcatgaacaatgacattagtgattcatcttctgtcatatctaattcaagccatgcttccagctcccaatcaggtaatcagagactaaattcaagctatacaatcaatgattatgtatgtttagtaatcggtgactaatatgttattggttacaagaaatactgagctctgttatttactctctttcaaatcatcgaacaagtagttgaaagacttgatacctgttctgtttcttgaattggcagaagttggttcggttacttct

SEQ ID NO: 215910 - DNA, 618 bp, Cannabis indica
ttttttttttttttatagtaataaaaagagtcatatatattttaatgaaaacctaacttgtctattttttttttacaatgccttctgttaaagatgacaaaacgccattcaacattattgcccttgattttttcaaaatacatagacatggataaggctgacacgtggatctgtaaaaaccaacgcttatagaaatcgactaagtcttagacgacaaaggagtatctcaggaaaggtgtctcccaaaagagagcataaaaagtatctttactctccgggaggccagaggcatgctaaggcagttccgggaagtatggagatctcttgaacagtcacttcgcatttaatgccgcatgagggaagacgtattgaaatctccataaacgacatgacagatggcgtaaccccccctttttcggctattacactgcaatcaataaggttagtgacggctactttatgcgggatcacatcagtcaaaatgggataaaagattatatccacctaacccctaagatacctacggtataggtcatgtacatcctattgtgtatctgttgggaatatgtgcctctatgaagctaacacagaaagacaagtgattcattcctagggatc

SEQ ID NO: 215911 - DNA, 694 bp, Cannabis indica
atatatatatatagttttaaaataatatgcgtacaattaatattttaatataaaaaaatagtaatttacaaatttaatacatattgttaacacgaatttttgtcaacttattctaataaattcaaaaaataaagagatgaaaataataaataaatacaaaatatttttacatggttttatagttaaatttacatagttcacgagttaatattatttttaagttttgaagcatgtattactcctttttgatattcttcaattaattagtaaattgatcgctcttagctgaagtctgagttgagaaataaacctcgagtgtattctatatctgagcagaagtgtcactaccaacaacacgagtgagcacaccttcaatcatggaggagagtaaccaggagtaaaacagctgatcctgttgctcccattaaagatatacatgattgattcgattcaaaaattgatcttgttcaaaaaaaaacttcatccaaggaggtttgtcagagatgtaatcaaagagttgatgacctttaatggcagacaacacctgaggatgccataacaggaaattgttattgtcaagcttgacaaaaaacttgtgattgaagacaacaagatgaaattgaggaggattagtagtggacggcatatatgaaacaagaagaagcagaacgagatgcaaaagcaaaaaaaaaac

SEQ ID NO: 215912 - DNA, 679 bp, Cannabis indica
attttgaagaatatagtagaaaatgtactgtgtttaaatttatatttttataaaaattacaaattaaactctctgatttgtaaaataataaactagatactgtattttataaaataatatgttgagcttcaattttttaattttttttcaatataactaacttgaattttaatatgaactgatataattttgtcataataattttaaattgagttaatattaagttttattttaataaaaattaattcaccatattttgtatcatttaaaaaatataaaatcaaacttataatttaattaaataaaatgtccaaccaataatttttataaaatattgagttgaaaataatattcctttattttatttcctttttgggttgggagtgggagtaaaagggagaggaagcttttaagaaaaaacgcacgagaggtaattgaagaacgcgtttgagatccgatggctgagatcatagccgccatggatgaacggtggtgatctgtttcaattattcaacggtccttcttgtcaactattaacgtttagttaggtgtaagagataatcatatatctttaaatgctttaaagtttagtatgtgacttacatcatgggaacacttacattactagcaaagaatattagaatatgataaatttacttgtttaccaaagtacttaaag

SEQ ID NO: 215913 - DNA, 602 bp, Cannabis indica
gaggtatttaattttgtgcgcatggatatggatgagaactaacacgcatcgccgtcgccgtccgtgccgagctagcaagtgtggtgtcactttatacttttgtagaaaatttatttattaattattatttttacttaattaattaaacagtaaaaatgtgtttaattaattagtaagcaaagactcacttcgtattttcagcaacgttcacttcatccgttacacgattcccgtgatcagaaaactgactttcttcccactactttattctgtgcgttcttatataatgcatcagaatcaacgagagaaaaatattcctttgttataagaaaaaatctgttgggctccgttcttccaccttgttggggtgctacctcatcttgactcccattagtatgatattgtccgctttgggactaagccctcacggttttatttttgggcaccttcccaaaaggcctcatactaatggagtagtgtccatccttatatacccataattcttctcattcctagccaatgtgggactttggttgcattcccaacaatcctcccctcaaacataggaccacatactcatggtctcccctccagcgaaacta

SEQ ID NO: 215914 - DNA, 544 bp, Cannabis indica
acctcaatttgatcatgctccaccgtatgaaatatattgtgtgccacgctccttattttgagcattcttatttggcacgaagtaatatttatcaataattttttataataatatagtgttcactacaccaaaaataattataataataatattaataattttttataataattatacttaattaaaacaataataatatagtgttcagtacaccaaaaattagaattagtaacaggtatccattaatatttctctttaaatatattaagtcatacattgtgggacaaaaaagaaagaaaaaaaaaaactttgttttcactattttagagaatcatttagcgaaaaagaattactaagaaaaagccatcaactaggcaagttgaagatccattcaaaggtggtgctcccaattaaaggacacgggggaccaagtcttttattttgacagcaagattagataattaacatcgatggtttttaagacaaattttactatacaacaccgattaactgacaatcatcactaaactttagctactccaaa

SEQ ID NO: 215915 - DNA, 944 bp, Cannabis indica
ccacaatctaccccattatcttgctgcggcactcgtcttgcgtaatctaggggaagtgatgcaaagttaaatttctctcctaattccagagccatatccacttggagaagatcatcaagtgttcttaactgcaaggtataagagatgaagatctttaaattacttaataatttcgttattcaacttggattctagttttcatctaaaaaaaacttggaacctagaatgtgaaatgaaacaatcgaaagtaagtaccatttcagaagcagctcgtacacggaaatctttcagatccttcccgcgtggtgttttcaggctgtcccaaatgaatgccttactcgccaacatgtctatgtcacacatgaaccagtggggagttttagttttgcatatgaccgggacacacatctgcatatgaaagggacagaaatttattattaccataacatcattataattaactaaatgattaaaaaaaactgaagggtcattacatgttcagtttttgccaacttgccgtaaaatagatccctccaattttgttgtcttgcccaagtgctaacagagcatgacaacccaagattttcatgctatttaaacaaaaatcataaccattattattgttatgcagatatcaagtaatggaatattcaagagcttagaatgcagagtagtgacaaactccgagaagaagcagatttcttttgttttattctatatcaaaagataacatattttggtaaaaaaataataaaacactttggtatataaaacaaatgacaggaaaaaagcattccttaagtgttttagacataaataagtaaagggtataaataaaaactaatgtagaattgtataaacataaatgatcaacaacacaaaacccccttagcttagtttcatactagagttctattaaaacttggaactagggtaaaaatctt

SEQ ID NO: 215916 - DNA, 613 bp, Cannabis indica
ttagctgtttcaacaattcaactacaaatgtaaatacaaaccaaactttttgacactgcatgaaatcggcacaagcccgaaaggtacaagtacgacctagcacaaaaaaatatgagtttgtacacgacacggtaagatgttataaattcgcacaacacaacacaaaaacaaatgaacttaagtacgacaagtttaaaagcacaacacgtaaatatgaatagaccggcccaaaaatacaacacattaaaaagtatgataataataatagtacataggtatttactaataaatagacacattctaattaattgttaatatgattatatacaaaatattgttgaaaattatataaaataattaaaactatataaaaaaaaaatatatatgatttagtgattaactcattaattgtaaaaacaaatagtgaaaaaataaagcttaaatttaagcctatataaaaaaatagaccgcccaaataaagtacggtactagttcgagcgtaggacaaaaatatgcatgggcttatgaccgtattgagcttactcgttaaaatattaacatagcattgacacgattcatatcgttttataaattgacacaatacaattgatat

SEQ ID NO: 215917 - DNA, 948 bp, Cannabis indica
tgtgtacacttttgtacatgttatacatttatattaattggtacacctaatatttaatttcaaaataaattttgaaataataatattaggtataccattataaacgtgccacgtgtatatataattagtctgtagtggcccttaatcggatgatttcttaaatttgctaacaatttattaatttagagattaaatatatgaaaagattgttcgaaaagtttagccgtaaaaagattaacaaattttagaaattttactgcaaaaaaaaataaattttaatgattaatggctaaacatgttacagttgcattttgcaattcaactaaacatgttacatttgcattttggtgaaatcgaacggccgatatagaatctaaagccggccccaaatcttttgggtttcagtgggaccctcgtagagtagaacgttgggggaggaaggaaaaggaataataaattaaacaaagaaagcaaaagggcttttctttcccttctctcacttctctctctctcttctcattttttttagaccgttacaatccgaaatcatttaatattttcaaagtagagaaaagctgaaccagataaactagagaaacaattaataatctcaaccaaaactctgcaatcaatactgaaaacggagcccgacctcgaattcctcagcaatggcagacaccaacggctctttactactacaaacccaccatcatcatgcagaccctgcacctcttcattctcttctccattctctcgaccccatctctctcatactctctcagaattctcactcagaacagcccgtttcactgaaactcacaacagagagctacatcatggagagaggaccacgatacacggcctacgcggagctcagagaatcgaggctcagaatgaagaacgcgaggccacccacgcaagaactcgactgagccagaactcaaactc

SEQ ID NO: 215918 - DNA, 524 bp, Cannabis indica
tggaggagccaacaccctcagtagtgcgagtgctgtgactgttagaagcaccatcagaaggctcaggaagcagaatctcagcaaagtttcagatttctttgtttttgatcaccaactaaagtaatatttgtgtaagaataagtttaatacctaatggaccaaattttattgtctattgactatgtagatagctttcaattttgatgtatgatcgacgtctacttttttttaaaatatatatatataaaaaaaaaaattatataaatgcgggctagggtaagagtaagggaaggagtaggaaatgtgcgagtgaattgtggtgaagtttgaggtcttgggaggtttccaggtctctcaactagcaatacaattaataaaaaaaaaacggccaacagtttacatatttaataactgcataagaatatagacagaattataccacgacagcttgtaaccattgtcggtagagcaacaacaacttttgagaaaggtaagaatgctgctgctggtagtacattatgctc

SEQ ID NO: 215919 - DNA, 506 bp, Cannabis indica
tttagtatatgaaactatcgccgatcaatgaagcccaaacctgctaaaaatctgagtaagatcatcctccaaataatttttcccaatcgacgtgaatgaattttcaagaaactcctgtgcagctgctgacacctcaacagaatcatcaacgaccaaggcacataagcattcctgcataaggacaacaatcaacttatcatgtgaaaaaacacaagctcatatagtataaagggcatagaaatctagatttccatagagcatatcgcttttaaaataaccacctcattttctttaataaatacttgttctaaagaaactaaccatttgcgttttaagcttaccaaaagcattaatctgctgtttttcagtgtgcaactgcacttagataacagaccttgaatagcagctaggagtccctgcctcactctttttgctggatgaaggcacatctgaaaatatttgatgatttactgatcctttataaaatttaaaatcatttcttcaaa

SEQ ID NO: 215920 - DNA, 711 bp, Cannabis indica
gttttcagtcacatgagtatatatataaaatatatattagtgtatcgtgactttgaaacaattcaagaactttaacaaaatacttacattggatcttaggcagagactcatgcttgaagcttgggcagagactcatgcttgaagcttgggcagagactcgtgctgataacgtgttataaaataatataaagtagatgagaagaaagaagaagaagatgaagagagaaagagaaagtgaatgagaatttctgagttgtttattccaatggggtgaacccctatttatacaaaatacaagagtgagatattaagaaactaagaaaaagggaaactaaggaaaagatgaattttcattacaattcatggtaataaataaaagattggacatccacataattattaatatttataacattaataagattattggatagtaattacataagtttaaacctattaatttttagtactaatttattataatctattttatttttaatgattaaggtatgataagagcctcaaataaaaattgtgaattagatcatagacataaattacgcattattaatgctaatttattttttcaagtcttacatggctttttaatgggctaattaatttttatagttacaaaaacatatatgtttatatgattagactaggaaataaacccgcgcttcgcgcagttttgaaatatttaaagaaaat

SEQ ID NO: 215921 - DNA, 667 bp, Cannabis indica
attgtggattgatcgatcatgacataaattacgcattattaatgctaatttatttttcaagtcttacatggctttttaatgggctaattaatttttatggttacaaaaacatatatgttatatgattagattatataaatttattttaccactaatgagataataaaataattttttaactatactacaatattatttatatattattaatttatcattatatttagtaatatttggtaatattaataagtgaagagtttattttttttaaaaaaaaatcataaatattattaaaaaaaacaaataataaaagatgagttgaagaagattttattatatttaaagtacttattcacatatattaaaaattatttaaaaaattgttatgttattttcaattttattccctcacataaagttgcatttgttttagaagaggtaaaattaaaaactgagttcctctttttaagatcctataaattattattaaatgataaatattaaaaaagaaaattaaaaaaaaaagagataaaaaatataaggataatttgctgcataaatacttaagttttatgccgagtagcagataaatacttaagttctatttttggtcggtaaaaataccttctgttacactcctagacattccgtaggtacctctccgtta

SEQ ID NO: 215922 - DNA, 514 bp, Cannabis indica
ttattttgccaattaaattgtagccttgtgatctccttgatcaacgatgatgatgatcaccttgtttaccatttttatattgagaacgtcaatgagttagtgtaatcgtgtaagggctttaaacttcttatatgacttgtgacattataccatctctaatgagtgtggtacattttgaactaaatttgagccaaaaaatgagtatgatttatatttattgaaaacaaccgtgttaattagcaaccctttcaacaactcaatctcatacaaaaatcatcttagcaacctttatatgataacccaattctcatacatcaaccacatgagcaactcttacaacaatcaagttaacaactcaatctcatacatcaatcacataatagcaactcttacaacaaccatgttatcaacccttacaccaacccaatctcataaaacaatcatgttagcaacccaatatcatataacaactagttagcaacactcgtagcctcacaatctcatacacgaacca

SEQ ID NO: 215923 - DNA, 525 bp, Cannabis indica
ggaataacttgataaattcatgaaaattaccgaaataaataaaaactcaataaaatcagtcgataaccatttaaactcaatactaaatcatataaaattaatttaaaattttatgagaaacttagatatttttcataattaatttgtgaaataaactaaataattcacaataattttaaataaattcaaaaaattatgaaacttcatcaagcaccttagaataaaataaagaatcaaaatctacaaaaatatgtgagaaaaacaactcagaacttcccagaacgcggtcgccagcgttcacgtcagtttcatcaccgacaaagtgtaactttgtccctgattgctcttgacgcatcctttcgattaggaaaacttttcacagtgcttagaacctcaaaacgatcaagaactacccaagataacaaccccaatgcatcagatcggagtcgtcttctccaactccggtgtatcgttgttaatggagtaaaaaatggcaaattttgtttcagaccttaaagctctgat

SEQ ID NO: 215924 - DNA, 653 bp, Cannabis indica
ttaaaagagagacttgcaacacaaatttttatgcataaactatggtttctttatgttgataggagtgtccttcttatatataatagtatttaatttggtgaacaaaatatatattaggatgtcctaaatcaaaaattaatggtttctttatgttgataggagtggtgttcttatagtttattttcaagtgtggcttagaaggcactatacgtttctaggaggttctattgaatattattcaaatggggaccatattattaaatttcacaatatcacaatacttcctatattattattaatcaaattatattcttctcaaaaaaaaaaaagatgaaatcatatttagatggcttctaaaactatacttcttatttggaaaaaaaaaaaatagtagtagtatttgtttgtattaggtagctagacattaatcaattgaggttcgtattaatttgaggttgaagtttacttaattcgttttatttatataagccaaagtacaatatttctgaccactaaaatgttctactagcataatatatagtttagtttataaaaactaattattggtaccattttccaggaaaaataaagattaaaaaaatcaagcataatagtttacatattacactacacaactcaatacagtttacata

SEQ ID NO: 215925 - DNA, 1369 bp, Cannabis indica
agaagctttcagcgctgttggttggtgatgatcaattatctagactccaagggtttcaaacttcctctttagggccttatatatctgcaaaacccgtaaattgttctaaacggtgacgttaagccgcactttatcttaaaatattattattattttttttataaataataatagtaaattaaaaaattatttatatatatatttttacaaaattactatttttttaactttttttttttttttttttttttaatttctaagtttagtattactaattttaattgcttcgtttgttggtgaatttctatataaattttgtaaaaatacaaaaatatatatatattttaaaatataaaaataaaatacctctatattttttgaaatggattattaatataataaggccttttacatatatttttttttccaattatataatattatattaaaattttattattacattaccactaatatcagaaagagatattttcaaaaatttagattaaaaactttaatgttgtaaatataccttctaactcatttaagtatatattagacaaccaatccaaactaatagtattagcctaatttaatagtgtacaaaactactcacttgaaaaaatgctcaaagaaaacctatactaaaaaccaaggttatattaatatttttttcttctttcttttcaaaattaatgtacttgacaaattaacaaagccattacaaggacaagataaatcccacccagccaaaaacataatcacctctattatattgccaaggataacaccaaacaatcaataaacattgttgtattacgaagttgatgaccttgttaactcccgcttgaagggcttgaagctcccctgccaatgggtccatgcaatgcactttattagcaaaaaaagataccacctggtgttgagcatttttaaccactactccaaccacagagccagagtccttaaccaccacatcaaccaaaatgtgagacttttccctgctgaggcatttccaaaactctaacatgggaagcaatatccacttcaccacatctctacctggcaacagttggcacaaccacaattccaatcaaatgtcccagttacttaaaaaccaaaggagtttcgtcatagcacgactaccgaacaagtggcccaaaagaaatacctctatcttattgcaagaacacataggccaatattattcccaaagataccaacaagtcgagcgccagtggggagaatattttggtagacctttcaagaaaatcttaagcctaggatgtagtttagatttctacaagacaatcaaaggttggatccataccagcaaacttgtccgccttaaggtttttaaaggtcgact

SEQ ID NO: 215926 - DNA, 857 bp, Cannabis indica
tgtaaaatttaaggacaaaagaaaatgttttatttcgatgagtaaacagctaagcaaaataaagaataggatagctttgtcggataccttccggttgggtcaattgcaatgcaataacaaccggctgtatgggccataagagtgtcaagtggtcgaagagatgggtatgatagaacttcgacagtacctaaatagtgtaacaaagttaaatcatataaaccattccagtaaacagacagaagaaatacttgaacattctcataacgaaaaattgctcaccgtttccagttgttagaaagaacatatcacccttcatgttccaagctatctcatttacctggaaaataagaaaaaatatcaatccagtttagtaaaacattgtcactaacataaagctgagagagaaaagtactaagtagcctttacttcgaattacctcataattaaacttgcgcttatggattgacttaaattttcgaacatccaaaatcgttagttcatcatcctacaacattttaggggtcaagaacagaaacataagatataaaatgatgatctgaaataccattaaaaaacgcaacatggttttatttttcggataagaactcgagatgccaacatcaagtcgtagaaacataccctattgccaacagctatgtgtgtgccatcaggtttgtaagtgatgttaatgttctccccactaagttctgcttgttgtgagcatttcccacctgcggaaccaaaacaaccattaaggcatctccagcaacataaatgggaacacatacgaaaataagaaggaatcacttactacgagcatcccatagacggacagtcttatctcctgaagcagttgc

SEQ ID NO: 215927 - DNA, 675 bp, Cannabis indica
ttctatttcatgatcctttggaaacgtagcacaataagagaagcatcgtctctgctctactggaagatgaaggtagcttaatttcaaagcaggcaatatggaagcttcttcctctggtaaattccaaagctcactacgcatgacagaaagccattcttcctcgtcacttttgaaacacattaagccacctaaagcttttgctgctaatggaactcccttacacttcttcactatctcttttccgatttccacaagattaggttgctcttctctatggttaccaaatgcacgttgcttgaataatgaccaacagtcctcttctgataaactactcaattcctgcattggtgttgttcccataatggatgcaacctttttcagacgagtagtgacaacaagtgaagcaccttttgatccgcattccaatatgtatttcaatttgtcccatttctcatgatcttcattccaaacatcatctaaaacaatcaagaacctctttctttgaagcatgccctgaagtcgtttctgcagaggatccatctccaatgcttcacaagcacttccagttccagattctatgatagctttgatcaatctacgcagatcaaagtcttcagaaacacaaacccacatcttcagctcaaaatgaatactgactctttcatcattgaagac

SEQ ID NO: 215928 - DNA, 603 bp, Cannabis indica
taatcacattgaaataaataatattgaggactttgtgagggttgaaattgaaatttagataagaaatttgtctaccctcctacagttccctgcccaacccattctcttttgaatccacagtctacttatttttccatgtaagtcccgtttggctaaatttttacttttacttatagctagaagtataataagatttgatttatttttaccgtttaaataattattatatgaaaatctttttttgaatgaaaagtaatttttgtatggatattattacaaaaaagttttgtgagtaaattaaaaattatataaattattttaattttaaaaatagcttctcaaaagttattttgagagaaactataaattttaagactttttttatgacttttcatatggattgttttaatatcaaaagctaagcgaaacggatccatagtttactttcattcaaataacagaatctttccaatccaatccaatccactaacttgttttggctaagcgaaacgaatccataattttctttcattcaaataacaagttcttatccaatctaatccaatagccctatttggctaagcaaaacgggttcataatttt

SEQ ID NO: 215929 - DNA, 885 bp, Cannabis indica
agtaaaaaaataaaataaattattatattaagataatagatagatatttaatcccaaaaacaagtgtcattggatgctgttgtagaaaagataacaataaatgttaataatattgattaaaagtaaagtaaaagtaataatagtaataatttttgcatctaaagtttgggtttttatatataacataggttgcccagtccccacccacatatatctacataaaagcttaacactaaatattacagtgaattgaagtgtgtgtgattcaattacgtctgttattttgtgtgacacatcacatctatctccgggtacaaccgtactactgtacaatacattatttatgttttatttcattgcaaaatatatacataatttaagcattatatttactagccgcgcagagctggtagatctgctgagtcaaactagtaatgataattattgactcatatttaatgtttttttgaagtttattcagatttaattatatatttgagcttaaattttatcattcaattcaattaattttaatcatttaatcgatttaatatttattacatattgaattagatcagttttattaattaaatgtattatatatatatttattgatttaatttaagtttatttaatattttaaatttagtatttttttatatcgaatctatccatttaatattttaagtccagtatgtattgattagatctaatcttaaaatttaaatattaatttttatatatacatatatattttacgtataataatataaaatataattaaaactaaatgaaaatactaattaattcgattgaatgttgcatatattaaatttttagataccctatctaacatctaatttgatccaattgaatattcaaaag

SEQ ID NO: 215930 - DNA, 1326 bp, Cannabis indica
ttagagcaaatacagccaatgactttaacaaaattccagggccttcatgaaagtaaacacaatgcttgctggaataggaaaatatatgttaaaatgtttaagtaaacaccagcatgagtaaataaattcttactttgtatgccttatcaagttttggaataattggtcccttgcaagcacaagaaagcgagtaatattttcagcatcatcctgcatataaataccacatgggaaactgatgcaaagtgaggataaaattttacaaggagaattatattggtaacaattgacatctgtaacacaaattcacaaagtactgtctatcacatgttttcaatatgaacaaatagaagttgggaagtattgactctcgataattacaatgcaattaatttgactgatttatatgtttatcatgacatgtaaaatcaatgcaagtataacaatttccaagtaatatttcttttggtcatcaaggataatctctttccagatactaatgttcattataaaggtgtagatgccaattatagctgttcatacatttaagaagttagtttagagtatttagtgtttctttggtcaataccgaccatttttctattagtttccttaggcatatttgaccattttataaggtcactacctaatcatttgtaagggacttatattgagataccacttgtactaagagactctttaacacaatgaagacttgttacttctgccttcagtggattaggttgagtaatcgactgaaccacgtaatttctttgtgctcttgttgtttaatctgatctagatgtgtgcttgtgtgtgtgagtcagatcaagcattcttaacaaaaacactaatctgagttttccttaagcttatgcaagcaagaaaagagaaagaaaggtttcaatcaaattaaatgaaaccaggtcatttggttgctctgccactgatgccttttcacttattttcttttcttttcaaagtaaacaaaatttctagctatgcagatcattggaatctcacagtttttttttttttttagtgggttgaagaaataaatactaaattgtaattagacatgatatttcctttcagtatataaaatgaatagttttactgtcttgcagcacaacatgggtgtaagaagtgttgcatgtcttttacttaaatatattagtgtcaccataggagaaccacccataccacccttagaacttgtgtagatatatgaaaagaaaagaaataagaagcctatgattgaccaattggaagaagacttcacctggatcttctgcagtatgttaagcccatacattgctgcagctc

SEQ ID NO: 215931 - DNA, 789 bp, Cannabis indica
aagaagaatagcaactctttggcaatcagtctcatcctcaacaacattttagccaagtttatatcacaattagagaccaagaagaatagacattgctttggccaccagagaagaaaaagcaccagttttaagtgtggcaaacagaggccaaacagtgtctgagatggtcatgaatcatagcctcgtagccaaggttcctgtcggactcacatataccagcatcgacgttgagtttgactcgtccttcaaatggcaaataccatcgtgacaccattgtaagagcaatagtctgggatgaacacgagaatcgcgcgaagacttctgggttgctactttaaaattctgagcaaacaacaaggccgacttgataactcccttgacatcaaggtattagaaaattaataatctcaagatacaaatttttatataatctagaacacaaccacaatagataataatatcccctcttaaaccttttgtctaacaatgtggcaatcgatttctatatgtttggtacgctcgtggaaaaaggattggctgctatttgttgtgctgccttattatcacagtgcaatatggcagggcattcatgttcaatccccaactccttgagcaaagatagcagccaaactaactcacaagtagtgttggccattgctctatattcagcctcggcagaagatctagacacaatcggttgtttcttgctcttccaagacacgagagaatcaccaagaaaaacacaaaaacctgtgtagaccttctcgtgtcgatgcatgatcacccagt

SEQ ID NO: 215932 - DNA, 668 bp, Cannabis indica
tatgaagttagtctatagtgggtagtacaagtactatacatatgactaaaaggtaatagtataagatataaattataatagtaaaagatgataaaatagaaaacttggctgaacctaaaatgtacaaataagatgataaaagctaccataaatagtcttcattaaagttaaacttcttactctatcatcatctacaaccctcctctctttatataaatatatgtataaatgaaaaataataaattattaatttttatatatatacacagagataaaatttgagtggttacaccaaaaaaatatataaccatgataattttaaaaatatatgtatatttatatatacccatgataattacagtaataattaatttagaattaaaaataattgataaattgtccttaacctattttattttatatttttataaaataaaaaaaatatttacagctagcataaatatcataaatttttgattttatatatttaaatatcatattttttttaacgaattaaataccttaagttatgatatttccgttacttcctttttttattaaatcatattcaaatataagagtatctgtggcataaatatttattattttaaattttatatatttatataccatattttattttcttttagtggattaaatacttaaag

SEQ ID NO: 215933 - DNA, 639 bp, Cannabis indica
ttctatctttttttttttttttcggtttcatttcattttttattgtaactttttgtttcaaacttcttccacaatcaaaaaccattttttgatcaaaaaaaaaaaaaaaatagatttcgtccatcttcctcaactgccttcctccatcatatgaccacattttttttcatttcttttcttctcttttttttttttttgtttctataaatgtaccattacttggtcttcatcttcccaacacaattactgaaaaaaccttacaaaaatatgtgttaaatctcttgccaacaaatctaaaggtaaatggccgattgtttgaagataatgattttcaaactttgctccgcctacgaatcgaaggttaatgttgctgaaacatttccctccctgaagtttagaaagggaagaaccaagttgatgagagtctgaaggtttctttgtagtttctttatcgttttgccctaatttttcttattactaatttcttaaggaggcaaaagtcagatttattctatttttaaatatctctaaggattacaagttttattttttttaataccaaagtactgattattttttatttttaaaatgactgattaatttttaccactgagtgtgtggtgtagttggctggaatgc

SEQ ID NO: 215934 - DNA, 761 bp, Cannabis indica
tgtgttatgcttttcttgctagtctatccttgcttatatgtggtacctttcgtgtttttcataccgcgtgtggtgcttaaggacatatttttcgtatcgtattgagctaatttgtagcatcatatagtgtcctatatccaaacctatattttttatgcctagctagtcatgctcgtaccttccgagctcatcccaatttcgtgttgtgtcgaaaaaccgcacccgtattttcccgatttttactttatgctcctttttacaaatgtgggtttggtggcacttggcagaggccaagctcgtcgatgagattaattatgagggtacgtgaataaaaaattaaaattgaaagttgaaccagaccctaccataccctacccttatcctacctatatgtagttttaaattttctattatattggaagaatttgaagtggctggctaaatattgggtcagaaagaggaaattaaaagaaaagagatagagagagaatcatataattaagtagctatatacgtaaacatgaaaacttggaccatctcactaaaaacacattcgtttatattctttggaccatctgtaataaaatcaaaaacggtgtgtgctcataactgtgtttcaatgttattcttcttcttattgcctcatatatcttacctgaactaaaatattattaaagagaatgatgatcttttaataaactgatataaactttctttatctaacatatggtgttctatagctttactctatgtttattttc

SEQ ID NO: 215935 - DNA, 602 bp, Cannabis indica
attttagttattagaaatgctaaggcaacatgtcacctctttatgtctctgttttatatatagatataaatttatatatattgattgatattttatatgtgtatataaacaaaatttacgattaattatatttgatttaaattttaatatttttttagaatttattttttattttctaacttttttttaaatattgtatatttttatagaaaattaaaataatactaaaatatcaatttataaatttatacttttttgtagaaaaataattaaataatagtaaaatatcaatttgtagatttatgctttaataaaatattaaaattgagagaattaaagagagtagagaaaagtagttttgaagtgattttagaatgcgatatcaccgcctcatactttctcctttaatagtaaaatatcaatttgtaaatttatgctttttttatagaaaaattattaaaataatagtaaaatatcatagatttatgctttaataaaatattaaaattgagagaatgaaagagagtagagaaaaatagttttgaagtaattttagaatgcgatgtcaccgcctcaaacttctcctttaatagtaaaatatc

SEQ ID NO: 215936 - DNA, 659 bp, Cannabis indica
ataaataaaacatatatatgtacagattaaaatttctatatgcacatataaaaaaaaaaataaatacctaaatatataaaccctaaaactatctatataaatatatacatttatacacagatatatatataaatttgtaccaaaatatatatatttaaataaacgcagatatatactaattattttatatttatattactattttattacatacacaaattaatatatatacacacagatatttaaaaataaatacccaaattaatttataaaccctaatgttatctatttatttaatgatttatgcagaatataaaatctatagatctctaaaaatatttaaaaccttaaatatatagatttgtatataaaacgtattatatatatcaatttaaaacctaaaaactatataatctcaaatgtaaaataaaaaattaaaacttacaaaaactggagaaaaataccagtaatggccgctctgttgactgctccgtcaaaggggtaggggtggtggcgctgtcaaggggtcgggatggtggagaaatgggggaaaatgaaaaattttgagatttgaagagaagaaggggaaaatgggggaaaagggttcagatgggatatttataataccattagcagcggatagttcgccgctaatagta

SEQ ID NO: 215937 - DNA, 670 bp, Cannabis indica
ataaggtttaaaccttaatttttgccatttaaaataggcgggctgcgacactaccttgtagtgtcgcgatgcttgaagcttaatttttgggaacgagcttccttgtacgatgaatgacaatgttttagccataactctttcaatattactcgaaattgaataattcaagatgttttggaaagaaaaaagagagatctagaatctttattcataatatttttcctcaaagtgaacgcatcatagtaaaaaaatttcttgaaggttcagacttgattttcgatcacaaacaaaacgtgttgagtatccaaaatttagaatttttcaccacttatatcctagaaactcaaattgcatgataatttgtcatattcatctcatttaatacacttcttctccttttcaattcacattatgaatttaaccatttaaacctgaaacaaatagcaaaacaagcgtaattctgcacaaatataatcaattgaaacactcctctaaaaatctttataaaatgcaactaaaataagcctatcaacaaacaatgcgagtgaggatgccatcagatatggaggatagcagccaagagtttaggagttgatcctgaacctcccaattagtgaatcttggattgatttggcgacaaacttcatattcctaagtgagaaatttgcac

SEQ ID NO: 215938 - DNA, 633 bp, Cannabis indica
ctcgagcaggtaaggaagttctaatcaagctgtggttcagacgctacctgcttatactatgaatttgttccttcttcctatgggcatttatcatcaattagaaagtgatgtgagtagattttggtggaagtcaagcaattccaaaggaatacattggttgagctgggtgaagctcacgaatcataaggttcaaggaggtatgggctttagagactttcgagatttcaacctttctttactagctaaacaaggttggagattgttgtcttgtgaggatacgcttgctactaaagtgtttaaagcaagatattttgcatccgggaattttctcaatgccaccctcggaagtaatccgagttacatatggcggagcatcctcgaatctcaaaatttggttcggactggtgcaagacgccttgtgggagatggctccagaatttccattctgcatgaaccgtggctgctagatgaggttaatccatacattgagacgtcaagccaaagtcttaaagggcaaatggttcaatctctgatgcaagttgacaaacttgagtgggataatgaggttatttctgatgtgctgaatgacagagatagagatttagtttggcgcattcctctctcggatgcaag

SEQ ID NO: 215939 - DNA, 498 bp, Cannabis indica
attattatgtttcactacattgttttgtaactactatctagttattgtgataagtggctaaggaagcatctttagttttgaagatgggtacccattatttgaaataattctcttgcatttagtttagtaatttgattttgatatgacatttctcgttgtccaatctctacttattatcaatcttatttgctagatgagcgagcttcatcagcatattctttggcctaacatcattcaaccttgtgattattattgaagttggggacctcatttgctttacatttttattttttacccatgtctagtctgtatcttatggattttatggtgaaaaaggtgtctccctaaagcttgtggtcatactcgaggcaggaaggtgtgtcaagagaggaagcagtgatgcggataaaagcagccattgatgctcggggaggagagtggggtctgacattgtatgttgcgcggctgattctcgtcaaggagtgtctttagaagaat

SEQ ID NO: 215940 - DNA, 540 bp, Cannabis indica
aggtgacatatttataatggtgttgtgttcgtgtttgagtttttgatacgttttgtaacgttccaaacccttagggatgccacacgtgtgctcttgaaacgtaatttacaaatagtagattaactatttaatcagattagtgataatagtttaaacttcactataataaaatcatagcaatgaataggaagacatcactaaaaatttatttcggagatccccagttataaaagttttataaaaagggctatatacgaaagtaagtcaaaatacacatcatgtacaacctaaaataactcctgacaacttgaccacacaaatcggataagacgatatgtacatttttgggggaaaattttcatctcatggttgtcttggttttcccttgcccttacctgcacttcaagtcacccttgagtcacaaagactcaacaagaaaagcaataacaacaatcatataatttatcacacaaatatcaacaagtaaactcacataatcagaatcacacaatcgtatattactcatatatttaaatatgg

SEQ ID NO: 215941 - DNA, 456 bp, Cannabis indica
atcggtacaatcttttataggtgcacaataaaattttctaaatatatataaatttaaacattatttaaaataattatataaactaaaaataaataatgatagtgcaactacagttgacactaaatatggtgtatactgtaactatacactatatttagtgtatgaataagtgcattagagcatctgtaatagttttatcaaatttgtgtggaatctttataccattttactttaatagcacaccaaattatgtaccaaattggtgtgcatcacattctacaaagtaatattaaattttcaatctataccaatttggtgttactattttttttttttttttttagtatagtctaccctaaccttattttatcttaacataacatataatcttacattttagtcactattaaaatttatcacaaaataataattaagttaaacactaacatattaaaa

SEQ ID NO: 215942 - DNA, 768 bp, Cannabis indica
gtgtagtgcagacgatttgtgcactgtagacaatttaatgaacaaccctaatgaaaatacgtaaatacgtatatttatgaatgtatttaattaaattaataataacattaaataagctatgtcaattaaaaaatatatatatttactacagtacccctcacattattggagctgcagaaaagtcaaatttaaactgggacacacatctgtgtattagggtcagttttggcgacttacattgtccttcacataaacaggaccatcattttaataataatgtaatgagagaatattaaataattatatatcttttgttgtaatattggatgaataattattttatactatatacttataattaacttaatatatagattactgttaattaactagattatctgtaattattaatagcccggtacatttgactaattttataaagaaaactgcagtaattaatatgttctaattatatatattaatattattatatattgttcaacgccgacaatccacgatgagctcaatgtcgtccgactgcatagaaaagaattaagcaagcgagacagagagaaacatagaaaaaaaaaaaaaaaaagaaagtacaagacgacgtcaacctcaaattttaggtagtgggtagttcggtagtctacagtcagagtggctagatcaagatatcaaatagaagaaaaaaataaagcagatgctcaagctatttgtagcacgcgctagggtgagagagataggaaagaagagagagagatc

SEQ ID NO: 215943 - DNA, 606 bp, Cannabis indica
aagctctagaaaattcaaacccaattcagatcaaaaataagaaagccacataaatatggaagagagaaagagaggacagatggaaaattgatagtgttattcaggttatttcgagttaagtcggtttaattgggcgggttactttattttcaacccgcccaatatacagattgggtggttttttttttcgttggttttttagtttttttctttggtagtttttcggtttggtttagcgggttattcggtttaggcggtttacgaaaatatatgtacaactctacacaaaacccaacagcaagtgcgttggaaatgacataacacttatccaaggtgtaagtataccttatcgccgattatcatgtcagtctaaatttagtgaatcgacaaatcatgagaattaaacttttgaacatataatcatgattatattccactgtcctgacgatactataatcatgaacaaatatatatatatttatatatgttatggacttaatagaattcatacattatatataatcatgtgaacaatgtaacatacaagcgatttctgtatcttatattaattagtaaatgtgattatattgaaatgagttttatata

SEQ ID NO: 215944 - DNA, 868 bp, Cannabis indica
agtgaacgcttagctatgagagctctgagcatttttgagtttgtttgaggaatgagaagagtgtgattgtgtttttgggtatggccacgttcggtggttgtttttcagtgtttaaatattcagtcaaagactcagtagtgtaactgtctagcttggtggaaggtaggggaaagagaagcctaattattattattattattaattattgagaggtacttgtaattttattagttatattatacactaaaatttattaaaacaattgtttagttttctcaaaatgaaaaaaaaaatagggtttcgtgtttctaaatctatagctattaaaggattgtttttttttttccggccaaacttgtcggccttctgtgagcttaagtgtaatttggtcgggattgtgttttgctaatgtcatttaatttatgcaggatcgactctaagtataggcaatctaaacccatgcctaagacctatactttccgggggcttaaaattaaaaaaaaaatgaaaatgtcttattagatttttatttaagtaaaattaaatatattgtaaacaacacatgttcacaacttggttggttggggtgaatgacacgttacacgatggtgtaggttcgaagctcatgactcttttttaatatttttttatatatatttttgaaagtgagggccccaaaatttaaatagtcttacgccctccatgtattctgagggtcaaccttgtctatgtagcatacttttgagtattttagtcttgtttgtgtgacgtgattttgagtgttttagtcttgtttatgtgacatggttttgttttgttttgttttgttgttgattctttcttgttcttcaatggctcgccattaaat

SEQ ID NO: 215945 - DNA, 1060 bp, Cannabis indica
atataatgacataagataaaaagcatggatgtgttcccgagcaacttgtttgcttgggaaacttgtatttgttgagcgttctaatattaacgctcaacatatttttagctaattagaggctcgtcgttcatgactctttaggagcactacaaaattttttacctttagttacaataaaaattgtgactaaaagtaaaaaattatgactaattataaattattattcctatattgtgactaaaaagttcgtgactaaaagtattagtcacaaaaattataatttgttgtgactaaaactaaattagtgataacttgtaactaaatactatattttagtcacaagtaacattttgttgtgactaaaagtcacatttagtcaaaaaaaattatgttgtgattaaattttatcactaaaagtatcagtttcttatagtggacaatgattataatcgctaacaaaatatatggattattagtcaaaacattttacgaaatttaaggtttttaataatgtttattctaatttaacctttcataatttcttgtatgaaactattttaaataagtaacatataggctacttaagattttcgcctcgaattataacttatgtattattatgcttcttgaatttttcagcccattaaaaattgtccaataattattcacatattgtaaattgttccttctgtcaagttttgttcacacgtagcaaataaaataataggcatgactgataagcgagttgtctgtttcaaaaaaaaaaaaataaaataaagcgaagttgtcacatcattgtcatgtaatctgtaattaatttgaaaaaaaattattattttgttaaatttagtttatataatttttaattattaattgattttagtttaatattttttttaaaattactatgtttttacttttttttattgtttgtaattatactatgtggcacttgatgtgataattttctaaactagtcatgttattattttgttttgctacgtgtgataaaacgtcgacagattgaccgaatttataatattgtgaatagtcaggggta

SEQ ID NO: 215946 - DNA, 454 bp, Cannabis indica
ttgctttacaaattattttttttattaagtataaccgatttctttttaaatattatatttgaggtttttgtgtgttattatttatttttatttattttgttatagagttgattctttttatatttatgcctcaatattttttggaattgattctcatattcctttttaaattataaccaattttatgaggtattacgtgttatgaggtattttgttgtgaaactagttttatttttaatttatttttcagtatttttaggaactaattttatctttacttttttaattgtaatcggtttgagttattgtgtgttacttatttttattcattatattatataaccagttctattttagttttaaccggcttgagttatttcgtgttatttgtttttattcattataacactgttatagaaccaattctattttaattatatctgatttgagttat

SEQ ID NO: 215947 - DNA, 562 bp, Cannabis indica
aactctgctattggcaaatcatggacgtaatggagagaccgtgggttaaaacttctttatgattaaactacagaagcaatttttcagttgctttatgattaatgagaaaacaagtagcaaaactgaactgttctattatcatattttgttaaaagagagtgaaacaatccataataagtatgttgagggggagaggtgaggaggagaaaaggcagcttgaacttcttatctccatctccatgtcacaattttaaagattaccccttaaaattagagcattggcaaatagaatttagtggtttatgggaatgaagcaacagtaaatgacaagcaataattattcggtaacagtcagtcttccttaagaccaactttactccaatggaatgaaaagctatctgaaacaatcccattgccaaatgtatacttttccactcataccttatgaggattaattaatatcaggcctatttttcacttgagaatttgagcaatgatagttataaaaccacctgaatttgattagcagtacataataaaaaaggaaactcactttgggcaa

SEQ ID NO: 215948 - DNA, 988 bp, Cannabis indica
agagagaaaaaaggatcaaatctcaatccaacgaaagtatgatggaagaagtaaaacacctaacatctataaacaatgcccttatgactaatgaaccagaaacattcataatgtcatttaaatcaaacaagaggcatgcttattgcacgtcttgcattatttagacgcaataaacaaaatttataaggaataaacgtttatttcgaaagcccacaaaaatggagaaatcaggaatattgattgcatgtgtttaatctaagcatggaagacaattcatttttattttatttatttatttttcaacagtgagagattggaaactatactgatataatgggaatctccatattgggatagaagttaatttctgaaagcaaacaaagacaattacaagtttcaaatattcaccattttataaaggtaattgcgtttaatttctttgaagcacagaatccattacaaaaaattgtcagttacgaacacttaataagaacaactcaattggctgaataaaatttagcagggagaaaaaaaaaggtttggatgaatcaaacacaaaacccaatataaaaaatcaaaagaaaaaaccactggagatgaaatcagacatacccagaaagttaaataaatcaatacataaaagggtagtgaagaaacaaggatattacccaaaaatctgccttggatcagaaataagagaatctagaatatcaagtttcagtataataagcctaagaacaagaagctaaccaaaaagcagagagagaaaaaaatcacagaaggcaagcctgtgatcgttctagataccttcctatctctaccaacatagaatatttctcaaaaaacaacattattttttcaaaaataaaaaaggaaaggaaagaacaggaaatagaacaacaaattacctggaaatagcaaaggtcctttgattgagtttgaagaaaagctaaagctttcacctacccagatcctgcaaatcccagat

SEQ ID NO: 215949 - DNA, 543 bp, Cannabis indica
ttaactttttcaaacattatgtcaaagcgtctagatcgccaatttttcatgggcctctacttaagaacaccactaaattacattgtatacttttttaaattcatgtctttaatttttattctctctttcaaaatctattatgtttacctcgtttttcaatcattttactaattttagccctattatttcacaatagtctccattcttctctaattaaaattttatccaaacatatctacaaacttacacatccatctccaaagaacattattttattatttttgaaattatgtcttagttatgtgagggtgtaaagataatttaggtacaattcttataaaaagagttatatttaaattaaattttatttaaaagtaaatttgattaatgtataagaaaaaaagatattcttcaacttctccctaattaagaataccctttccaagcctaattgaattccactctttccttaatttcacgcaaaatgaagggataaattaaaaaaaaaatccttttttaattatatccattaatcaaaaatac

SEQ ID NO: 215950 - DNA, 1021 bp, Cannabis indica
  modified_base (50)..(50): a, c, t, g, unknown or other
tatccttcaaaaatctgttaaaaaaggtgagtgattctaatgaattgtanaactttttttttggctgatagcggttagaactatttttattactattgatttggtagattttttctcctttcaatccattttgcttaaatagcttgattatctgagatgattgggtatcagtcaactctagatttttttttgtgctagacttacgtgtgagatgtttaagatagtgtgtttttgtactaagtaattttaaagttaatgaatacatcttggacattaattttatgtaaaagagagaaagaattagagttagtcaaatttgtccatattattatgacatttctattttcttatattattattatgacatttctactttctttttcgttgcagttgcctcttaatgctgttacatccataattgatggcttaaaaagattgtatactgaaaagctaaagccacttgaagttgcctatcgttttaatgattttgtatcacctttactggtaagttgactcgtattttggattgattaatgccaagtgttaagtaactcattcttatgatgtaagttgtatcttacaggtgtagatgcactctttttctgtttacatgtattgtgttttcattaagcaccttgtaacttgttgatttgttttttcagactagtagtgactttgatgctaaacccatggtcatgttattgggtcagtattcaactgggaaaacaacatttataaagcatatgttaaagtgtgactacccaggttggagaaagttattttattctctttgttctattttcaatatgcaatgatatatgatgttgatttattttttttttcctttgtccacaggagctcatatagggccagagcctacaacagatagatttgttgttgtaatggtatgataatttgtcatcttcccatgatgttctgtgttttaacccattcagttttgcttatcaaaagtttttttaaaatctaagatttggaagatctctttatcttgatgcttcta

SEQ ID NO: 215951 - DNA, 954 bp, Cannabis indica
cattggagatggtctaagagcattattttgtctctctatccctgagtacatttttattggcatttattggctaaattagtgggttacataatcttttttttttgaaagaaagtatgtcattaaattaaagcaaatcaactgttacaggaggaccaataaatctaggacaagcatctgtccacaactgaactcctaaaagactagtaacagacttagctagtgcatgggccacaccattcgcatcacgcgaaatgacacaacaagaaccaccaccaacaaccgctaaaagagaaataatctcctcaacaatgaccttaaacataagaatattatccggacaattaatccaagaactaacaactgaagaatccgtctccacacgcaccaaagtgaaccccaacctgttagcccaaacaagacccgctcggagagccataagctcggccaccgccacttggaaatcccccacggcacccatagcccaagccgcccacaccaccccctcaccaccacgaaccacaccgccaaaccccacaaaccccctccccggaagtgaccgccgcatccaccgacaacacaaactcccctcgccccggcgggcaccaatggagccgcctctcctcaccacacccgaccccctcaaagtcccacccattgtagaggctcccaacatacctccaacccccacacccacaccctgaaattcgtccaaagcttcccgagctaattcatcaagcacatccaatctagattgctttttcccaaacaacactgacttcctatcaaaccataaccaccaccaaaccatcgacaacaaagcaaaagtattcggatcaagtacctcaaacagaaacaccagcagttccgctaaagacccattactaccacgagttagcctattccaaagccgcaactcagaccacaaaggccgcaacgaagagcaaaagactaaag

SEQ ID NO: 215952 - DNA, 327 bp, Cannabis indica
ttttattacctttatgttttaagtattatataataggctacatcatgatcattagtatatgtattaaaagttgccaaaagtctttttgtttctttctcataattatttattgggcaaattaaggaaagaataaaacgagtttaataagatcttttagaagatcaacatcaaggaaaagcagtaaaaagagtaattaagagtaccttaagtcatctttctgaggccacataattggaacaaattacagagttcaacatcttccactaactctcccattatatagttcgaaaaaggaaaagggtaattattattttagttttggtttta

SEQ ID NO: 215953 - DNA, 695 bp, Cannabis indica
gttttgaggtagacaagtttacaggcacaaatgattttggactatggaggattaaatgaaggctctactggttcatcaaggcacacatcaggatatagacaaagaagaattgaaatagctgggtgaagataaaaagaagataaaggagattgagattaaagcacaaagtgccatacttctgagcttgggagatgaggttcttagacaagttttagataaagggacaacaatagggttatgggagaaacttactttaatctattttaagaagtctttggtcaacaaactctatttaaagaagaagatgtataccttgaagatggatgatacaaagaatcttagaaaccatcttaatgaaagtcaacagaatcatccttgatcttagaaacataggtgctaagattgaggatgacggtcaagggattctgttgttaagctctctgccaaaatgttatgaacatttgtggataccatactatatgagaaagaaaccttgacagtatcggaggttaaagctgctttgaattcaaaagaaattagaggaaagattggacaacaatggtgttggaatgtttgcgagaagcaaatcagaatcaagagataccaagaatggaaatcacaagtcaaacaacaaaggtaaccattccaaggacaagtgtaaatggtcaaagaccaggatcgagtttcaacacaaa

SEQ ID NO: 215954 - DNA, 525 bp, Cannabis indica
attctattcattttggtctgttaagtgtcaaagtgaagtgctatggtatacacaagtgtatacgtggcgaaaattcattagtccacataatattaataattaaaaattaaaaatttcaaactaaaaaaatttaaaaaattaaaaaataaattttttacctctttttcttttttttcttttatttttttcttttctttcctttttattgggtcacggcgggttcgggtttgcatgggagctgacctttgggttacaggggttgacctgtttgggttcgcaaggggtcgaagatgttttgatttgtaggggattgatgacatttgggggttgaggtgtttgggtccatatagggtcagggtttttgggattgcaggttttgggaaaatggacgagaggagggtcgaagcacagtattcctaatccatctgtcgccggtgtcacacaagccgagagagagagagagagagagagagagagagagagagagagagagagagagagagagagagagagagagagagagag

SEQ ID NO: 215955 - DNA, 534 bp, Cannabis indica
agcatcctatatatgcttcagggattaaaactgttttctgtctcatctggtttgcacccaacccgcagaagtcagcgatttattgcagtaacatggcccaggaggaggtaaatagaatcttattagcctcaggttttactcataaatgccatttacttatttaggggttcccatttgctctaaaagaatctcaggaaatgaatgcactactttggctgaaaagatgactgcccgaattagaacctggagttccaggaatctgtcttttgcagctcaagttgtactaatcaattcagttttgatggctattcatgcatactggtgtcaaatactcatcttgcctaagaaagtgattaggcaattggaagctatctgtaaggcttttctttggaaaggccaagcttgtgtcacaggtccagggctgattgcttgggaatctctttgtcaatccaaagctgcaggtggacttggctttaggaaaatccatgaatggaattaagctgcaatgggaaagtatatttgggcaatagctca

SEQ ID NO: 215956 - DNA, 566 bp, Cannabis indica
tctttggtgatctcttcttgctaggtacacttcgtcattcttggattccttctccaattgtaattcaaattcctttaacttgagtgcagcaataacaccctttaaaaaaattacatctctaccatatttgatggcaaccttgacttcttgatatacaattgggaggcatcttaataaaatgatggtctggctttcttaatcaattttataatttatgttagtcaatcctacaataatctcattaaatctgttaatgttatcatctaaagaaagagaagaaatcattctaaaaccatataacctttctagcaaattaatcttgctagtaattgatggcttcttgtagatttcctccagcttgttccaaactccttttgccatcttctctgtgataagctttcttcttacattgttggacagatacataatgatcgtgtaacaagccatctcctccattttggctttctcttctagtttcttcttgactagtaacttctcatctctaatgactttagagactttttggtgcactggtatctcttttagactctctatccatagtgtga

SEQ ID NO: 215957 - DNA, 679 bp, Cannabis indica
gtagcatcaggtcgaccatcggaccaccagcccaacccatcggtactacttagttttttttttttttatgtttttgacactaaaaaaaagtatggaaaatttgagaggggtatttttgggttttagataaagtggtcatatatttcaatgatgatatgtattagtttagaaataaaatattaagtatatgtaagtatagaaaatcaaatttcccctttatttatctataaaaaaaaaagtggtgcatgtaatttaatattttaaccttatttttagtatgttaaaattttataaattatcttaaataactacaagaatataattgtgaaaaaaattaaaacgaaaaaaattgtatgcaccataaaaattggttcaaaacaattttctaaatttaaataaattttataatttttaatttgaaactaattttttaaaaaatagttgttcacttgaaaaaaataataaaaaaaaatcatatcattgttatataattagttatcatattcatagttgagatttcaaagaaaaaaaaaaattaactaccatatttttataaaaacgacaagtagattgtgaaggaataaaaacatttgaagatgaaacggtttgtcgtttttaataatttagacgccaagaagataataaaggagttctaccatatcctctgttatatcttcta

SEQ ID NO: 215958 - DNA, 520 bp, Cannabis indica
aaacgcaggaagaaggttgagaaacaaggaggggttcactgttatgcgaactttaaatatgagggcctatccacattctgttttatttgtggcatccttggacattcggagagattttgtgaacagcttttccatactccactcgatcagatacagaagccatacacattggaattgaaagctactcctcgacggaagaactacgcaatcggggagagatggttaaggtccgagctgcttctagagccggcggaatggcgttttccgagcatgctacgactggcgagagatctacgcccatcaatggtaatcagaccaacaacactcatgggaggcaatcacggctgaatcacattccacctaataatctgggatcatcatccaatcaatcaattaatgggaggggaaattcaaatatgatggctaattccttgcctcaattgaaggaaggtggtgccataattgatcaaccttcaatgaaagagtccatcgtgggagatattgctctggagtcaaatat

SEQ ID NO: 215959 - DNA, 551 bp, Cannabis indica
caaacgaactctagagataataaaattaacatataattatacacaatattttaaggatgtgctaaaaataaattttatttctcaaaaattaataaaataaaataaaaaattagaagagaaaaaattgtgatgccgccattttattttttcaaaataaactcatataattatacaaacttaacttgagggcttgagattatatatatagatatataaattatatattaaatataattatttaacgaaaattattaattaaaattaacactgttaaatcaatcaattaattatttaaattatttttttatatataaatcttaatttatttaattagatgttaatttaattaattaactataatttataacaaatatgattagttatattatttaaaatatttaaatttatttatttattattgtttaataaaattaattagatatattttttataaaatttaaatagattatttatattttaaaattataattgaatagtattaacattgaagtctcacgtttggtcttcatcatgtgttaataagaaaaaga

SEQ ID NO: 215960 - DNA, 677 bp, Cannabis indica
aaaattaattaagtagtgttaaatgtggtattttttgcagtattacgccactcagcgtaaattcttcttttttttttttttgtcgaaccttttgtttttttttccttactttttttttgtcaagtcctttacatttgttttgtttgtttgtttttttttttttaaaaaattgtgtcttttgttatttatttttttttttgctatgtattgttttttattacatttttttaatagagagttttccttttattttattttttatatattttctaaacattataaaataatcttatacattagctcgctatcttttaatatttaatagttactaaattatattaaacattagcttattttgtagaataatttaataagtttcaacctattttataagaaaaccacatagtttcataaaatatataacaataaacgaattactttaaataaaatgtaatgtatcaaacaacttaataagttactaattttttttatttttatatttagacattacaagattaaagaaaaagatttatttttataaaactattttaataaatctataaaataattttaaataaattgaataatatctgaaacatcatatgagttacattaaaaaaaaaaaaggtgacttcaatgtatttcaaacaatacaataacataatatagcctaaaaa

SEQ ID NO: 215961 - DNA, 506 bp, Cannabis indica
gggattttgtcttccttcgagtgtccccaatgaagggaattcagaggtttggaaagaaggaaaagttgagtcccagatttatttgagattctagaaagggttggtcaggtagcctatcgactagccttactccctactttatctagagttcacaacgtgttccacatcttgatgcttcagaagtatgtgtctgataccactcatgttctaagctatgaagatattgagcttcagacatatttgtcatacgaagaacaaccggttcagatcctggacatgaagaaaaaagtgttgcggaacaagactattttgtcagttaaagtgatgtggagaaacaacaagattgaagaagtgacctaggagctagagtcctagatgcgggagcagtgtcctgagttattctggtaaattttgaggacaaaatttctttaaggaggagataattataatatctcgaaaaatataatagtaaattaattaggtatattttactaaatatgtgatta

SEQ ID NO: 215962 - DNA, 631 bp, Cannabis indica
acttttcaccactaaataacaagtttttggtgattttttttttgtcaatttaggtaaattcccttctattactagttagctaagaggtttttttttttgaatgacaaacacgtttaattttatcaaaacatattctgcagctattgaaataatcatttttaaaatttgttgatgaggtgatttatattagcatattttctaatgataaaacatccttgaatttgttagtatttggcctatgatttttctattcactggaatgctgataataaaataaggattaattttgccttggaagcagtgaccagatactgaacctactggtgatttgatcttggacttctcagtcttaagaaccatgagaaatatatttctattgtttataaaagtaaccagcttaaggtttttgttatagcaacctggaatgaactaaaacagaaattggtaatgagtagtggggtgctgctgtagcgaatacctgaaaatgtgggagcagctttggaactgggtaatgggtagaggcggaaagagtttggcaaagtaggctagagaagcctagattgccataagtggactgtaaaacgtaaggctcatatgaagagttacagacagagcctcagtcttcttggga

SEQ ID NO: 215963 - DNA, 738 bp, Cannabis indica
tgttagagagaaatttgatatttttggtaaacaataaaagttaccaaaaaaatataggttaataaagaattataatatttacgtcgtaaatgatctacgtacaacaacttgttttaatatttttctaaaaaattaaagagaaattggatattctaggtataacaaaaaaatttcgaactcaagtcgaaactaaggtatttaaaaatatcttatttatagtttagcagtttagcatagctcacttttaacatatccatagcatttcaataaatttatactaacgatcaactgataataaaatttaaattaatttaaattataatacaattaataatacgagttagagagagaaacaaaaaaaggagcttatacggaatttttacataaaaaatcttcactaatgtactttaaattttaataagaatcaataaattgtcattccttttgtataagttttcttttatcattgtgtctcctaaacttcatttattcttcttaattcatatgcaaaatatacttacaataatgtgttttcaatgttaactattttcttataattattgacaaattaattagataaactaacccgaaaatctatcttcgaagaaacttagaggatagaaaactagggaagaatcgaaatacaatgtgatagtagagaaactcttattaaattattttctaaaaaaattattaaattatcaagtgtacatattatttatttacgtaaaaaacaca

SEQ ID NO: 215964 - DNA, 1974 bp, Cannabis indica
caggcccaaatgtttaaggtctgttagagttaataacaactactaaaaatcctacacatccactgtgtagtaaatctctagcccttaaaactgaaataatcgggatccgagacccctgaacagagccaacatagacaaatggatcttcaccctctggctgaaaagttaccattttctgcttacaatcaacactagccgaataattggaaaggaaatccattccaagtatgatatcaaattctattaattccaactctactaggtcagcactcaactccctatcttcgatcctaactggcatagacctaattcgccgattagagataaccaactctccgctaggcaatagggttccaaatcatctttcgattaaatcacaaggcctacccaatagattaattacctgtgttgccacatatgagtgtgtatctcccgagtcaaataacacagtaaaacaggagttgttgacaagaagctgacctgtcaccacacaaggactagctggagcatcagcttgagtgatagcaaacacccaagcaggtacgagtttagcctctggcttatgctcttctttcttttcctgagagcaatctttttgaaaatgacccaccataccacactgaaagcatgtcttacgattgcactctcctggatgatgtttcttacaacgtggcactcaaggtaactataaccctagcgtcaacctgtgccttgattcccacgaaatctcttgctctgtctcgaaacaccagatgataggttagcctttcttttctaatcagtggtggaatcaccactatccctaccataaacaggatttggatgagtgggggtccaccaacacttggagtcactcgaggctcttgcagaaacttaaacacaccttcggctcgtagagccttctcaaccatctctgcatatgatgttgccttattcgtagtaatcaccaggtcatgtctaattttcacatttagacatgccagatatttctcctttttgctgaagtctgtaggcacaatacccaaagccagcttggccagacgatcaaactttgtcatgtattcagttactaacataccctcactctacaccagtttggtaaattctttctgcttagcactccgaactacctcgttataatacttggggttgaataaatcttggaactcttcccaggtcataatagttatgtctcaggtgagcgacactaactcccaccacacgagtgcgtcttcctggaactgaaaaagtagcacagttcacccaatcatttccaataacccccatgaaatttagaattctttctatcactatgagccattgctcagccttcactacatccggacctcccaaaaaaactggaggtgccagcttgcgaagcctctcataaagtggttccatacggttgccagcaacaggttgttctactggcaccgaaggaactaaaacggcccgagcttgtggtggaggcactgcaagaggaccctactgcctcaatctcagaatttcttcatcttactgggggatacaatctttcatttctgcaaatcttggctcccaacccggaggagcttgaggttggttcagatgttgaccaccctaaaaccttccacggcctctaccgcgaccaaagggattctggggaatttgatttccttgaccgcctccggtctcaaccttattaccctaactccttgtattttgctaggcgtccatttagtaggacttagcctgagaacccataagtcaagcagatcagcaatgatcataaatcataataccgctcttatggattttaaggcaacacattaaaataaaataacctatatagtaatatgcttgccaacatgctttaataatcacatacaacactaaacaagtactggcttaccgaaccgtgagctgattttttctctgatgacgattgtcatgtcttggctaatctttggtagcaaacttggcgactctgatacc

SEQ ID NO: 215965 - DNA, 677 bp, Cannabis indica
tttttttgatgagaagagttcaagtatataccttttttttaaagagaacagttcaagtatgctcgatgacaacacaagtactgctgtagatatctatattttttttttcttttgaaagatatctcatttcctagctaatagtaattttctttgaatttattattagttcattgactctaattgttgtttgcagctaaatatatatatctttacatactatttattatattactattaattggtcaatagaaagaaaaggcacatggattttttttcattcatgtacgtaattaagacacatatgtatacatacactaatggttgaaaacgagcattacaccaatgattagagttggtaataatatattattaatttttattacttcgttattctcatagtatacgctaccttgccaaaatataactagaatagtgcccaactatttgatttataaattattattatctttattattaaagcttaaaaagtcttaaaaagctttaaaaaaaaaaaaaaaaacgcttaaaaggtcaaatgtgattagttaccgacaaatatatagataattaattgttggaaatcgttaattggttgagccctgaaatcactcctcccgcaattaatgttgattaatatatatatatatatatatatatatatatatacatggaacatt

SEQ ID NO: 215966 - DNA, 1103 bp, Cannabis indica
tgcatttttcgtcattttataagcgacgcaataagtgaaagaaaaaagcattttcgtaatagatatgacatttttgaaccgacgtaataagttttttgtgatagttttaaaatgccataaagaatttagtgtcatttctaaaccgacgcaaaagataaaacataaaagtaaatattttgcgtcggtttgtaaatgtcgaaaattgttttttacgtcgtttcaaaaatgacgctaataaaagactatttgcgactacggtatatacgtcggttttttaaaccgacgtaaattctttaaatgactcttaaaaaccgacgagaattatactttttgtagtagtgaatgtatccgactttcataaaattgcatatttttatataaggcatatattctttttatttcatctattaaaaaattattagagattgcctttacgatttattactttttttttttaataaaaatggttcattttacttattattttgttgttccggacccaagataatacaatacttatgcttgttaatttaatttaattcaatactgtgatttgtagtggttatataattattattttttctaatatgatatgagttttttttttaaaaaaaaaaattgttgactggtgactggtaagcatgcctcttcttttttcttttgctgaatgcctctttacttctcatgttgaagccacaaattatgcttaaaatagtcacactttatctataaccttaataaaaatgagaatgttcatgggctttttactattgaattaccaaaataacctttaattaattatgaaattacaaaaagaaatatctcccatttagaagcaaatatgtctatttaataccttgtatgttaccttttttttttttttgagaaaagaaaaagtcatctattagtgataaataattttagtatctttgaattattattttctaattttgattctttttattttcttaactaaatagttatataaagtagtttatgcctttttcttacaacaatatatacatatagtttaaactttaacatataaaattaaattattttttgctaggtgaaatgttggtggagttcaatatttatttgaa

SEQ ID NO: 215967 - DNA, 516 bp, Cannabis indica
ggagtcgtgtatttcgaatttacacggtatttgcttttctttcaacattttgacttttataattctaaaacattttggcaaaattattatatgtttcttaatgggtgatagttctgtagctgacagtggtactagaaatgcgtttggtttcagtttgccggtacgattattatgtcagatcctgattgatcttgttgctttttcaggttcccttaagtgtaattattgtatggacatacgcattatttttgacggctggtggtgcatatgattataaaggctgcagctccaacataccaagttcaaacatactaaacgatggatgtcgaaaacatgcatataccatgcagcattgtaggacagatgcttccaatgcatggagaacggcagcttgggttaggattccctatcctcttcagtggggcatgcccatcttccatttgaggacctcaattatcatggtcataacatcacttgttgcatcagtggattcggtcagttacttataaatcaaat

SEQ ID NO: 215968 - DNA, 579 bp, Cannabis indica
tttttttttaatgtaactctattaagtgtattaagtattaagtattagtgcctcataatcatactcgagattctattatatatatattaggagccacgaagctaaagctaacaatgttcaaaactataaaaggacaactaggatctgacatcatgctacacatattctgacgtcattaatatgatttagaatttttttgctaaattagtataagtaaggtttatgaccgtacactaactacagtaccatacacaaacaaacctaaaattcctaaaaaaagagagagacaaaaaagaatttatagatggtttttaattaataccaatatcaatcaagtaattggctgaaatcccaatatatatacctcccaaattcccatataaattgtcctaaaataataatattcataatcaattcacacaccatttgggatttgtaaaaacaaaaaagtaaaagcacaacatattctcacgtttacctatgatttttctttttctatttttctctcttttccaatatatttatggattatttacacccataaatatatataaagaaaaagtgaaaagaaaaaaaaag

SEQ ID NO: 215969 - DNA, 578 bp, Cannabis indica
attattgtatataaaagaaaaagggtagtgatatctataaaaattattaatgattggatataataaaaaatgaaaagtggcaatgttgctatttataggcatgaagaagaagaacatcaaattcatgtacatgtgcacatcacatttatatgcagagttaataatgaagtactttttttttttaattattattatttgtttttttctttgatagaattacttaaataaattataaagattattatataaagtacttattttttttttatatttttatgtttaaagattattattattattttttaatataattttacggtattctataaaaataacataataaaaataactaaaatactacataaaagttttaagaaaataatatgcaaataacatcaaaaataaataaataaataaatatataaataacattcaaataacaaaaaaaattaacagtaaattaacaacaatacaatataaaaatacattaaaaaattattttttaataaataaaattataaatatcgtaaaattatttaaaatttcgtactaaccgtattttttataatttttaatta

SEQ ID NO: 215970 - DNA, 1092 bp, Cannabis indica
ttactaacttttttattttttagaatttaaaaaaacaatagtgattatagaatgctaattttttgtttttaacaaaaactaaaatttttaaaaagactaaaaaattttactttaattttgtgattaaaaaattaaaaaataaaaatattaccaaacgacaccatagcgattcatcacattttttatactctattaaaaatactcttagagtacatattatttttatttatttataattttttttgagtaattatttatttataatttaataaaataatataataataaaaatataattttaatgtaatttttagtggcataattaaaataaaataaaatttattgttaaaattcattttaacatttaggcatcattggagttggctattatgagtaactgctaacacctaaaacattcattaattgattggtaccttcaagatgtgataactgtggagcacgtgagtaataatactcttatttttaaggaaattctaggtgcatctttaaaaaaaaataagctaaaagacacgattttttttttcatttatatttataaaaataaaaaccgccgaatgaaaacaaattttataaaatgaaaacattataattttcaacctaacttcaaactaaaaataatttttataaaaataaaaatatatatatatatatataaaaaataaaagtaaaaaataaaaaaagcaatatacatgacaatttatattaataatcatttacgagaaccaacctagtagcactaggcactattaatgcataattgcaatgctcttaaaaaaaaattgttttaggacactcatatagtgcttagcacttttgtaagttctacttataattaatatcgttattgctgcaattcaatatcaaatctcacttattctactttaataataagattataaaaaactcttaaatagtaataaggcactaccttataattgtgctagcgagggagcttggtgtcccgtagcagtcatcatagtagcacaccatgaggtgatgatctataaataattaacggttttttataatctttattaaaagatttatatgtactgcatgtccccaaactat

SEQ ID NO: 215971 - DNA, 586 bp, Cannabis indica
ctttataaatatctaatataacaaaacccattcaacttctttctcaatttttccatttattttcttatttttctaattttattattatttaaaataacgtatcattattgatttataagaatctacaacaacttttattttattttatataaaaaactaggaaactaagccgctttgcgcggtactgtccagtttttataattttttttatgtaaatattatatgaatatatatttttacgcattgagtaatataatttaaaatataacattaatttcaacgtgtgtattataaataaagtaatagtattgtaattgaaaatattatttttaaaatatatagaaagattgtgatttctggacaaatattaaaaatgctaacaaaaaaatattaaaaattaataaatcccgaaataataataatatacatgtatactattgaaaaaaaaaattattagtccacttttaaaaattatagatattgctaataaataaattataaattaatagatgtactattaaaaacaatatagtcgacttttaaattataaattttgattttaaggctcaaaataaataactaaaaa

SEQ ID NO: 215972 - DNA, 1188 bp, Cannabis indica
gtggtccaagatttccatctgagggaggagccggaaggggtaagattggccccgttcctcctaacatttttccttttcaaaaatcacaatctcctttatctacaaatttataaactaaattagaaacagtttccaaaaacctattagttctataagctcaaaccaaatcaaaaatgaaaattaaactactatttaaaaaaaaaatgaaaatatcagtgttacacaaaacgcacaaagcttcaattccactactactaattctctatatcacactacagtttttctcattcttttactgaatgtaagaaaagagagaaagaaaaaattgcatggagtacaaaagtaacgatgagagaaagagagtttgcgattgaatattatttatagcaacatctagtgtttacaatgaaactcacggaagaagatgagattgaatattacgtggagcaggagcagccggtgctggatcagaggaggagacgggatcggccggcgagagaacacgacggcggagttttgaatctagagagcgaaaatgggaaggaaaggatcgagaaatgggcagaagagattttttcagttatttttttagatttttagggtttgaggtttgaacaaggagtgtttggcccaacttaaaaaaatgggcaaaggtgcattttaagcccaactttcaaataaatctaaagttttttttttaaaaaaatataattagataaaacaaaataacaagaaaataacaacaaaaaataacattcagataataaaaaatcaatattaaattaacaagaatatatttcaaaaaaaaaaataataagagtacattataaaaatacataaaaatatcatatttttttgtaaataaaattataaaatcataaaaatatttaaaattctatacaatatttttataaagttttggttgtttttatatatttgtgaaataatctctttttttcttatgaaatttacacaaaaaattaacatttttactgttaaataacttttttacatttctaaaaaaaaaaaattatttttacaattttattatttttatattttaattataattttacaatgttaacaacataaaaataacaataaaacaatataaaaataatagaaaacaaaatcaaaacaccatacaaataacaagaaacaaaaaaaaaaaaactacgaaaacaatca

SEQ ID NO: 215973 - DNA, 502 bp, Cannabis indica
ccaatgtttgactttttaacatttcaggtcaaaatggtggctatttttgctcaccaatcttggggagtttggccataggcaattttttttggctcactatcttcgaataacaagtggatctttgagctctactttttgaattagttattgaatttggctcactatcccgagtaaaaattggctctttttgggtcagttttggattttttagtagctctttttgaatatatttttaatcgacatttttattttttagattgaatcctcattagagatttttattttttctttaatacaattttagaatttaggatgaaggtgttgattatgcggtactaaatcatgtatgcagctggaatatttcatttgattatcattgcaccgatcccaaggatctccatataatacatatattaaatcagaatgaaatcagagatttggtggaaactgggtattaagaaagtggtaaggatgcactctggtttcacattggtgtgttttt

SEQ ID NO: 215974 - DNA, 652 bp, Cannabis indica
gataaagccttgtacgactacgacacataacgaattctagtagaattcgtatatacgtttatttattgtgtgcatttaattatataattaatatttatatatattgaagttatgtgatgtatataatacaaaatagaaggaaaaataatattcttcaaacgtataagtaggcaaattaaaaatacaaacatcataattaagaaaagaagaagatgaagaagattaaattacaagagaaagtactaaacaagaaaagcttgaataacttttaagaattttgtccaaaaactttatttctctttttaatattattcatgagtctagctcatagaaatgatgagtaatttacatacaatattgctgaagaatccaatataaaagaaaagaatgtaagagatgctcactaacattgtgtgtgaggtcactctcttaattaaaacttcccttaaaataaattatattgcaaacttgtaacatttttggaaaattaacacaataaaaaaacaatcatgtgttgcacaacaagagccacagcactgacatttctagtcatacagcgctgcagtgccaccaattcgatattattaggttgtttttttaagagcacttttgaactcttatgtgacttgaataactattacactatgcatgc

SEQ ID NO: 215975 - DNA, 717 bp, Cannabis indica
cgtaaaaagtagtagaatatataatatatatatatttatatatctagatatattgatatatacctgataagcagcagttccagctccaaaaatgaacccttctggaaaactagtcttatttagaggttgggaataaggaacaggctttgtagaagaagaagtggcttcagagagagccaaagagaaaacaatgaagaaaattagagggaatgccatgcttgctaccaatggctaatgttctctactcccttaaatactaaaacccctcattcaggcttgcaaaattggcttgcccagaataagtatattttattagagagaaattacaacaaatgactccaagcactttataagtaaataatcttattttaaaacttagcagatttttttacactaattatattttgccacataaaaaaatagtatattttagattttttttttaattttttttttaaatttaaaaagcatattacttaaatattatatggtatatctattttagttttatatctttctttttaattttaaagttatgtgatttttttttatggattgttggtacacatattttgttgtacaatatattttttttgttgtatgatatattattattcttagatgatatttatttttcatttgttatgtataatagtagcactacaagaaaacaaagacatttaactttgatttttattctagtttatcttcgctacc

SEQ ID NO: 215976 - DNA, 511 bp, Cannabis indica
ttttttttaaaccataaaatattgtaattaatgaagaaaaggttgtgggtgggaagattaagaaataaacggaactaattaatagagcaaacgtttagaaaaaagtaagcaaatgatgtggaaaaaaaaaattaggtggcagttaataattggagggacaggaatgggataggaaattggggacaaatgatttctttcctcatttgtttaaaagattttttgttcttttttgttgagttttttttttattatttttaaattttaaaatatatattttttatgggaattcacatagaaacctattagacattagtgataatttggattttaaggagaaggtaaattatgaatctcagctcatttttagtatgagccagagcagtttatttatagaaatattcagaatacaaagcagccgttaggcatgacacctggcagtgattacatgagcaaaggactagaatattcaccctaaatattccccaatcattacacaatgactaggcataac

SEQ ID NO: 215977 - DNA, 573 bp, Cannabis indica
tcaaagcaggagctaaggcagctgttgttgctactattgccactgccattccaactgtaagtccctccctggtcatagccttctacttcatatatacatgacattatgtttgcataaatattacaatttcgccctttatatagatatatgttagtttacttgttttgaaaaaaaaaatgtttgtttacttgcagcttgcaagtgcaagaattctgccttgggcaaaagcccatctcaaccacactgctcaggccctcattatctccacaggttactatactctttcatctttaatggattatattaatgcattaaaaagttgagttattatgatgaaatatttggtttttgttaatataaagtttatttaatatatctgatggcagtggctggggctgcatatttcatagttgctgacaagactgttctggcaacagctaggaaaaattccttcaagcaaaatcaccattgatagagaatcatataagaacttcaaattcggatttataggactaattaattagtgttccttgtatacacatgtaccaacatgtcttgatccttcatgtatta

SEQ ID NO: 215978 - DNA, 563 bp, Cannabis indica
gatggtttggaagagcttgctaacagaccaatggcggaggaggatcgacgacaggagctgagcaagacggcggagggggaagcaagtcaggccacgggttccacgtctgaacggtttcttcggatgcagcagttacaggaagacgtgggtttaggtgtgagtcgtgggaaggaatttcttggtcaggatgttattaataagtcaatgaatacaatagactttgcaaagggaatgggctttgtgcataatgggccagaactcactaaaagtacatatgatagtaatgttacacaagatgggtttaattgtgttgggctaaaggtttgtgggcctagtaatcaacaaaaggttatctcccagactaatgcacagaaacaatgtaatgaaacggggactcaagagaaggggactcgaagccgtgggattgatcaggatgaagatatttcagctgctgacaatgaaggggaaggacgaaagaggaagtgtgggaggaatactattgctattactcaaacagagggtagtgtggaaggggaaagattggtggctgacgcgatggcgga

SEQ ID NO: 215979 - DNA, 746 bp, Cannabis indica
tcttgagataatgataactctctgatctacttgatcaatcacacattgtcgatcaagctaaatgatcacaattatctttcatggaagcagcagatcctagcttccgttcgagggaatcaattgtaaatatccatccaagacattgctccaccaccatagtttcttagtgattcagatcaagctgcttatcatcaaaatccatcatttgcatgtggaaagggaggtcaaagatcaattgctagtttcatggcatctatcttcgatgactaagagtttggagggtgttaaagaagcatttcaatcttcaagtttcatcaaagatccttaaatttcgtaccaaactctagaacctttgaaaaggaacttcatctctcaatgagtaccttctcaaagttaagcaacatgtgaatttgcttgctttagttggagatgctctcttagctcaagatcacattgcatctatctttaagggactatcaagtgaatatgactcgtttatcatatcttccaatactcgaattgaagggtactctatggaaaaatcgaagctcttcttctagcctctaaatcaagaattgaaaagactgataaatatccaaaattgagtgtcaatcttgttgaatctgatactagaatagaccttaagaatcaatggacttatgaagaatttttcgctcacttcaattaaaattttagagaggtccaggagcttacaaaagtaaatttaaattaacccctcaccctat

SEQ ID NO: 215980 - DNA, 600 bp, Cannabis indica
ttttaataaaaattttctataaaaaaaaatatctatatatataaagaagagaaaatacaaggagaagatttgtttcaggttggtacgatgctcagtctaggtaaaccattcgagtaaggccacgcgtcacctaaccgtgcaaagagagaagccaaaaagtcctcatgcgaccagaagtccccacgaaaacttggggttagcaaatattatcccaaaagtctccctaatgacgtgacatagaatgatgtgacacatgacaagtatagaagatcaaggttggacgaacaagagaactttgaggagactctccagaagatgttagtcggttgtataggccggataaagccgtctaacatcatatatgtgttggatgaagtatatcgactagcttttaggggggatcaaagggtcgtctaacagaaaacgttcgactagtaagtttgctagaggaaatgtccatattcgtttcctcaacctatttccttgcaaataggccaattagcacacctataattgagagattgcgaaaataaaataaaaaattagagaatttgatgggattgactcattcaaatactaaatgcattattttgtaattaa

SEQ ID NO: 215981 - DNA, 807 bp, Cannabis indica
attttgttttgtaatccttctgcaaactcaatagcttattataactttgcaaaatttactctttcttttgatgaagcaagaatttagtgacccgagttacttgaatttatgtaagtttttgaattacttattttagtcttggcctaataataattatctttcatttaaaaaataattaaattactaaaaattcttataaaaatgattcactatccaacaatttcaatataattaattaattaaatggtttggttgaaccgactacctttttatatatatataattacatatgaagcttaatattaattaaaaataaataaataagagcagccaaagattagataagtataagatgatatgctttcgaatattagagtctttttgccttattaattaaaacaaaaaaattgaaaagataagataaactggatgtgaggttagccactcacatcaactcgatgtggagatgagagtaaataaaacaagtgtatgaaaatattagaaaagaagccataagctttatgcaaaccaaaaaaacttgtcatatatttattttctcttttagtgggtgaccacttcccctagtggcaaatgtacatttaccacttcttttctttctttttttggcattctaattatatattgtgtataaaaaaatatctatgttctatatggatcccacatacttgaatggtcaattctttcacatatcattcattttagaaagattaatgaaattgatattgattgtatttatatttttttactagtccctattgctctttccagtctcaaatgataacttgt

SEQ ID NO: 215982 - DNA, 745 bp, Cannabis indica
tagttaaattacttaattttaaactttatccattaaattttttaaataattactaatttaaaaaataacccattttaattttaaatataattttattatgaaattactaagagtgcgtttggaattaagtaactatgtaattactaggtaaagtaattactagggtggtaattacatagtctagtaattacactatactttaaaatgcaaggtgtgtttcgatataaggtggtaattacatatgaattcctaatatcttgtttgataaaatagttagtaattacatgagaaaataatattttttagtagctaatgtttaatatggaaagtttttagtaattacacagtgtaattacattcaattctcatggggggccatgagaattagagagtgtaattggaagccctcaattactttcaattacatagttacagggtaattacatggtcatgtcaaattgtgtaattacctctaattacacacaaattcagttacattgtggctttccaaacgcaccctaactaattttaaattatcaaattaacataatttttttttattatgtcaaaattttaatcgccataacatttacatttttggatatccaaaaatataaaaacctactctaaatacttcaaaagtttccaaatacatcagaattttataatatttttacatttacagttttttttttttatttcaaaaaaattaaatattttcaaaatatattaacaatttattaac

SEQ ID NO: 215983 - DNA, 893 bp, Cannabis indica
atttaaaaaatattatataatgttaatacaaataattaaatataaattaatagagtgaataataataaaaattaattttattttattttagctattttaactataaaataaatataccatttgatgctcttaattttgagatgacaaatataaataatttaacatattttttaaatataattttatattatatcttttatattttccatttattttgatattttgtatgtaattaatttttttatacgtgtaaaaataatagtttaaattttatttttggcaagtaaattaaattttgtaaaaatttacaataattttaaataaatataataaataattttaaaaaaattgaactataattttttgttgaaatttttccaccatttaaagtcaaatataaaaaaaaaaaattctttttttattaactcgaattaaatatgttttatttttttcttcaaaatgtcattatctttttcctttgtaaatattattagaatctatagtaaaaaaaaacagcaattttttatttatttatttttattaaagacatcaatgttattttgagaagggaacttgaataagttaatgtaattctttttttttttaatgtcaaattgttaataacccacgtggccacccttccactgagtctagaatagatgtatcattgcccattattatattttttattttttttattttttaaaagtgctcaattcaatactgctaattattattttttatttattttaaaaaaagtaaaaaagtaaggaccattattgtattttgtttggttatattttattagttgatttggcttggcatgtatggcttggttttttattggggggtacagttccttttgtttattactaggtctcaactcaaggcat

SEQ ID NO: 215984 - DNA, 502 bp, Cannabis indica
aaaaaaaaaacaaaataataacaaactgaccaaaaaactaaaagtaaaattttttaataataaaaattttaataatctatcttctcgctgaaactagtgtctgacaagaagaatttattataaaattgtgttctttccaaactctaatcgttaatcatctaatgaaagagagaactttttaacttcattaatggaagtcaccaaacaaataaattctatcaccaagttctttttattttattttttttatgaaaattcttacactaaaatctctcaaaattgatatttctaatacttctccttatcagggttaatttttttttggcaattattattattttatttttttttcataatcttttttagagttattaggatgtatcatatatttaattagtaactgtccttactttttttttatcaaaaagaaaaattttattgatcaaagcacaaagaacaacttacaacagcaagacagtccacaccagcaaccagctagcca

SEQ ID NO: 215985 - DNA, 662 bp, Cannabis indica
ttaattatagatttttaaatatagttagatgatattaaagttaatttaattattgtgactatacagaattttaaatatttttagatgatattagtgttagtttaattatcgtgactatacagattttgtaaaaaatttaaaaattaatgcagtggaaaaattacagaaaatctattttttctctatttttctagtgtaacgacggaaaaaaaccgtcactgaaaaaaattaaaaacggtaaccagtactttaaggcacggtttaaaaccgtaacctataacaaggtataggcgacggtttaaaaccgtgccctatgctatatgcaacaattttagagtttagggtttagggttttaaaccatcgcatatagtatagggcacggttcaaaaccgtcgactataccatgttataggtgacagttttaaaccgtcaggaagtcaacattagtgatggttttgaaccgttgcctattatgcccgttttgcgacggtcgtataggcaacggttatagaaactgaagggaatactttaaatgactgtttaaaaatgtcgggaaaatctatttttgtagtagtgccatagagccatttctctcatacataaagctcaatccccaattcagagctactgtcttagcagcatactctgagactgaacctta

SEQ ID NO: 215986 - DNA, 793 bp, Cannabis indica
aaaaattcagattaatcacacttaaaatgccaataaataataatcctaaaattgtatttcggccccgaacccggttctacccgaaatacccggttgtgacaataccgcgccaacttgtcagaatacacctaaaaaatgacaaaataggcatactacataataatataatccataagcacgtattaaattaaattcacagttttacccttctcgggtcaaaattactaaaatacccttagctcaccaatggggtcttaacatgtcatatctcatattaattcatatatattaaattatataataatataattccacaataatactcaattaactagttaggatttttctaatccatttcataatcttagggtattacagaatatccctatcttcaagagctattaaacctctcttgaaaatgtagtttggcttgagaatcttctagaaggctcgtggtggacctcgtaatttgttcagcctatttggcgctatctgcacaagttggacggctagccctatttttagggtctgtccgggatgtttgtctgccttggccaaacaaccatatttttagggaatgtttggcatgtctgtctgccttgggccagccaaaccttatttgggtgttgtccggcatgtctatacaactttttcgtacaactttgttgtttagcttctgtgtacaaccttgtcgtacaacttccaaggtcttgtagacttgccaggttcttcttgtgtaaggaaaaaacttgttaaaatttaaactgaatagaagaacatttttaatttctga

SEQ ID NO: 215987 - DNA, 510 bp, Cannabis indica
ggattcggtatcataagtcatatcatgttcccagaaaaaaaatactttcgagaaacgacgagcacgactgaagtggctataaatacaaatctatttacggatctatatgcttcgattggaactggaagttccagaacaggcctccttgatcgactgctccattcatcgcctaccacgggcacctcgactccccctgaataagtagggcctttccctttttttttgattgggtcatcaatacaaaaaattttacttttagtgaaaaaattgtgactaattttaaattataattcttatattgtgattaaaaaggtccgtgattaaaaatattagtcacaaaaattacaatttgttgtaactaaatgtatttttagtcataatacttgttgactaaaactaaattagttacaacttgtaactaaatactatattatagtcacatgaaatattttgttgtgattaaaagtaatatttagtcaaatatatatatattgtaactaaaaattatca

SEQ ID NO: 215988 - DNA, 781 bp, Cannabis indica
ccaaattttaacaaatttataattatttactatacattaataaagatcaagcagtttattttataaattattataaaaatttctcaaaatttaaataataattttaataacactatcataattattattaccaactttatttatatgtaatttttgaaggttatttgtgccacaatattaattatgtggctcgtaatcataatactaattttcttgggagttaattttaagtatagaattgggagattataatttgatttggcgaaagttttggaggtgaaattctaagttggatcaaggttcattggtggcaaaatagtgattcttgagacagattgacttgttattgttcaagcaattcctaataatttggctatgaattcttattttggatgtgtcattagggagtgtcattccttgctattagaggttggaaatattttattattttttgttaaaagaatatatactaataagttggtatatttcttagtaagagcttcttatttttcttcatatcacatttttactaagttgtctatttatttttgagttaaatgaatagtcctttttaattttttcttaatttacgagaggagattagaagaaatataaaactactaaattatacttataaccactaaatcttatcttttattaaaaataaaacactcacataattaaaaaaaaaatcaatattaaaactatctaaaaattaaaagtaggactaaagtgtgatatattcattcattttttgattgccattagaattttcttaaga

SEQ ID NO: 215989 - DNA, 522 bp, Cannabis indica
attgcgcaccaagtgcctaccaagagcaagctggggttatttggccggccatgtgcctgccagggtctagccatccatgcttcagccagggtttaaccggccatatgtttccgccagggtcggtaggtcatattactgccagggtttggtcggcaatgttcctaccagggtcaggcaggttaagtgactaacaactttggcaagtgttggccaatcttagtaggtgttggccacccttagcatgtgttggccagcctttgtacaactttccctgcgaaggacgggcttccttagtcaaacaggcctcttctaggtctgacagtcacctttggctggccaacttatgctcaaaccgtgtccagaaatacaaactcctcctgggcagcctatgtacgccctctaatcagccagacatggttgtccaaattcttgatggctcgcttaacccctctcgcttgttgcttgacgggtttgccataacttgttaagagactttgtccagctattgataaggttgcattc

SEQ ID NO: 215990 - DNA, 657 bp, Cannabis indica
atagcttcaatggagcatggatcttcgcccccaaacgttcaggtatgttctttatgtttaaatcaacccaacaaccccaacccatcttgtattttcattttttttaatcaaaatttttttgggtcttctcctttgttcttttctttctatctgtataatgttctattctccctctcttgttgaatctactcttttatctacagatcgatggaggatctatcttaatcggggctccaaaaacggtcaaaggttggggcttgaaaatggtacggggttcaaaaccttagttatgcggtgggaattcgtgacgggcttgaagttggaatctgtgggatttaatttttttctttgattttttttgtgtgtcaaaaggttcattactcatatttctgggtttacacttcattgttcattgggtttgtttaactgtatatgttttaattgtatagttctgggtttgttgaaaatatttcactgaaatttttttggattttatgtctgtgtttgctggtttaaaatttattatgcaatttttttaaaaaaataaaatgtgatatagtgacactctttagtgtggtcttactggggaaattaatttttttaaaaaataaaaatagatatagtgacacattgggagtgtggctgttgtgtttagag

SEQ ID NO: 215991 - DNA, 1253 bp, Cannabis indica
agtaccacattcgctcggatcacacttttccaaaaccacgaatccgagctcttatatttatgactcaggagatccttccctttcagatattttgcttgcagaatccgacagcaaagagaattgcacccattcaacaagttccatccccattttgccaggaatgccaagttcatctctcttgtcttcctaaatccacgacctccatgggacttcgggagacagagcatatcccaagctcttaagtgcacaccatggtttccacttaagagcttgggataagctctgtctcccgaagtcccattttatgtattatacagaactacaaaaatatacataatgtatataaagtagggtaagtctaagtacactcattaaacaagtatttcagtagatcttttatctgttttgacaaatagaaaaactttttagttatttttttcatgatcgtgtacgctataattatttaggataagtactcctaagtttttagaaaatttcaagttgtctacaaaattgaaaataaaatttaaatattttgttatatgtacgactatttttttcgtataagtgatgttagtaatattaaatagctacacgtacgcgataattatgaaaaaaaaaaatagactaattttttcaaaatatcgaaacagataaaagatctatgagaacgatctatcttaacccttgattcatgccaaaagaattagaaatacacaaaatatgattagagcttttttctttcagaagattttggttaaagtgatgtataatatttatgtttttttttcttcacaacttggtttataaattaatttattaagcttttataataaatatatgtttttgatgtagtaaatatattttgttagtaaaagaacagtttgattggtatagtaagagtgtttattggaccacatttaatgtttttaagcttgtttagatttgatctaattatatatggaatgttagattttaccattcaatcttattagatttcctagacattacaaccaagataacatgatgaagaagaaataaagaaagagacagagaaaagcatagagaaagattgagaaaagaaagagtgaattctcatatattgaaaagagtacagtgaaaagcatatatacaagaagatagagctagagccgaacggttcactaactaaccaaacaaagcaaagagaaggagaagaaatcagttagaacacaaacaactaactcttctaaccaacttttctaacagaatta

SEQ ID NO: 215992 - DNA, 500 bp, Cannabis indica
gtcaacttattcagttatggtcatatatgtaataattttaaataattaagaagttttgaggaaaaattaattgctaaaaaaatttgtttgataactaattgcaaaaattagttaattattataattaacattattttttcaaaaaaaaaaattaagcttagttagtatttgtttgccgaaattttcagaaattaataaattagagcttaagaaaagaagaaaatagtaaataaattgacaaataatgtttacgtagtttgggcgttaatgatccgtagtccatgagtcagttgtgttggccctttgggtaagtgtttggataatacaagtgtttataatataaaccctagctctgtactcatctcgtttctcttgatgaagaaaaaacttgtaggaatttcagcaggggttcggctaataccattttctcaccctttatacatgaaaaataagagaatttataggcttaaatgtgggcaagggtattctctttacccacc

SEQ ID NO: 215993 - DNA, 602 bp, Cannabis indica
cctcgtgtggagaaggcacaccctacttctggatggcatagaggatgaacagggccgacagatacttaatgccttaggagtgaactggatcggacaaaggcaaaagtagtctgccaccttcctgaagtatgggtgtaaaggcagcattgccccttgtattgtgtgggcacccaaccaggcacacatccccttccgcgggtttgtatctcagtgatttgaagcagggacgtaacattcaagtccacccagatagccagactggtccaagtcctacatgcgtgccttagtgatcttggacgaaggactcacccatctggcacctaaggcactttgcctcctgtgaggaactgcttcagtaagctcctcggtgacgtagtctactccctcgactaagacttcaccctctgcagacactggctccccaacctcattatatcctccaaagtttggaggttcagcctcctcttcctccttggcctcggaagggctgccaggacggacgtcatcctgttcctcaatctcttggacctcgatgtccccgttgttatctccctcctcctggacgagaagatcctattcggtgctcgaaagtgtggcgagtt

SEQ ID NO: 215994 - DNA, 578 bp, Cannabis indica
ataaaaagagctttttaaatgaacacagagggtatattcgtcataatccctttttgaaattttgcatacctttgattttggcggttgtcatatctttatttgtagaattttttagtatccaaccttccaacttcacgcagtgagtacctcattctttcttactaacttttctcttcaggcgtcttttctcgtttacgctacacaccaccggtcgtctcaaagggtcgagacgctagagactgaatttcgctaaattaaggaacataggatgttgtagccaagaagtagagcgatgctgaagctgaggtttcttgcactaaggatgaagtagaaaagcaacaccaagctgaccaacaaaaattaaagcactcgagaattatgttaaatttctccaagctaatcttgttagaaaacaagttgattatgatcaaaagctcaaggaattggggactggaaccaaaagagaggatcaacaatatcggtaaaaggaccatctatcagatttggtcagcaaccccgagttgaacttgagttttttttttcgagtgataaggctgaaactgtgcatgcttattgcg

SEQ ID NO: 215995 - DNA, 735 bp, Cannabis indica
ttttcatatatacatatagatttgacgtataacaatataaaatctaattactcatccaaactaaatgaaaatactaattagttcgattggatgttggatgtattggatttttagacaccccatccaccatccgatccgatccaattggatatttaaaaataacatccaatccgatccgatcacaattggatatccaatgtttggcggtcggttgtaattggatcggtcggttctcattggattggatcgatttatgcacacccctacgaaataccgagacctgttctgtttggggctaacttaaattcgaacagctagttgttgtcgtgggcggatggctgaccccatccttgggaagcgtacaacacgaaaaagggcaagacaagtattttatgcccttcgaagtaagttggatcagactaataagatagtagtttgcaatccccttaaaatacaaatacaacgacaacattgcaccctatttagcgtgaggtccccaccatgcacagaagccttcactaggatctgtggctagctccccaagagaaggaggaaagccttaaccttcctgaaaaccctcttcatcgagattagacaatctcttaaatgtcaggatggatggtggagagacccaccggggcacccccttgggatcccttagttatttatagggatgggcctctgtacactcctcctcaacataatcttggccagcttctaggcttctccagtttt

SEQ ID NO: 215996 - DNA, 503 bp, Cannabis indica
ttttttttatattttgattttttagtgtcctcctacttggttaaaatctcggaattagtatatctcagatatttttataaaaagtatatgaagatatttttgaggataataataataataataataataataataataataataataataataataataataatgataataataataataatagagaatatctcacagtagtagtagtttgactaaaatccaaatcttgtatattttaataaaaaaaattaatcatacaataagatattaatgattaaataaccataatattaccactaaaatacgaacttaaataatgatggcacaatatcatattagaaagtccagaaaactcaacaatgagcacgcatcagtcataaaattaaatgaaaaatcatgatatcctaatgttacttaaatttgtatttggtattgtttctatgatttttaccaatttacaaaattcagtatagttttgagaaaattaaaattttaatatgtag

SEQ ID NO: 215997 - DNA, 1069 bp, Cannabis indica
aaaaaaaaaaaaaaagaaagaagaaaaaaaattaagatagctcttttggttggtaacttggtatagatgtgattagaagttacatattaatgagagattttacaatgtactaaataattttaattttatatatgagaatatatattataattatttaaaacatctcgttaattttttataaaatttaaaataatgtaacacgttgaaaagtaaggttcaaaataatttaaaatagacagtttaaattttatttatttttttattataaattattttaaattctttggtataattgatggcttagtgtcacataaaaataattaaatttaaaattatttgaaatgtaaaaaatattggtacactttttttcttagagacattaccactattcatataaacgtgtcaatgtgtataagaatgctcatagtgacagttaaccgaatgacactttaaatttgttactagttcaatagtttgaagggttttacggctaaaatttaaatttaaagaattaaaccacaattaaaaaggttttgccgaaaaaaaaaaacaccatcaattaatatgatgctatatcaaattatattttattattaattagttaggatgaagtaggttacatatatatctttatatattaaaagtgtctatctaacggcatttcttggtttaacagaatatacttaaaaataaaagaatattctgttaaatttaacgattaggtttgatctcccgttaacaaataaacccaataattaaacccaaaaaattaaacaatcttttaaatattaataatctctttttaaattaaaaaaatacatcttagccacatatctctctaacaaacctatcttgggagaatattaataatttttttatttattttttaaaaagaaaaatctttatatattaaagttaacctcacgttatctaatgttttctctagataagcataggaagcagaaataccacttctatctttgtgtgattgcagatataccacttctgtcattgacccactttttagctttataaatggagatgtccatataatattaacactttacag

SEQ ID NO: 215998 - DNA, 500 bp, Cannabis indica
gaagataaatggctagagaaaaatcagcagcgagattcactgcctgagaggaggaaggaagaggcgtggctgctggtggagtcttctgagcagcgacggagatcgcgtccctggtgccatcgccggagaagaaggctatgtgggaggtggtgtcggacgaggaagagaagacgaagacactgttagtgcgagtggcggagggagaagaaccgctggtggtgccaaggccgaccacgatgctggcggggacggagccgaaccaacagagggcgtcttcaccggagacagagaagagggtcgaactgcgggtggtggcgttgggatggatttcatcgccgatcccaaggccgatcactttgtgggcagtgacggagccgaatccaccacggaagtcgtcgccagagtcggagaagacggaggcgtggatgctggaagcttcaccggagattcaaagcttgaagacgttttcccgaggagcagtcgcacagggagggtcggct

SEQ ID NO: 215999 - DNA, 749 bp, Cannabis indica
ctaaaaatctcagaacaattataagttaagcttaaaaaaatgaataactatagtaaaaaaaattgtcatatacaatgcaactttttcgttatttgataatttaatttaatttgtttttgtagttaattaattcttaaaataaaaatatttaaagtttattataatatcaataccgaatggagccacatatcaatattttcaactcttccaaacattttgtctctttggtattcttattgtttttatttactatatgatcatgttcgtattaaatattgaactaataacaacaaatattaataaaaagtagagaaaattaattgttaaataataaaaaaataatctaaaagtattttgcataaactctttatcaaatatttactaattcaagaatagaaaaatagaatatattaataaatatacatattatataaaataatatataattaattataaatgtaattagagttatatgttaattttaataagtaaatattataattatttattggtacatttttttataacaatatttattggtacaattaatggtgaaaatatctatatttgttgttaaaaaaattatggtaattaattaacataattgcatgtaaatataaacatattacaattatagatgatcattataagtttttaaaaattccaatttatactataacaaatgttatattctcttacttaaaagggataaatattattaatttcaataggaataatgataataaata

SEQ ID NO: 216000 - DNA, 517 bp, Cannabis indica
ttgcatgtcctgtgaacaaactcttaaaacgttggttgcagtctctccttttcttgttctataccttggcttatcagcttcgggtacccaaactcttacataggttccatctaatgctcccaggcaattctacattacatttattgcactaattagaaattattaaatttaacaatcaacaactataattttgaatctataattctcaccttaaaccatttccaccttggatctattgaggtctctaattttggctcaggtgttttccaaaattctttttggcaacgaatcattgcatttaaacattcatgaaaatatttgctaacagtttttcttgatcttttgaaactataaccaacaactcgattcttatggtggtgtgctagaatgtataggaatattgctaccatctcctcgacagagacatttcttgtttttcttaaatttcccctactgctaagtatgttacatagcctttgaaatgtttctctattcattctcaattgtgaaacacaat

SEQ ID NO: 216001 - DNA, 635 bp, Cannabis indica
actaaacaaataacatcaaatgttaataataaaaataacgagaacatctttatttttatttatttgattaacctttcctttttgtaacttcaaaacctgataagtaattaaccaaaccaattttctcttagaagttaatcaaatacgagacgtgatgaatttaagctggacactgaaatccaggtggaggagtcttcccacagtcagcgagaacttgaagagcaattgggaagataacattaacgttaaggagcttagccttaatagaagtacatagacaaactgcagcgtctaagtctaccaagcctttaagcactggacaacacttgtcctttgcacttcccccgatacctatattgaccaaaccgcccaaaatatccacacaagccccgagctttagagtgtctatgggacacgtttcctgcgttggagacgatggaggacacaccgaaggagggggcttaggagtcacaggctctggtgttgaaggaggggggcttaggtaccacaggttctggtgtggtaggaggtggttttggtataataggtgaaggtgtggaaggaggtggttttggtaccacaggtgttggtgtagtaggaggtggttttggcacaacaggtgacggtgtggtagg

SEQ ID NO: 216002 - DNA, 941 bp, Cannabis indica
tttgtccttgtcaaataatttttttcttatatatacttttttgctttttttgttttttttatgtattattttttggtaaataatttcttacagcttgttgttgatactttaacttatttgatgtcatatcgatatgatactaagtaattagttagtaaattttttatcttttgtattttattattttttttataaatgatttgtagtattatttttataaataatttttgtactattatgttttcggtgtgataccttcaaatgttcaataccatatttattcaaatacacataattggttggtatttttctaaatcatattaaattaaaattggtggcaactgatattaaaatgcatcaataacaatatattaccttgtgttttgtaccttaacgtatcccttaacattttcgttattaatatatacatatatttattaacttctattagaattttattttttattattattagatataaatttacaatagcatctttaataaaatatgtaaaaaaatgtaccatattttgccaaaaaaaaataacttgtgatattttgcattaatttttagcattatacataattgtgaaaattgatttaaaagttatttttttttacttttttttttgttatgaataattttaaataagtaaacctacactatgtcttgtctaaatataatttctttattcaacaattatttaattataatttataaaagtaaaatgtatgattataacacataactttttttttttttattagaaattaagtctgaggcttgtcctccacacgcctagtttttattatatatatgtgtataaaagaatgtgaatatttaatagttgtgccacctgacggtgatgaattggttaattatcggacaaagtaacatgtaaataggagaataggcgatattgctttattttctttgtttgt

SEQ ID NO: 216003 - DNA, 898 bp, Cannabis indica
gtcagttttttagaaagttgttcactcagggttgccagtcccagaaggagtctgtggaaatgatagttgagtgtggaagagagtccccgaatgactaccatgtttgctcagggtccacgtcttcaagaaagcttaccactctccaggagggagttctagttggcctactgtccctcctgaatggtagttctggataaacgactcgtgcaggctctatcctatccggaagcgtcatcagcaagtgtccttggtccgtgagtccgggagctcatatatattctaggaagctctgataattaagctgacatggagacatcgctcaaagaggagttggttaagttagttatttctaactaacttaataacctcgtttcttgcagccactgactttaagatcttgatcgtaaggctatacataccaccttgattggttattttagtatatacgagattaagaacttagagagatgagattgagagcttgagagagaaaagattgagaggtagagagaggtgcagagaaaagagagagattgagtttgggttttgtttatcatttttttttattttatatagtctgtttgctcatgttttactggcgattgttgttcttaatttgttaatcttgttattgccaatagtttaattgtttaaaattttattaatttgattttgtacatttagttgaaattttccacaaaaacatttgttgcaatctctaaaacagagatagaaacagaatttcaacagaattacaacaattaactaacacaacaagtgattgtaaattgtaatcctaactaactctagcataaaagctaaccaacttctaattgtttttgtgatttaacatgctctcttgccattttttttctgacttccctgccaattgaataat

SEQ ID NO: 216004 - DNA, 502 bp, Cannabis indica
taactataatctctagagagagaaatggaaatttgggcaggtcaaactcatcatgctaaataccaagttagtttccacgctttgttatagtttgtacgcaattaactaaataaccaaaaaaaaaaaagacaacaaaattaaagtgtagtttgatggaaaaaaaagtgcttaaggctaaatctaatcattaataatatattctgacttgtcctctcaccacacaaaatcattttctcgtatatctccaccactatcatgctttcctatttatattaattttttttttgatgaatcctatatacatttattattatataaatacactattaaattgtattaatagtcatattatattttataaaagtgttagacactataagtatcttttaacatttagacgcctacgagtggtgaactcaaaactaaaatttaggaggtaataccttttttctgtaaagaaggcaaatggtaaactaaatattaaaaatagcgataattttat

SEQ ID NO: 216005 - DNA, 750 bp, Cannabis indica
ttattcatcaacacctgatatattatcatataatagagcatataataacaataaatgtgtgtactacggaaaatttatatatataaaacaattaaaaggaaatatataaatattaattttaaaaatattaaatttttaaattttaattaattgacaaataatgaaaaaaaaattaaatttatatacttaatttaattattttatttaaaatatctcttttataataaatcacaaataaataattatataaaatatctaaatcaaaatactacataactattattaaatgaatcggttcaatccattataaaattaacatatcaaactaacacataactattaactgatcagcaataattaattgtgtccttttttttcaaagagaatttttgtactttttttgaccaagagaatttttgtacctttaaatggttaattggtgtgattttataaaaacaaacaaaagaaaaaaaaaaaaaaaaaaaaaaaaaaacatcatttctttccacttattctctgattcaaccaattactaaaatctaaaaagaaaagaagaccaagaaaaatcaaaaaccatttataagaaacatgaccgaatacaattatatatatggtattatattgcgtaacgagcctaaccatcttaaactcaaaagcaagaataaataatgtttgacctatttgtttagatatatatatggaacaattttttaataagtaataactattgatgggtactaaaaaatatat

SEQ ID NO: 216006 - DNA, 885 bp, Cannabis indica
gtgtatttttttttttgaattaattcaattttgttattaagtgtattatacttttattattttaaatgaaatgtttaacaatttctttttaacaattcactcacattcgaaccaatgaatttgagttagcaaagtcctaaagtgattccttgccaaaaaaaaaaaaaaggttagagatgcaaaatgaccctaaatttggtaactaaattagttaatgtccactttttaaaaaaattaaagaaaatggccaaatctaataaattagctaataaacattataaaaatacatttatcacatctatttttttttaaaaaaatatatataataataaaattaagttacataatttttttagcattgcatattattatattgtaacaaaaataaataaatatattagatcatttaaatatatacagtagtattagatatatcgtattacaaaaaattaatataccgtagtaataaaattatataccataaagaaattataacaatgttaaatatacttaaaatatatatatatatatatgttgctcctaaattcgcccaatatacgtggaccagtcaagaggggacacgtggaccaaattacttgagaagaactgctaagtctttttatgacaccaggaagcgctattcgcatgggtcccggaagatgtacccggagtacaaggtactcccggaagcgagcatagcttgaaggcactccgggaggtgtcaggtctctcccgagaaatcaagtcgcatttaatgctgcatgggaggaagcgtgttgggactgtaacacgcaataaagtctgacggcacatccccccaaacaagcagcgctacagtaatgatcatttaagtctagcgacggctactctgcgaagagtcacgtc

SEQ ID NO: 216007 - DNA, 574 bp, Cannabis indica
taaaatgaaacgtgatcattctcacgtttcattagatggttatgtattttaaattttaaatgtaaatatctgtcaacctatattcctataaataggggcagaatccctcagagaatgggaggaaaatcctttggaacagacaattaattgtatattgtattaaatactcaaaaatatcttgaataagatagatttgtggagtatgtagatttaactgcaaaagcacgtaaaattcctggtgttattcttatatttatacattataattattatacttattaatctgtattaaatttattacgaaaaaaaaggctcattattggttaatgaaaatctgcgttaacattaactatgagaaacataatctaaattttaaatacaaactatatatgataaaaataaataacaaacatatgaacttatataaaaaataataataaacatacatgttttatttataaatttgtatttacattttaataaacacctaatatgtacatatgatcacaaatttggtccaaaaaatatatcattacaaagattatcataacaaatagattagattaataattaa

SEQ ID NO: 216008 - DNA, 721 bp, Cannabis indica
gatcacttagctacatttcttagggatgcatgacctccattgcaatcactatcgcatgctacatggtggacccatttttggaaactgaaattgtctcgtaaaatcaagatttttgcttggcgtgttgttcataatgctttgtcccttgctgctaatctccatcataagcatattattgaagactttgcttcctctagatgttctcatccttgtgagactttaatccatggcttggagccattttgacttattttcaccttaaattgtctcttcgtagcttttggattctaattttcggcggtaataatacttaagttatatttctggaactcaataggtacctaatcgttaaatgttaagccattatatccacgtgtcattttcttattggtatacttaaactaattttttttaaataataaaaatttaatgagttggaccaattaaggattgtctcgtgacaatttttttaactaggtacttacagaagttccaaaattataacttaagtattattaccgccaaaaattaaacttaaatatttatttgcaactgggagttaaacttaagtatttatgctgcaaattactcttaaatttattaatcttttaataacaatctcaatccctttttgcaaactcaattataattacactacaaaacttttttgaaacatatgcaacttaggattaaaagcaatgctaagaacaagcaactctat

SEQ ID NO: 216009 - DNA, 796 bp, Cannabis indica
tgttatttttttgttgttttttgttgttattttgatgttattttcatgttacttttatgttgttttcttgttgattttatgttgttttcgtgttattttttgaaaaaccgtaaaaatgtaaaaaaaatattctttgaacgtaaaaatgtaaatattttacaaaaaatgtgccttatgtaattattccataaattaaatgaaaaaaccaattcaatactaataaaacaaacattttatcttaataacacatgacaaaaaaaacattcgcaacctataaaagaataaaaaaaccaataaaaaattattaacaataagtaaaaacaacaaataataaaataatattagcttgctaaataaataaataaaaagtattagtaaaattagagcaattgaaagagttagtaaaaagtattgctcaatatttgcctcatagtattttctttctttttatttatttatttatttttttttttgtagaaaaattacttttactaaaggtcatccatttaatgtgatgtatgattatagtgggtaatttttaaaattgtcaatcattgaattattttgtagaaaaatatgttaaatcttacgtgaatgagagaaaaaataaaaaaaattatattttaagataatatatgtacttttgacagcttggagatctccaatagggttaatataaatagttgtccccttactctcacctaatacatttagccaattataatttgttttgttttttattaattaaaaaatttaaaaattctccttacttcaaaaattttctaccatctctctt

SEQ ID NO: 216010 - DNA, 612 bp, Cannabis indica
atatatacatatttactaaaaaaatctaataatttcttttagttagaagataattattttttttaactaatgtaagttttaatgaaaacaaaaaaaattagttgtaactaaaacataagaatatttagatataaattgttatcaatatagttttagtcataataagtataaaattgtgatttattttgtgactaattacttttagctactaatttatttaagtgatcacaatataagaataataatttataattagtcacaaatttttttatttttcatctttagttataaattttattgtgattaaaattaaagttattttaataattattagaaaatatattcatatatataacgactgttacttaactttaattgcttattaattggtagctagataggttaatttagttgatgatgccttttagaaaacaaaattacatatataattagactttagtgtataatgatctatgagtaattaggtcatgtattatataaagtgtacgtatgtatactaatatgtatatatagttaatttagctgtggtcattaattaattaatatttatataatagaaataaaaatgatgatgattaatgagatggaaat

SEQ ID NO: 216011 - DNA, 526 bp, Cannabis indica
atggaggacacgtggatggataatgtgaaaaggaaagtgggattgttgatttccgggtcgggtttattaattattggattattacacgtgaccgacctcgtgatgtgattgtcggcatgtaattttccttttttaagtaaatttacaccctgttatatccgagttcaattttttctatgaaaaatcgtatgaaaacgacgtcgtttactgtattgaacggcgtcgtttatgtgtgcatggaaattatggaaaggaaagtgggtttgtggatttccgggtcgggtttataaattaatgggattataaaaaatcttacacgtgaccgtcgaccgacctcgtgatgtggttgtcggcatgtaatttttctttttaaagtaaatttaatttatatccgagtctgaattttttggtaaccaaacttatcatttagttaaggatgtgtttggaagtaattgtgtaattactaagtagggtaattactagagttgataattatacagtttagtaattacactatatttaaaaa

SEQ ID NO: 216012 - DNA, 832 bp, Cannabis indica
ggacagttttgtccatgtcgtttttgattgacattgagttggtgtagggggtattcttggaagacagaaaaaaatcctacagaaagtagaggaatgatcgatggatcaattgatggaacatctggaagtgtggaagaagtatctgacagaggagtttggccaaaatttctagatctaatagctcgagttctaaccatggtgattatcaatggcagaaaaagaaaaacagagaagaaagaaagaaaacaaaaatagaggagaaagttttgatgcagagaattgaatctttattaataatcaaaggagtatttatacagtaagaaaatacaacaaactccaactggtagcagctgagttagttaggataaaacagtaaaaataacagactataacaacctctatacataaccaaactaatatctctaagacatgctctaagcaactaaaaatgtaaagttggagaacgcctcactcctggagctggaggtgctcgaggtggcggtggagggctcttaaaatctgcacattgttttggctcttagttaattgataatttacaaaacaactattaataatttatgacaaattaaattataatagagacaccactttcaatgacagatgtagaatacatacactagggcaaagtgcaaaggaaaaaaaattgggggtaggggaaggagaaaattagtaataaattataatataattttcttttttacctaattatatgaaaacatgaagaaaagaaaaaaaaaaatggggaggggttacaacctcacatagtctccaaacagctccgtctagtgactactaattttgttatatattt

SEQ ID NO: 216013 - DNA, 720 bp, Cannabis indica
tctaacactaaattcttcaattttagcaccacagccaccaaaatcatttaaaccaaactctaatcaagcataattccaacctaaaagcatctcctactctcaatttgaaatcacagctctaaaatcccataatctatattaaaacctaacctacaacttctagaaatcaaggaaaagaagtaagaacttaccttaaagcttaaagaatccttggattaggttaaattccgctaaagcttgagaattggtgaagaatttcccttcttgcaactgctggtcattggttcgaaggggagaagaagaagggaaatggtgttgtgccatctcttaatttctaggttttccttcaaaaataattaaaacctaagcacatatcataattttatatttatttatttttcttcctcaacccataaaagtcacactaaagacaagaataacaattctaagaaaagactaaattgccccctcaaaaaccttaaagcattaaaatccaccctaggggtattttagtcattacaaataatccgtcaaatcgacaacttaaaattctaaactagtcctatgtaatttcaattcaattcatcttttattatagtggcttttctgacctccccaacaagttccacagttccaggcccaaaaatattttattcgaattatggtatctacgatacccacatattccaatataatcccccataacttaataaacttacg

SEQ ID NO: 216014 - DNA, 695 bp, Cannabis indica
attatggtaggaagattgtctcttctaggtgtgctatcaaaacagacttaagtaaagcctatgatactgtagattggggatttgttgaggacttacttgtaggtttaaactttccctccaagtttgttaaatggacatgatgtgcttaaggggcacttcttatacgatcatgatgaatgaaagactttaaggtagctttaaggggaataaggggcttcgacaaggggatccgatgtcgactctcttgtttgtgctcattatggagtatctcacaagaagactgatattggagaccattaaaaaatattttagatttcatcctatgtgcaagagtctcaagttggttagcctttgtttagcggatgatttaatccttttaagcaaaggctctcctactgttgttcatcatcttaaagttaccttgcagagcttctcggaggttacaggtttatttcctaataagtctaagtctcaggtttattttggaggtgtcttctaatgataaagctgaaattttgaatatgctacaatttggtgaggggtcattccctctcagataccttggggtctcgttaaggccaaccaagtggagacgagaagattgtgatgctattcttaagaagattaaaatgaggccggttacctgggtcactaggcatctctcttatgctggctgaatgcaactgatccactcc

SEQ ID NO: 216015 - DNA, 1291 bp, Cannabis indica
atcatcacatcaattggtatattattatcaaaaagaaaagttgagacaatattgaagaacactaacattattagtaattattcatcaccttctgaaatataaatacatagatatataaataaaagatatattatgggattaaattcttttactgatttaccccccaaaaaaagatatactatgtgtagtattattattaaaaatcgtttaaagaaataatatattctgaatgaagtataggtttgttcaaagaagaacaccagtttaatttttcttttttttttttttaaaaaaacgaaataataaatacacatgttaccagtacttagagttactaactcgtctaaaaaaagaaattaaaaaaaacaaaataatacagaatatatatacgtatagatatctcaagcgattgaataaacccctgttattaatttaatcattatcgatcaatgcatacttgcaaatatgaccttattacaatatataagatttattttggttcgagagactcttatatataaccactttatgaatgttatatattatattctaattcataaaatctgactcattcattaattttattatatatttttctctatctacatatatgtctcgcatgcatgtaataatatttaaaaacaataataactctttcataagcatgtgaaatagaactgggatacattcaggccacgttgactgatccgtagacaaagtcattttagtaattcgacctacttaattactataattaagttttatctcaacaaaactattagaggtcataaaaatgtcttgtaaaatcactccacaataagaagcatcgattgattaattgttaagcaacgcgtcattaatacaatcgaactaaactatgagacatatgagagagtacaagtttgacagtttaattaatttttaaaattttttatttataaaaaattaaacctctaataaaatccacaaaggttaacatatttaatataaattagattaaatgtgttaaattttaataggtttaataagccactaatttttgattgaggatcttgattcgttataacaaaatactctatcaattagcttaccatgatgacgaagttatttcaatcaatcatgagaaccttgtcttacaaaaatcttgagttttatgggaatattcaatttccatacatttatatatgtatatatatatatatacacacactacttaattaactgatattttagttaattttattcaaattgcttcctgaagaaaataaatcaaatattcgtaaacaaaatg

SEQ ID NO: 216016 - DNA, 540 bp, Cannabis indica
attaaaaattgaggtcttgatgttctgtattgatgttattgctactgctcattatacattaagaattaatagttacttaaactttaaacaaataaaagtaaaaatatagagaaaaagaacaaattaataggattagagatagatggttgtggacattaaaaaaaaatgtatgtctccaaattatagaaaaatattttgatgagtgatatatataaagaaatagaaaaataagaagtagagagaatattgataatacctattgaaaattaaggtcttgatgttattgctatgtaatgctcattatacattaagaattaatagttacttaataggattagagatagatggagaattggattaaaaacaaaaaaaataatacaaaataaaaataaaagaagaagaagaaaaagagtgttgatgagagagatatataaacattatatatatatagatttaaggttatatatgttttaaaaattagagaaagtttagggttagatatttaaattttctttaaatatatataataacataaaaaat

SEQ ID NO: 216017 - DNA, 622 bp, Cannabis indica
tcaggtttgttttttttttctctttttaaatgttgattctagtcttcatatttggatttaatacagtataattatgtgtgctctgtaaattatgtgtacttgtttaatatttgctgtgctccaaagatggctttcagtttgccagatatacgtcatattccagctcctgccatcaaaggttcaggttggtagtatcttctgcaaacaatgtcacctgaagccctagagattaccaggaagtttatgaaccaatctgtgaggattcttgtaaaacgtgatgaactcatcctgaaggtcttaaacagttctatgtcaatgttgaaaaggagactgaaagctcgaaacactgcgatctccagaaacactggccatcatctgtcatttttgtaaacacaaggcgcaaggtggactggcttactgacaagattagaggccgtgaccacagtgtctcctccacactcggtgaaattgacccaaacactcgtgacataatcatgcgtgagttctgttccggcccctctcgtgtcctcattaccactgatctgttggtccgtggtattgacgtgcaactagtctctctttttgttttttttttttttaaaaaagactagtctctcttgtg

SEQ ID NO: 216018 - DNA, 1261 bp, Cannabis indica
acacaaaatatgggacaagagtgaaaaacacacattcaaggaaaataaacataaagttgtgatttcattttcaattcctcccacgttgtacttgtacaacttttttaatatatatttttattttaaggatgaaaaaatattatttttgaagatattttgtcaaatgtggagcctaggttgtctcaagtagaatttacacgtgttgacagatatgagtgtggacctatttctatatataataatattgttgcaatatgccatcattattattttttattattattaattttggcaaaagaaagaaatcatccacggtgtaattatagctaactacttctgtcgtcgaatctacactgttgctcttgttgggccccattttccattaattctttctttctttcatttattttaactttcatgtatatcactgtctccattttctactgtattttgtaaattaaattttacacaaaaaaatatattaatgtttattcggctcactgtttgtaataattttgcaaaattgcatacacaagatacaaattaagtcaaaaaaaattaattattaataatagctttcagtattttgttgtagaatgtacactttttgtttattattatttttaattattctaattactatagaaaatttatataatgtacttaaaattataatgttttatatatttttactgttttttatgaattatgtttttttttttaaaaaaaaatattcttttcatgttatttttccgtaataacacgtgaaaataatatttttgtaaaaaagaaataataaaataaaattcataaaaaatgtaatattgtttattttgcataattattagtggttactatctttattttgttaaataattttgcaattcctaattaataatattattacaaacaagaaactctttgtcttcttttctcttgaagaatttagataaactaagcttgaattgaagaagatttttgtggttaattttcagagatttgtgaagagatctcttacaattttcacggttgtatatattgatagaaactggggggtttttaccataatgaaagattgaaagataatataaatatatatatatatagaacactttttaatgggtattactaaatactaaataaatttaactataaatattaattttaaaaatatcaaacaatcgaattttgatctaataacgaataatgaaatcacaaatttaatttttatgcttaatttaactacttaattaaaaaaaat

SEQ ID NO: 216019 - DNA, 579 bp, Cannabis indica
gaaacacattatatactccgaataacgcaagatttaaggctagctaataggctacctagcctatttactccagtgaacatgtatctaatatctttctcgaaccacacttatttaggtacctaaccagtagtacatttaattatcacttttagacaaacaatttgtcagaggaagagattattctagataatctaacctttatcaaatatgctcacaacatgtttctaatattccattgatcttctcaggttacccacctttcaagaataaaacatcatactattttcgctttaacttccatggttcttattaaccttctttaattcttaacatcatagccaaagatatcaaccttggaatttcacaagattagactatttcttcgtatgaattccatatcctaatttattgtataaattgtctacactaatagacaatatattaactcggtatgtccaatcgttactactcaatcaaaatcataagatcctacagtacataattcgtaattatgtctttctattccttctatgggacctcctaagcttatctattgacttaacttagtaacaagttaag

SEQ ID NO: 216020 - DNA, 540 bp, Cannabis indica
aattaggtaattaatatcacagcgattattatatttacatctaaatgcgtctcttataaataacttttatggagttcaatatacaattaacatgttttgtacaaatataattcagtcctggctccccttggcttcgtccctaatataaaacgtctttgttatgattttaacataatattattaaataaagatgaagaagaagagaaaataattaaattgatttggctatatatatatttttcatgacaaaaatctatctaatctttgcgtggttataatgtaataaattagtaatattgtatataattattcttattagtcacacgtatgtagaagttgaggtaggaaacatgggaatatggctaaaatatataggacgatcaaagaaaactgactttgccttcgatgtctaaattacatatataaattatatatttcccaaatgtttttgattaactttataacagccccccattggcatgagcacatcatgtatatatctttcacaaaatcaattaaaatattaaaaaacataccaaa

SEQ ID NO: 216021 - DNA, 1446 bp, Cannabis indica
acgagacagggcgggtgcggggattgctcccccacccccatacccacttcttaaattcaccccatacccgcctcaatatccccgtttaaattaaagcgggggcgaggcggagattacctgacgggggaaggattcccattacatatattttttttttcaaaaaatgatgtctcgaagagaattaaaaaaaaataatcataaaaactcagtaaaacaataaacttaagtggaatagtgtgtacaataaaaaaatgagtataatcaataaaaagcttaaagtatgaaattattttaattatagtagttataattttaaaacttaaatatatacatatatcatatcagggcaggtatctattcccccgctcccgcttcgtttccgactcgagtatgaatctttaaacccatagccgctcccgtccccgaaagtctatatacccttgtacctaccccattaggatgggtacccgcggatataattgtcatccctaaaaataccttcgtattatattttattaaaatatacctatttttttgagttaagttgttcaatataccctcattttctacttaagtctaacatataatttacattaacttaggagtctaattgggacatcatctatatatctttaaaaaaatataaaaatataactaaaaatcaaaataagtaaaataaaataggtatacaaggtatttcttttaatataataataggtacattattttattattattattattattatttgaaatgcaggtacattatttgtataaactagaaaaatcttagctcaaatttgaacaacaataaactaataaactgcatgatcttttttttttttattgttgtcatgtggtggattaagtttgtgggagagaagaaagaaaaaaaaaattaggcgagggtgtcaactgaaaaaaccatttctttttagtagatgaggaccaaagaaacatattttaattaaatgataaatagaggcataaattatttttttagtaatataagtatttaacaattgttgagtttgtaataaacataaactcaataatatttttagtagcataatactaatatttataaaattgtaattttagatactatacccctatttaatcaaaattaaaatactaaatatttatattatcactttatgagtcatcactacactaaagaaagctatttttctttactaggaaagagctatcattttgaaaacgtagaacatctaagcaactataaaaaggaagtataggctgaagatattaacatatgcgaaaataccataagagagtaagcaaagtattgtagtcaccaaaaaaaacaaaaactacaagatgaagtcctgtttcttacttctgattggcattttcctaactacacttgttctcttcccatcttcatcctgctcgaacttggccgcgagtacgcattaatctata

SEQ ID NO: 216022 - DNA, 736 bp, Cannabis indica
aaaggggaaaaaagaaagaaagaggatggagagggtgcctcaaaatctaatatagcttcaaaaaagaagaaaactaaccctcctactgaaaatatctccaatatccaagtgaatccctcggcctctaaagttgtcccaaattctagccaacaacaaattttcaatgtggatgattctttcaagagagtcgagtaacggaaggaggtactcaaccatgctaaggtagttactttcaatgttgagaaatctaaagtccctctccttgatcctactcttgctctagaccacttagttggggttacagaggacaagcttgtgtttgaatgttaacctcacttttagacaacaatgattagtcaattaaagtgatgagatgatagataataattaatatatttaagcaataaggacactaaaatttaaagaggttcaaccccgtgattatggtaatagcctagttttctttacttatattaaattgaagaattatcaagatcacaaggagttggccaagtgagtttcttaataatcctaaggaaaattttacaattttagacagcataatatctctttaaagaatcagaaatcggatccctcaatagtgaaatgactccactatgtatagaggaagaaatacgttcaattggtttcctaaaaaaatttagaataaaagggaactaaaatagtctctattatcattttataatgcgtgttaaccccatcaaagtagggattt

SEQ ID NO: 216023 - DNA, 539 bp, Cannabis indica
taatccagttgaattgaatcatctgatcccatccaatggatgtattagattggctcggctccaaccattggattcattaactagttttctattggatcggttccaatcaattttaggaagatatttttaattattttaaatattatttaagcaaaatttatattaaatatttgttataaaataatatattaaatattacattatattaatttattgtgtagttatcaattctacaataaaaatttacaagtaataatcacttcacatctaaaaatatagtatatggggtaattttctcaaaaatatattgtattttaaaataaaatgaaactattctataatgattacataaaatatattgtattttaaaataaaataaaattactatatagtgattattatattctatactaattacacagttacttttgaccacattattatcattgattaggtactaggtagtcaacaataccattgtctgtatagaatataggtcacaaaattcgtatccttcggaacattctttcttcttcaga

SEQ ID NO: 216024 - DNA, 813 bp, Cannabis indica
tattattattattattattattattattattattattattattattattattattattattattatgtcaaggtgttcttttaaataaacttgtttttctgcttaaacattttttttttaaaaaaaaataataaactctaaataaaaagaaagccaaaaggggataaaaaaaatttaacaacaaaattcaaagggagagcccaactaccaaatacgacactcatattagagttagtctcacattgtttatgtctggaaataaattatcatatataagatgaatgagctattcctcccattgtcaattagttttgagatagaattccattcatcttatcccaaattttaaaatggtatcaaagacacttttgattcgttgagtccaaactgccaccgatctaaaaaagtgaaccataaaaagagccatttgtgatccattgtgagcccaaagtgtcgtcggtctaaaaagacgagccaaacttccgctatctctcctttaacctccatttgggaccttgtgttggggtctttaacctgtttcaaaattcacaaatttctcgacgtgtacactcataaatttttcgatagttgaccttgtgggattctttcaaatgtcacgttcagtcttgtggtctcttaaaggtcgttcgttatacccacactttctaagcaaacgtaaggatggtgtattaaagttagcagtctcactttgcttatgtgtgaaaataaattatcatatataagatgaatgaactactcctcctattaccaattagttttaaaatggaacctcattatcttatcccaaattct

SEQ ID NO: 216025 - DNA, 740 bp, Cannabis indica
aatgacattttattaatgtagttatacttttgaagaaatttataaaaataatttgattcaatttgcattgcagatttcagaatgacattaatagtgataaattaaattaatagtcttaaactaacgttaaaaattccacacatctacgaagaaaacaaaaaaatttaatttaattcaacaatgttgatgatgtaaaatataatactaaaacatgctcacttgaacaagaatcggactttacctttctttaacaatattcatcagcttggacagcaaataatgctttcaaaaaaataaaataaactaaaataattggatatataaataacgaaagatctaatatttaaaaattaaatctaaaataattagaaaagtagaaacaagaccaaatataatttattcattacgagccaaatcaaaatctttgtagatagagtcaatcattagttcccaactatagggcaaatgaaaacctatacataaatcaattaataaaaaaaagactttgttcccgtcaggataaatctgactaacattgaacaagcaattgtggggtttatgccctaaataaaactcatttcaatataatcagatttacttattaatatagatcagaaataacatttaatgttgcatggttcacatgatttatttcattgattatatgtacataatgtataaaattcatctgaaacccttttctacatacttgatcctgttattgtgttgtcatcacattg

SEQ ID NO: 216026 - DNA, 538 bp, Cannabis indica
atgaataaactcatcacctctaaggggaatcaatagctctttaccaattgagctgtgtaaattttgatgtacatagtgaaaaactattttacctatatttaaactatgtattgtatatttttaaaaaaaaacaatgtactatatatgtatatatatcattttttttagtccccaaaatagtggtgcttggggcctaggccctaattgccccactttcgggctgtccctgattgatgtcacctccctcaacacagatgatcataagaaaaggaagttgacattggaatgggttatgggtttggagatcattgatcccaatccaatcataaaatctaagttttcgattagtttttaaaacgctgatcttaagagagagactcaagaggatgaagcttttaactcaaaaaataatttagctttcatctcaaataatataatcaagattcttttgtgaagtatccgtagactactataaagaagaagaaggtggagaggaggaaataaagagcaacttatgttttaggttttattcatttat

SEQ ID NO: 216027 - DNA, 510 bp, Cannabis indica
ttgattgagagtctctttagtgtctagggaattaaattcctcttgaaagctttacctcaactaacgcactgacggttaaggggtacaacatgtgtgaagtttgtcattcacaatgagtactttaatgtacacttttgggggcgaaacccaaatttcaaattttggctgaattaatttcctcttttagccacctataaaaggagttcaatccttcgtgggaacctttttagccattttcattatcatagaatcaaagatacaattttcttcgtatttgtctctcaaatctttgaagaagttgctagagaatccattgatgtttccttccgagcatatcaaaaaagctccaaacagtgagttactttccattactttatacaattactattgaatgtacgaattttttctagatttcttaatgcaaatttaccaagttcttgagttgtttcttactgatcatggaatagatgaaattagggcttgaaaccttaactaacactcgattataac

SEQ ID NO: 216028 - DNA, 656 bp, Cannabis indica
ataaaaatattaaattaattaaaaaatattaagtttacttaaaaaaacctaatttattcctaaaaatatattttcaaacttaattttatatataaacacgtatcttaaaaaatcaaacaaaaattattaaaaattcaaccaataatttaaacaaactaagattttttgaagaaaaaatcggacttatttatatttataaactcatatcttaaaaaagaagaaaaataattaaaaattcagtaaaaatataaaattattttgaaaaaacaaaaagttagaaattaaactaaataaaatattatgtttacttaaacaaatgtagattttggagaaaaaaaatagactcgagcttgttcccataaaattttgtttttacagaacttaggaaccaccttttcatcacttttccatttcaaaaaaaaaatcttgagattctctgcaaaaaactccggccagattatacgaagctttgcatgccaacattgttttatttgtgttcagcaaaccttcatctcatttgtcgcccaacgtcggggtctcgaccggactaaggcaactgggagaggcgaggctcccagaaggtgattggtcagtgcaaggggcatttctagagagtggaacgaggctcagtcagagatctctcacctaaacaaaga

SEQ ID NO: 216029 - DNA, 695 bp, Cannabis indica
ctgccagcagattaaggctgaacatcagaggccggcagggttattacagcctttagtccttccagaatggaagtgggaggacatcacaatgggattttcgtaaaccgtttggttcgtaccgtaacgtaaccggtaacgggtaagttagttagtagttactttcgttttggggtttttagggtttacgttcgggtacggaacgaagttacttaccaaaacgtaaacgtacgacgtcctaccttaccttttacccttaaccgtaggtaaaggttaaaaccgtttaacctttacttacgtagggtaggtactaactaaattagtcgtcgtaagttaaatttaattagttggtaagggaaagggaagtaagtttacggtttccgttccctacctaggtagggaccccgtaaaccccttaaactaactttagtttagtacgtacgaacgaacgggaagggtacctaaaccgttaaacgttaccaactacgtaacggttttaaggggtttttggggaggtacgttccctaaaaaaaggaaacggtacttagggttaccgggtaaaccgttaaaaaggtttttaaaaggttttaacggaacgaccgtttccctttacccctaccctacgaacgtacgtagtaggttcggtacgtacgtacgaaaaggaaaacgtaacttacctaccgaagttttaggtttaa

SEQ ID NO: 216030 - DNA, 530 bp, Cannabis indica
gtatgaaaaaaaacaagtgtagttcggagagcgagcccccggagcagtataaaaagcatgccctcctctccgggagctaaagatgtagttagttatcttcgggacaagtagggcctattggaactgtcacctcacatttgaagcaacatgggaaaagcgtctgggaacgcccataagaggacatgtcaaacattgtaaggcgataacgcaataatcaaaggggctagtgacggctccattatgaagaatgacatcaatcaaggaaggatgaagattaatctcacctaatccctacgatacctacggtataggtaatacatgccctattttgtatctcttgagaacttgtgctcatccattgctggcactcaatattcccaccaatctctataaatacccctgagaaaaataggaatggggatcgaaaaaaggggaaagaaaacacaccaagaacattctctgtaaaagaaatactctcattaataacagagactcgtggaccacggttcattaatgtccgaaccacgtaa

SEQ ID NO: 216031 - DNA, 750 bp, Cannabis indica
acagacctttggggtccttcacacatttgctccctcgaaggtcacaggtattacatcatctttatagatgattatagtaggtatacctgaattttccccctttcccttatatcccaagcctacaacttatttcttgaatttaaaaagcttgtagaaaaacagttcaatctcccaatcaaaattgttcagtctgactggggaggagagcacaggtcattctccaagtttcttaccaaacatggaaatcagttccaacatccatgccctcatgaccatgaacaaaatggaagagtggagagaaagcataggcatattacagaatctggtttgacacttcttattgaatttggtctcgatctaacacattggtggttagcctttcagcacaatgtctttgtaataaacaggcttacaacacctgttcttcataatgcctcaccttatgagactttgttctacaaacaaccagattacagcttcctaattaaagccctttggatgatcctgttttccacatttaaggccctaccaatcacataagcttgaaattcgatctgaaaagtgcacctttgtgggatactcattacaacataaaggtcatctttgcagaagcaacacaggcagaacctatattgcacgaaaaagttacatttaatgagcaagagttcccagccaaatctccaccaaaccaacagcaggtaaatcaatcatctaatactatttttccatcaactagttttctaactaacc

SEQ ID NO: 216032 - DNA, 804 bp, Cannabis indica
attaatacatgcaagttattccacgtgtaatattaattaacagggtctattatttatttttattagtttttacaaacactatggagactacttttataaaagaaaattaattttataaaaatgtacacacaaaatatattttattcaaattgagataaatgtagtgtcagggacctttttttaaaaagagtactgttatggactttattcaccagagactttattaaatactttttattttataatatgcaaaaaataatattatattcaattttttcttttttgttaattagattgaaattgcttttcacgtatgctattattaataattatatatttttgtagggttgattatagttaaataaattaattaaaatagaatgaaaaaaatagtataatcataatatagtcatatatataattttaagaggatttttttaaaaatacctaaaaataacaaaaattttacattttgtacaaaattcttattatttatttttttttatatattttatcgactttttttccttacaaaccattgtttctaggttgttctagaaaagaccgttgcttaaacgttgcgaaaatgtagcataatttactgcaacttgaaaataacgttgttttccctctaaaaaacttaaaaatctataaaaatgtaaaaaaaaaatcgtaaaaattttttgctactttttgtagttgttttgttgttgttttacagatattttcatattgttgtctaggtgtttgaatgattattttttagttgctttagttgttcttagttttttttttttgttttac

SEQ ID NO: 216033 - DNA, 551 bp, Cannabis indica
aaggaattactctattattattaaattttttgtttgaattttcacatgtatcaaattatattttttgaacttttaaagttataaaaaatacttgactttgatatctattaaattatatacttagaactttgtcatgtattaattatgaccttgatttttcattaactttttattaaattttttaaaaaatttaaatctaacaatttcaatatttatgggcatttctaacatcattattattattattattattattattattattatgcatttataacacaccttacctactccctcttctcaccgtcgactcactacgagtctccgagtttcgacactgccccgatgctgacactaatttaatctcaaccgtcaattcttcttcaacacatctccaccattcatttgtcggagttaccaacacctccatattatcaacccctctctctttctctctctctctccatatataatcatagtttctttactaccctttgtttggctctttaacggaatttaatgccacaccacctcacgcgccacgttaccac

SEQ ID NO: 216034 - DNA, 532 bp, Cannabis indica
tagacaatgcatagcgaggcatccacctcgcaacctgaaggaaagtattgacgaggcaaattggctattgaaacacttagcgtataattcacattataataactaagtgtgataatttgggaacatgtaagacatgattgtccagtctgcaaggtcttatggtcaaagagaagttcttaagtttgctcagtacactggtgctcatgccattgttggaaggcatatgaataaacgaagttattcatctatgtacaaggggagatgcctctagcaagatattcctatcgcacgtcagtgcccactaccttaaagataggaataacaaacggttgtgcaaatttttagctatacacatgtttataaatggaacataatcgaagccaacaatttcaggaaaaactgtcatataattcgaatttaaatgtaaataaccgcctaaataagagcagattatatagaaaaaaagtgggggaggacctttgagagaaagaaattataaactgtaatcatgtatccaaaaatatcttgaata

SEQ ID NO: 216035 - DNA, 732 bp, Cannabis indica
ataaaaggaatgttaaaaaatatataaattgagtaaggatgtttattttattttaaattaaaatatataaaaattctaaggaaaatcttacattttgcatggaggggatatcatgagattctacctacgcgtaatgatttgtttagacggaatatcgcctccagcacctcttgccaactatgtggttttggaggagagagagtcgaatgctcatgcaatattctagtgtcctattgcacaaggtatttggaatcttatggaattctcttttctacatgaaagtaaaagaagagattaatttcaagaatgtttttctttatgcttctgaagtggtggaaagtgatgcctttgcaaagttcattatgtgttactgggcaatatggacagaaaggaataagattactcatggccaacagataagacaaccacaatatgtggttgagcggataattagttattatgaatcgattatttcaatgaatgatggccccaaaaaaaatactccaaactagtgaaaggaatagaggagctttagctataaattctagaggtgctcaagaagagagtttacactctaaacttatggtaaatgcagcagtattgagcaccacgagtttagttggattaggtgttgttatattgtcagaagataatagagtccacgctccgttgagcaaacccctcaaaggttagtcatagttagttggtgcattaaaaacattattcgttgct

SEQ ID NO: 216036 - DNA, 852 bp, Cannabis indica
agatagggtaagagagaaacaaaacaaaaaaattctctttattttcttaaaatttattccttttaccaaatatagcataaaggacaaaatgaccattttgcccctagggccaaaaacacacacataagcacataagggcatttaagtcatttcacacataaataatcccaattaaatttttagattattcaccaataattaaaattccaataattcaattcaaattatttttctggcccgaacccagttcgacccgaaataaccggttgtgactataccgccccaatttgtcaaaacacacctgaaaaagacaacacagacatactatataatagtatagtcccataagcaatttaataaattaatttcacttttttacccttctcgggttaaaattactaaaatgcccctagctcttcaacagggtcttaacacgtcataaatcatataaattcacatatattaaatcatataataatataattcctcaataatacataattatctaattatggttctgctaatccattctcatatttctagggtattacaccaaccatcacctactaaggctggccaacacatgtaaagacttggccaactcttgacaaagttgacaggaacatgatctacaagatcttgacaggagcatggtcagccagacctcaacttacaagtattgtatggccaaccagcctacatcctgtaggtgcatggccagccagattttggcctagcaagattttgttgtgtagctctcattcatggacaacaagtgaagcaacaaactgggccttaacaacccacaaaaatagacataatatatctatttaaggggtaaattagtcattt

SEQ ID NO: 216037 - DNA, 538 bp, Cannabis indica
  modified_base (522)..(522): a, c, t, g, unknown or other
tatttagaagtggtgaagattagtaggtctgagtggattttttctctctctcgagctacgttactggcctgtactagttaggtccctttccacttttacttctcaggccaaactctctttacattttctttctttggaaatacaaattccaacttgcaagaaaaatcacttcatgagaacataatagtattttaaaaaatttgttagaaataccacaaatcttttttttttttggtcaaatattgaatttgtgcgcgagaatgaaaatgaatttgtggtttgagctttttaaactgagaaaaaatataaacctaaaaaaagtaaaacacccagctatatatttttgcgcgtgtaaaagtaatttatgtctgtgcattacagtaatactggtgaaagtgattttttccagcccattttattaatgcactgacaaaagtcacttttactaacgtactttcgtgctggtaaaaaatatcaagcaactactatttacaaggctagcttgctatgtcaacactaaanatttttttttttttta

SEQ ID NO: 216038 - DNA, 534 bp, Cannabis indica
taataagtattttagttgtttatgaaatatatttatatttttggttaaataagtaacaatgtattgctagttaaaaaacaaattacaaacaaattagagaaatgttagcaaatggtcttgtttctctccttagtgaaaggtaatgtctctttagaataataaagcaaatgtcttttttattttttgctatcaaaaatacccttaactgtatataaagtattatcatgttatagtacatcagttggttttctaattataattagagtatgatatattctattgaatgaataattttttttttttttgcgtaatcactttttattaacaagtgttaatatacattaattataaaattagttatggtgtatatataaatatgaatttatatatttgatgctaacttagagagagaaaagttatgataatcaattatttgtcctaagataaaaaaaaattgatggaatatattaatttttagttttgtgatatatatattttgtattatggtatatacattttgtgtactaaggttta

SEQ ID NO: 216039 - DNA, 601 bp, Cannabis indica
attgtttaaaatcaaccattcttttctagtgccaaagagaaataatgttaataatctgcatgtaatatgcaatatttccgggcaaactcaaaattcaagtaattaaaaagtactcaagttgctaaattttagtaaatagcaaaagaaccattcaattttattattatttcctcctgtctaaggagtagtgcattttacctgtagatatataataaactaggcaaattgatggccctattacaaattttgtctttttctttttttactttggtacgttattaatatgtacaaatatattacataactactagaaaaatattaatcaaaattatgttatttatatatatgtagaatcaaaaaaccaaaaccatggtaattaaaatcctttcttagattggatatgtgagtgccatatatgtcgtaacaagccggcagtgagctgaacagaacaattatatatatcacattcacatcccatactcactccctttgttgtaggtgacactttaacaaaatatcagctatgctaagtgactggtagtaattagtgaatttgagttttgcaacaccaaatatgttcaatatgattaaataagtctca

SEQ ID NO: 216040 - DNA, 616 bp, Cannabis indica
tttattcctgataatatttttgtatatgtgtgttgcttctatatgtaaatacatatatttaatttattttttgacacatatttttttaaatacaatgataagttttttttgtttcttttaattatgcactaatagatattgacatattaaaattatattgttgtctaattaatttttttttttttatctttttaattaaatattagtcattatattttattcgcaattttaaaattttattatttgtattattaatgtaattatttatttaatttgtaaaaaataaattatcatttcaactgccattaactacaaaatttaggagaaataataaaatagttgaaataataaaataattgaaatgtataaacttgtaacaaaaaaaaattcacgagaaggaaaataacataatagtacgaaaaaaataataataaagttttcaaaattaataaaagaaataagttaaatttgtatattaattaattgatgtcttgtcattttcttttgttgctttgtagctatcttttagtttgttttttttttttgttttttttttttaattttgtactgtaaacataatattttttaattttaaaactttaactatatatttttg

SEQ ID NO: 216041 - DNA, 574 bp, Cannabis indica
attttaaaattataaaattataattttctcaataaaatataaaaataacaaaaaatcaatctcgtgacaactataaaataattaaaaatgaactaaaaaataacatcatgacaattataaataaactataaaataattaaaaataataatttattgtttttactaaaaatatatttttgtaaataaaaaaaatttaaagtggaaaagtgaaattttttcggtatatattgacgtatttttgttttttttaatcaaatttttagtttattatataaatttctcttttagaaatgcccaattgcccatacaatacatccacaactattttgttatcaattaaacattattcatgaatttcctccataaaaaatttaaaaaaaaaaccgttatattaaattcattatatataataaccccctcatatatatacattcttttaaaaaaaaaatagtgctttattataagaattgtgcaaatcaattaacaattactagactatatatatatatctccttccaaaaatatatatatactatatatgatttacttggaaatttaaaaaataaaaatgtta

SEQ ID NO: 216042 - DNA, 768 bp, Cannabis indica
taaaatttaaataatttgtaaaatgtgtcttttattcacacacgtgtgaaagatatcttttcaaccctaatttatttaccttaagctaatataatttttttaaaattttataatatttcataaataactattacaatatacactatcatatatcaaaatttcagattttagctatctcaatacctggaatacaaaggtgattgctaaatctattttgggtggtgcacaagcacctatagtttcatatatgctttgcactatgtttgataaagagaggagagagggaaaagagttgaagggaaaggaaatattgttgtttatttcagcccttaataaaaccaaataactaaaaggaataatgacatggcaagtgagaatttgacacatcaacgtgtgttagtttagttagtttttctgttattcttgtaatagcaaaactgggtgtggtgctgcctatatatagttctattcttttctgtttttatttaagcagcagataatatatatatatatatagagagagagagagagagaattatgtatggtgaggaagaatatacttgttttagggagggtaaacttatggagcattgaagaactaaagggttaagaaaccaagggaagcaagatcgggcttcaagtgggtttaaggagttcaagcttcaggattaaagctaaaacaaggggaatatctcatcatctctgtattctataatttgtacaactaagctttgtgtaatcttgtcatttgattcataataaagacta

SEQ ID NO: 216043 - DNA, 514 bp, Cannabis indica
aaatccaaggcatgggtgaataccataatgacatatttgagaatattttaaaccacttaaaatttgaattaaaaatagcttttagtcttcttctttttttttttttgaaaaaaaaatagatcagtttctagcaagcttgtgtgtgtattttttgtctaccatattttatatgatttttaaaatgcatttttttttacttccatgttatatataagtataaaaatatgtatttatagactttttggacattttaatattaaaaaatttacactaaaccaaaattaaaaaaaaatacaaaaatactcttcagtaaaaaaaataaatcattttattattttattttataatttatttatatttaaattatagttatcatgattttatttgtatagttattttatagtttatttataaattgatttataattatcaatgttaatttttcgttgttttcagtttattttattttttgtttaaaaaaaatatttttattttaagtcgtaaaattgtaaat

SEQ ID NO: 216044 - DNA, 996 bp, Cannabis indica
gttatataatttaccctaacccctaaatcgatttacacacaccactttgccttcaacctctgaagcctttcctccgttctggcgattattctacgaaaatccaacatgattcagacagaaaccccaacgataagtctcttgtcttcccatcagtaagtctcttctttaatgggtttcggcgaaaaaccccaacatgattttattttcttcaaatttcatgggtttctcatttctctctcagatctctcttctgtcactctccctctctcaatttttttttccattgttgtcatttttatgtcaaacaaaattaaaatcttctaccaaaattgagcttcgattcatgatgacatgcttgtgaattttgcctattgcaaaaatgggtcataaaaaaatcgaactttatgaaaattgttggtactcagaaaaattctctgttaaattatgtaaattttccaattaatattcatcattcaatgtttgtacccaatttattttcatgatttttcttttattataccaaattttatttttggggaattctaggtttttgttaattaggaacccttgctttccaattttcttatttggggaaagatttttaatgaagaatgtgttgttttggatggtgatctagataagaagactctggttgataatgatgatgcagtgagtgacttggacgagttgtgcatagttggagagaagggtccggtaacatttaatgtttaacttgattttcattaagggatttttattgagtgtcaacttattgaaattgttatttttgtttgaggataattttgggataatgaagacctgaatttgtttgaataaaaattgaacaattctactatggccaagccatgaattagtttatagactaggttttttatatgagatggttcaatttggatgaatttttatttgaaaagttaaattgtcccatggtgggattctgttaacttgattttcagtaagagattttgttgggtg

SEQ ID NO: 216045 - DNA, 746 bp, Cannabis indica
ccaccacatcaaaccattcagatctgaaacaaactacataaccaacctagaaagaacatataaacacaatagatcttaaaataaaagttaaaatacaatttatatcaaatccaaacctgtaaaagaggaaaaaataaattaaaaaaagagatggcagaaaaaataaaaaaaaaaagaaaaagaaaatgagtaaaccatttattagttttgttcgtctagagtcctgaggtggtttcgtcgagcgtcggggtctagagtcatgagtcgtgggttttgttcgtctagagtcgaggtggagcggtggtttcgtcgattgtcggggtttggagccatgagctgtgggtttcattcgtctagactcgaggtggagccatgggttttgtgttcatctagagttaaggtggagccatgattttttgtgtttttctggagtcactactacaaaacaagcctttagaggcacttttttcagcataataataaataaccgacgacatagggttgaaaatttgtagacgggaattttacgccacttatggcgccggttattaggaaataactgacgctatagagtgtgcccttataacgtcgattatttccaaataaccgacataaaaacggatttataccctagcccagcccttcgtcttctcattcgatcaccaaccagaaacccgtaaaacccctctccgccaaccacccacacgaaaaatcaaccccccatttcctaccactttttttttacc

SEQ ID NO: 216046 - DNA, 907 bp, Cannabis indica
acatagaagttaatttattttatacttaatttttatttttagtttttacggatcgactaacatacgtaaacgttaccgttaggttttaagtttttttttttaaaaaaaaaagaaatgtacaaaaaaatcgttaaactaacaatttcgttacatataaaaatatatgaaacacttttcaatggatattacccattgattgatggttactaaataaatttaactacaaatattaattttaaaaatattatatcactaaattttgatccaatagcgaataataaaagagaaattgaaatttctacgcttaacttagctacttaaataaaaaaaaatataaaaaaaaatacatctttttgcactatatttatatacaaaatatttaagttaaattctaactttttcttttctttttaccgaaattacttttttttaatttttttttcagctaatagaacaactcaagtttatataatagtaaaaattaaaaaaaaaaaatttaattagttagaaaaattaaacataaaaacttaaattttcatgatactactatacatggataatatccataaaaacacactcatattttcatataaatatgtgaaggaaagtaatgtaaaagaaaattaagaataatatataattgctaatgaatttacttatttcgtgattttgtttgcttgagtactcttacttgtattatggagggaaatatttatcttactaaactgagaggtgagtttgaaacaaacttttattttaatagtttgaaacaaacttcacatgacaaggtaattaggactatattacgcttaatataagggttaatttgtttaaatagccatgcaaacaagtgtgagccaagaataatttattgggtgccttggcactctttcttttcctctcttac

SEQ ID NO: 216047 - DNA, 735 bp, Cannabis indica
ccgattcttttggtcccaaaccaactcattccttgccttccaaattgcccaacacactgtccctgcttgagcaaccttaagctcatcaactcttaccattagatcttgcagccactctttaaaagagtcccacacccgagtaccaccacctaaatccaacttcgaccaacaaccagtagcaaaatcgcaatttaaaaggcaatgcgatatagtttcgcttgaaactaaacaaaaaggacaactataatccaaaggaaccttcctatcaaaaagtctcttccttgtaggcaaacaattcgaagcagccttccaaagaacatccttgacagtaggcggtacttttaagctccaaaggttcttccaaaacattgaatcattgtcactcacccctgcatttgtctttcagtttatgatcatttgatatgcagacttgaccgagtaaacaccagccctttctttgaaccagtaccaagaatcacgggcctctccagcactaagaggaatgcccaaaataactgatgcatcagctgcattaaacacatcctgaactacctcttcatcccattctcggcacccaattttaaataaactattgactctatgatcattgaacatagatagatcagaagtaggagtgggaaactcttctctaggaagccacgggtccaaggcaaaacgaatagagagaccatccccaactcgcattcttagcccggcctttagcacaccttgagc

SEQ ID NO: 216048 - DNA, 527 bp, Cannabis indica
tataatgagggatccacaattttgaatgcgcgtatctcttatataattactagcaaacaaaagacaaagggcgcggtcttaaaaaatcctaacctacacattttctttttaaataattagtatttttattttttgaactttcggtactatttgattttgcttcttaaaatatacgatttgttaaaaattctccttcaaatatagcagttacataattatgtttttctgttagggtccgtttattttagtgttaaaaattagtatttttaccctctaaactttgactaatataaaattttacttattcttttttaaaaaaattataattttttattttttaaagcaattataatattctattagttctgaaaaaggaatagaaattattaataaactaaataaaaatattaaattaattaaaaaaataataattttatttttttaaaaaaaaattattccttaaaaaactatttttaaactttgttttatttataattagctattctaaaaaatcaaaccaaaattat

SEQ ID NO: 216049 - DNA, 1073 bp, Cannabis indica
ggtgtgtttttaacttacactactataaaaatggttatttttttccgatatttttaaaccgtcgtttaaattattcttatcagtttctataatcgtcgcaaacgagtaaaatagacgatggttaaaaactattgctaatgtggacttcctgacggtttaaaaccgtcgcctatatcctattataggcgacgattttaaacaatcgggaatgtaaaaaaaaaagagaaaaaaatacagatttttctaccattaacaacaaactttaaaacagttaagtttatacaataacaaaataaatatatataataaataaataaatgcatttaataccgagctcggagagagaaaaagagagagaatgagacggacgagaggtggtagtggtccgacgtatgagacggagatgagagggacaccgacgagaggtgagggagaccgacgagaggaggggtgggtggagatcaatggacgagagagacgagaagaaagggagatcgagagaggaaggatggcgatggtgcggagacctgagtggggttttgcagagtaaagattttttcgtcttagggtgtgggaaatggagaagcaaaacgtgagaagaaataggtggacatgtgggaaaataaaaaagaggtaggtgggcacgatgggaaatataggcgagaagtgggtgacaatttttgaatgggcccttatacccgacggtttaaaaccgtcgcctatactatacccgacggttttaaatcgttgggtataagggcccaataaattcacgaatttcaattaaaatcgccacctattccagatttgttgttataaaccttcggaaatactaatttttttccgacaatttaaataattacttaatttttttagcgacggtctttaaaaaaaacgtttttaagaccgtcgcgaattctgacttttgtagtagtgttaattaagtttgtttttatttacaatctctttccttctgtcattattttttcataacgctcgtatatatttattgagtcctagtgtgttaattaagaatgtgaaactaaatcaatgtaataaagaaaaatacaacc

SEQ ID NO: 216050 - DNA, 572 bp, Cannabis indica
aaatcttgctcattcttcgttgtccgtctcagcgtccctggattttcaactacgctgttgagttatacatccaatcatgtgatccaagtttggaacgcatttagtctttaatttgctttcaaaaaaaaaaaaatacagagtagattatcaaactaaaaaaatcctagatcattactaaaagaaaagattattgtattgatcttcttgattgataccaaagcttttctcattcccacatcaacgtcttcttctgtgaggagttcaagagaaatcgtctgagaatggttcggttcggctcaacgacgtcctccgtttcagatttttgttttcatttattaatttactattattagtttaattccaattaatgtttttatggggttagaattataaggagttcattccttaattaattttaatgctgtgatcgtatttatgtgttgaaactaatttagttttttcattagtcttgtcttttaacatagttctgtagtctttgtcttttgacatgaatttttagtcttttccttttagttttttctggttcgagtcttgtcttttggcatgggttg

SEQ ID NO: 216051 - DNA, 1190 bp, Cannabis indica
gtgaacgaataataaatgggtgactgacctgatcgatgatagtttggattctagctgaagcttgagtcacactttcaattgaaaaaccttcaatgactacaacagacagcaaggttaacaccattgtaaaagagaaaccaaacataatgcagctgaagatgtcacgcttacagtttttcatcaaatccagagagaaatgaacttaattgtgaaccttaaaacttactaagagaatcttctttctttgacgatggaatgataatgcttactcccatctcctcttcaatctgtttccgagtagatcctctgaaagaaaaatattatgatttacatggaaatataagcacacatattttagtctgagttttgttaaagccatagtgttgtacccttttccttcaatgaatctaaataatgaagccccaacctgaaaatggaagacagacatttaaggaggtagcactaaacaagtagaatatcaagacagtgatggtatagctgatatgaagtggtaatgaaacatatgatgtacctaagagaagcatgcctgaaaaaaggtggagatgggaaaaatgaaaatactaaaaaaaaggtggtaagagaattaggatgtaatcagctcaaaccatgataaaaagatatccagaatcttacctcaaccgaaatggaatgcttttcggtggaaatgactgattttccttttaaaacactaccatccccaatatcatccattccactcgaactcaggattgagtctgttatttcagccactgcttcagttacctctgccgcatttcgagcatttgaatcagaaatagaagataatgagttactcataatgacttcatcttctgacttaatcttgccatcttctgatgagcattctgcaaagacatattaaaggttactatctagcaaaaacaacaactacaatgtcccttgttacattaagaaaggcaaatcactatgcataggcatagcataccaaattgtagaaataagcacaagatcctgccactcaaacaataattttacatgaataagaccaataccaagttggaagctttgaaagaaattcatgaactgaacataaaatttagacaagaatgtaaacttcggaaatatatacttaattggatcgcagtgatgaacacatcttcatttctagcttaacgttatcctaaaaaatg

SEQ ID NO: 216052 - DNA, 1050 bp, Cannabis indica
ttttttaaaaaaaaaaaaaatgagttatgtacatatatattttatgaattgatcaaatttgtataaatattcaataattagtatttttttatatgtatttgataatttttttttaattatttatcatttttataatttcttttttattttataattactttcaatatatatatttaaagtaactttcattaatatactttttaattagtgtgtatgtatgtttaatttttgcattatatattttaatataagtttaatttgtcatacattttacatttaaaaataaccatattcagtaacacatagaacaaattcaaaaaaaataaaaatctttatataaattagtttaacacctacttaatattatagctaataacgtgaaaataattagatataatagattggtgcatattttgtgtgtaaatataattattctaattattactaaaaagttacatattttcttaacacggtatttaaaattttgataactaattataatttaaatatcatttttaattataataatcgtcctaagtttggaccaaaattatttatactaaaattgagattagttttatagaagttttattatatctgcaaacacacatttttaagtaatttgacatcatgataaataacttatacatatatatgaatttttacaaatttataaattcttatacaagtttacaaatattaataaaaaaaacagtccatgatatttaaaattaataactttcaatataagtaaaaaaaaaaaaaaaaacctaaactaaacaatgattgaagatataatgttttcttattaaaaaaagtaaataattaacttatgttttactaaaattaaactaaatagatatcatgagcctgatatttattggacgattttagtgttagaattatattagaaatcagaccaaaattagttaaataataaattttaagtaattaagaattgaaaattttaggtctatatataaaagaaaatacataacaaataagaatgaagtgacaacttataatcatttttttagtctatttattcta

SEQ ID NO: 216053 - DNA, 663 bp, Cannabis indica
ctctagcttttccttgcccttacttgcatcctagagcacttgtgagtcacatggactcagtaagaaaagtaacaaagaataatatattaaataactaattatacatttcgctattaaaaaataattaaacaataacattcaagagtgggtaatataacgagccatatgcatggaaatagaaatgatcatatattgtattgcctatttaggcaagcccgtgtcataatttaacatcatatataatatcactgcgccacctaatcaggtgagcccatgccacaacctggtaccaatatatcgcatcgcctaatcagacgagttcgtaccatagcctggtactcatatgtcactaccgcccgtacttaatcaggtatgccgccagaaggaaacctaacaaagagattagacacacgtcccctgctcaggtaagtgtgtgtattctctctgtccgtgcaaaaaagcctttgtggatatcttgggggtcgaccagtcccaggttgatttctaggatttcttccatcattacgagggatttcctggtttcctagtcgtagttgtcttgcatctgcattcatgcgagatgactcagttacattagtttgttcatttccctagtttgaaaacccatgggaagttcctgtaacatcacgttgatgctcctga

SEQ ID NO: 216054 - DNA, 550 bp, Cannabis indica
taatttttagtgtaatttaatatggaatcctaaatatattttaatactaacctttatttaattttaagtaagtactattttaaatcttgtattttataaaagttactaatttgactctctattttattaaatgataaaataaactctgtattttttaaaattgtactaataagatcctgaactgattttttgtcgaaataaaacttaataataatctgatgatgttatgataaaaatggttattctgtatctattcgtgttaaaaattattgttattctgtatctattcgtgttaaaaattgattatatttaaaaataaaattgttaaaaattgagcttagagtcttatttttattattttaaaaaatataaagttcattttatcatttaataaaatagaaaatctaattagtaatttttgtaaaagacaagttatttatttatttcttttttggaaagaagcaaaacacaagttcaacaatcgtatttatccattaatcttggttgacaattgtcctgtttgtagagtatttatttattttatttattt

SEQ ID NO: 216055 - DNA, 532 bp, Cannabis indica
caaggatcttaccctgagcaagaatattctgatctaatcttctcgttgctgaactccctttccccataaagtttttaaaatggtttaggaagtgctcaacgaccttcggatagtcttcaataacttcttcattcctgcagtaggttaggatcctgttttcttgtgttctttttttcaaagaggaatgaaagaagcttgagttctcatcaccaaatttcatccaatttatctccgcatgctgctacatatagctagtataatcctttttggtcataaatatacacttgtagagtgcttttctcagcaacttgaaaactttggttgctcaggtctgttgccaggttccctctagcagtgttgaattcctctttggctactttgtaagagccaattatgtctccctgattgtctttgtgaaatctcttcagcacgtgcttggttctcaacaacttttgaacaatacctttgagtcccttgctactagtctgattatatcaacagcaaagaacagcctctttatacccttctctgt

SEQ ID NO: 216056 - DNA, 712 bp, Cannabis indica
tttaataatataaattaaggatgaagcttaagcaacaaaaaaaaaaaaaaacccaacctcatcactctctctctctatgcttcggccaagcatgaaacaaaacaagaattcttagcaaggtttcagctaggttggtggagaggaagatcaaaggtaagcctagtaaacttacttccttcaatttcatagttgaaagtgtaggttttcatgcattttgtgggattttcagttctgctcgttttaggattttagagaatattttgttggattgttgttaaattatatatgtggttagatgctagtttttatggttatggtagtgatttatttaggtttgggcttttgagttctaaattagctctttaatggtgattttgcttcgagggggttatcaatgcttttagttgttgaaataggtttgttttagccttatttgaagttttggacagttaggaagggattggatttgatttggttgagttttagaatttcgagaaaatcatcttgacgacctaccctttttccaggcagaacaacccagaagcctaccattttcacagaaacgacatgccattttttggggttcttttctcgaaatctcatttttagcgagtttcttgatatgtaaggtttagtcatgccatttatcgatagagaaacctttagtttcaagtttaaatccatgatagtgatttagcggatcacttaccag

SEQ ID NO: 216057 - DNA, 761 bp, Cannabis indica
tcttatctaacagaaataaaaatctatttcatcagcttgtaggtagtccctgaaatttaatcacgggggatgtattcctgtagtatactaggagattgaggtctactgcataaacagaatgtagaattaaagaactcttggaccaagaacagacacaagggcgatggattttaatactattgttttctagttgaggaaacaaaggcaacttaaccaataaattctctttaatttcaaggggaaagagaaccactatttattcactgtagttactgtagattgttttatagattaggaaactgtagagagtttaagtattgtgtttaacatcatgcagctaagttagtgccacagtcagaatttgaatccaactttatctggggcctaagcctgtgtgccctttgcactggatcgtattgctcttttttattagcattttttccatcctttctcctccctgtcccactgacttgctgtatgtatatcttactctactgaaatctgatctcttctactttggatcttagtaagattctgataaactaattgataatttatattaatgttgataaaactcaatgccttatggcctttattgtgtacctactttgggatagtctctaaggatataaaagagatatcacccctgccctgaaaaacttccagagtagcactgtgctgccgtctatctaatcaacccatcacattttttgaaactaaatttgtgataaaattatactatattttttcgcctttccacg

SEQ ID NO: 216058 - DNA, 1465 bp, Cannabis indica
  modified_base (1413)..(1413): a, c, t, g, unknown or other
agttactgaatagactttcttaactgataaattagatattgtatttttttaaatagtactaaataatgtcttgaattaatttaattaaaataaaatttaataataactcaatataaatgtattataataaaaatgtatatatttttctgtttgtattaaaaaattatctttaaattaattatattaaaaaaaattaccaaaaattaatttaaagtcttacttatactattttaaaaaaggagttttttttttttttatttttacacttcaaaatacttttttttttttgtcatttttacgtaattttatacaaaaactcctattacaactagcaaaactcatattgcaactagggctgcaactattttaaaaacttaaattataaatttaaaaataaaaattaaaaaaatatatatatataaagtaattcctcgttaaaaagtaaaaatttatttggttgttaataaataaagtcaaatgagtaatttttgataatcaagtcaaaaatagtattaacccttcaaaatatatcatttcttttcaatttttattaacaagcgtgactatatattaaaaagagtcactgtttcggatttgagtacttatcaggtagagttgaagttacataataattgtgtcagtcagaccaaaaagaaaaacaagaagaagtaaaaggttgagttcagagattaacgtaagaagttaaaagaatttcagctgagcattttccactctatttcctattttgttttgttctttttcattcttcttcttctttcttatttctcatatcgaaaagaaagaaagaaaaaaaaaaaactaagtggatgtgatgaagaaagataaacttctttttatatattctattaagaatctttactaatcaaaaccctccattatttaaaagatcaacaacaccaattcagagtaatctattctcttacctatatcagaataatctattctccaactccaattctaaacagctcttttttctggttcaaacactattttcagtattgtgtttgtctgcattggtgggtcgtgaactacttttctactcataaaaataagaataaaaaaaatcattcctttaaaaaataaagttcaagtctttattttttcctcaacacttgatataactagggagggtgtttcttcatctgggtcttcttaaaactcctcaaaaatggtttttccttgattattagtaagaaagccatggatctggagagtgtgataggtattcatccagtcaaggtaaacacatgcaccactctctttctctgttacaagaccctaataaagttcacacctttcttatgaattttctttctttgtatttgcagaagaggattcatggaaaacagtactaactttggcatatcagagcttgggaattgtgtatggagntttaagcacatcccctttatatgtttacagagcactttcgctgaagacattc

SEQ ID NO: 216059 - DNA, 503 bp, Cannabis indica
taataaataataataataataataataataataataataataattaggttttagaaaatataggtttattagaaaagaaaaaaaaacatggagggtcatttgtattgcaatgatatcttgatatatacatatatatttatatgaattttggagtgattagtgaactcagcgaaatgtgatagaaaatgaattcttgattatagtgtcgtattttggccttcgcaaaaatattttgttttaaaaatgaaaattactttattttaaataattaaaaatttaaaacaaaaatatttctaaatgtcaccattgtattgaaatctgatcacaaatattcatcatatataataataaattatgcattttaacttatcatgcaagatataataggtagattttcgtcacattattcaataataataataataataataataataataacaataattgatataaaaaatgcatagatcccttaagagtatccaaagggtgtaatcaaggct

SEQ ID NO: 216060 - DNA, 751 bp, Cannabis indica
taaaggtaaaaattaaaacatgtagtaaaataggtatacaatgtaatttcatctgaaacatgtctttctctctttccttttcatttctttttttttaaaaaaacaaaaattatgttctcaatagaaagaaacatatgcaaaataaaaaaaaaaaaaaaaaaaaaaaaaaaaaggggaaaaatcaactatacatcaacaaattgcatcaataaataataaataatgatacttatcaccgcaacttaaaatatgctaataatttttttttctcaaaaaatgtgctaataataatttaaaatagaaaaatttacaaaactttaggtggcacttttttttttaatcttttacagattttctttttaatatatttttacagattgtagtttttttaatttcttttgctgaaaataatgttattttcacgttacagaaatataatataatgttttaacatcgtaaaataacattttattaaatgttgaaattaacaaataaaagataatgatgttgaaattaaaaaattatctttttgttcattggagtctcttaacaaagaaacttagattgatttgatataaagaatatataaatcaacttataatatacctaagaaacactacaaaacaacataacataaactgaaaaaatatactcaattagaaattaacaagacatctaccctaaaatatacataaggaatctaaatataaattaaaaatattataacaacggaagctatatccaaaataaa

SEQ ID NO: 216061 - DNA, 1006 bp, Cannabis indica
  modified_base (750)..(750): a, c, t, g, unknown or other
acctggacgtgaatagggatcggaatagatatatagagaagcgtagagagaacgaagaacgaaaagagcaactacaatgttgatgaggcaaactattagagtggttctcttgtacgaacatccccattttcctctcccttgatatccccactctcccctcgccatctccccttttcctcaacctcatcccaccaccatatccctctttctctccctcactctctttctctctcagatcaaccaaacagatagatcagccaaaccaccaatctgcaccagtttcagtcgacaaacacaaaacccaaaaagaagcaactttcgcgtttcaccagtcacttaaacacactctttctctcgatatctctctccctatatacaaatacatatacatataatattatatatatatattaatgatgtttgcactgagcacgagctacttctataattagaattagcaaataggaattgttaacaccaagaacgacacaggatttgataataactagctatggcggtttgtttgggaggagtgagcaatgaagatcccctctgtttttctttttcttttctttctttttttcttttatgggtaaggaacagggtcgtgcggtggtgcactttatcttgcactctacgcttcgaactaacttgcgctacgggtggtgcaatgctccatgtcaccctaatctaatttcattaattcaaaagttactttttcataggtggtaataatctaaaaataacctntaaaaaaaatgctacaaaaaaaaaaaactaacaacctatagcaaaaaactagaatccaaaactaattaaataattgttaggtttctaaaaaaaaaactaaataattaattaattattttttaaaaaaaattttaaaattaaaaatattaattgtaaaacaataaaaagtacaaaattttgtaatttgtaataaaataagtagtattgataaagtaaatcatcaaaatataatgtaattttttatttttaatttgtc

SEQ ID NO: 216062 - DNA, 595 bp, Cannabis indica
aaaacctcttactaccaatcgagctttgaacttgtcaagagagccatccttattatatttcaccctgaaaatccatttattagagagcacattcatgtcaacagttcgaggaactaatatatatgtttgttttcctttttagagacaaattttcatgatccatagctttcttctaatgaggtaagctcaatgcctgttagactagtttttggaacatcataaatctgattttgggaggcagtgacaaggaaatatttttggtttatatataccaaactttgatctggtttgcatggggtgaccatgtggtaatagtggtggaatgggagaaataatggatgttggcagaactgtttcctcaatgggaaccgaggcaggatcaaggttatgagaagcagatgtagagtcatctgcagaagtgtttgtggcagaagaaatatcatgagagggagagacttctagggtattatgtgagggttcagacagaggattgagagaaccaaactgaatgtgagagtgaatatccatagaagatgtatgtggaattatgaaggcaggtgctatgagatttctgtggtaggtggactgaggtatg

SEQ ID NO: 216063 - DNA, 1152 bp, Cannabis indica
caaactagacccaaggacaccaacctgcactgcattaagcggaacatcaccagaagatacggccgccacaacattgataataagtgctgcaacatttactgtgagctggaactgaataaatttctgaatatttgcatatacagatcggccccatctaacaacctacatccagaagagagggagagagagacaaatcagcgtcttaaacagactagaataataaaataaaaaataaaaaacagaagagtgggtgggcagtacgactaaccttcacaactgaagcaaaattgtcatccaaaataataatatctgaactctctttagcgacttcagttccttggatacccatagcaagaccaatatcagcctaagctccacagaggaagaaaaaaaatcaacacaagccaccagattgtactacaatattaaaacaccatataactatgccaccaaaatttcaggaaaaagagagagagaataagaaggctatcaacaattgtgattgcccttgccaatgccactaataatgtccggcccaccaacaaatggttttcaccatgtaatcaaagatatcaatggagaattccttttattcttattacaacctgtaacagagtattaattgtggccaaagtgtagacgccatacataataaaccagctaaaaacaatgagaatagatactgacctcatggagtgcaggagcatcatttgttccatctccagtcacagcaacaacacgtccctttctctttaatgcttgcacaagcaaaagcttgtcactaggagaagaacgtcccataacctaaaattggagttgaaaagcatcaattgaaactggccaatacaactagattggttctaaaacaaacaattatatggaggggcaagcagaaagctaaatcatactgtaatcttatcagctatttcttctctttctttgtcagtatatgtacggaatacttttccttcaatgacatttggctctgtagcatctgcatctgaaccaagtataccacattccaatgcaattgctatggccgtttgaagattatcaccagtgaccatccgaacctgcatatttcgccaagaattttttaaaaaatttaaaagaaataaaaagcttcaatgttagaaaatattaaaccatgag

SEQ ID NO: 216064 - DNA, 527 bp, Cannabis indica
caaatcaaattaattaagcggatcatttacaagcattcttaatttctaatttatattaattggttaaggatttttttttttcaatttttgtaaaaaaatctaacatgaataaaaattcagaagccataatttaataacatgtcaaagttcgagggcatgatttggtagatattaaaatctagggagcatggttttgtacttaaacaatcactgaaatagtaaaattgaatgaaattagacaaaaaattttaaatccaacaatctcaatagttcatggggcatttttaacgaacttaaaagttcagggggcaaaaatcttaattagcttaaaaaaattctctaaaatcaaaatctcaaatctaatttcaaaaattttaaaaaatacattatttaattaaaaaaattaaacatatacattgcactatatcacctaattaaacttaatttaaaaaaaaactaattgcacgtactatcaacctaattatattatgtacacacaggaactatcacaatttaattgatacata

SEQ ID NO: 216065 - DNA, 740 bp, Cannabis indica
tttataagaaatacacctacatttttatacaaattgaaaaaaaggaaaaaaaaaaaaagaaaagaaacttgatacatgcaactacttatttctataactaattttactttactgtagttgttgaaattttttctccataattaacatttattaaaaaaaatagtcataaagaaaaatgaatcaatctgataccttggggcaaaaaaaaaaaaaagccctaatgtagtatttttctaaatcaatttttttttttaggaattttttcattttcacactttaaactattttttttttactatttttacggaattctacataaaaactcttattgcaactagcgttacaacctaaattacaacaaaaaattgtataaaaaaattcctattgcaactagcgctgcaactattttaaaaactcaaaccgtaaatttgaaaaaaaaaaataatatatgaagtaatttcttttttttttacgtgatttataagtttttctaagttaatatatttttttttccatgatttataaattattttccataatcaaattttaattatatttgtatgtataaaattgttagatagtttatgggtaaataaattatgtataattctaaaattaaaatgtgtgatggagggatgggaaaaagagagaggtcatgggttcgaatttaggaccttgaacctattaactgattgtaaaataccattacgctatactaaaaaaaaaaaaataaaattaag

SEQ ID NO: 216066 - DNA, 1145 bp, Cannabis indica
aagaaaaatagaagaggaagatttatacttatatttaaagtaaataacatatttcttctttagaagatgtgtaagagttttaatttgactattttatacattgggtacttggtttttatcttattttttgtcgttgttctattttttgttgaagatgtaattattcattgatatggattgtttttatattgaaaatggtcatgtgttttagtaacacatactttacaatgtaatactatgatacatatttaatatctcttcccaagtattaatatcatactcaaaaattgtaacttctactttatttgtcattttcaccaactaaataagaattaagatgtggtcataggcataacttagtggtttaacatttctcctcataaagagaaggtcccaagttcgaatcaccccctcccaatgtcaaaaaataagaattagaataaaaaattgcaattccaacattatcggtaaataaaaattaactctcaattactatatatgtttataattctaaatctgaatttatctttgtaataatataaaataataaattattacatgtcacttgtaataataatctaatatataaatttagcatcaatatataaaaataaaatataaaggttaaagtatattataaatttttattttaaatgaagcatctaggatcacgatgtttgaaatgacagataagcattagaaattttcacaaatacagttagaaaaaaaaaaacatatctaaatataggggtttcaatatctcatacttgttttttttttttttaatttcactattgtaaggaaaaaattactttttactgtttcttttaaatactatatattgttttgtttttgttcttttttttgcaacactccacggtttttgtgtttatatatataaaagttttaaaaaatttgatttgattgaaaatttgattgctcctatcacttttgtggtagttttttttccttaaaatattttttttttcattttttttaaaaatttgggcaaccccacgtgatttcccattccaagaagtgtctatatgtgtttatatatgtatagtcctcttgagtaaatttcaaaacattgacattatttatttattattgtattttagctctctctatctcgtatgttcatc

SEQ ID NO: 216067 - DNA, 554 bp, Cannabis indica
gtgagattaaaccactatttataggggcttattacatgaagaatagttttccttaatctataataaataaaatagggaactaatttaattctacaattacaatgcaaagaatgagaaacctaggcttattgtctttattctctaaactaatcccacgaatgtagggattatcttcgtgtcttggaagcgatgatatccatctcttaaatttctaactcacatatcttgtttgacgcatgcgagttgatcacataatcgagctttggtcagatgtctcctggtgactatactcggacatcttgctatgtatggacaatacagacctttttaccgatcctcgagggctgctaggagtgtaaccttctgtccagataggaaactatgagacacatgtcatccagctaattgccatgtcatagtgccaaaaaaaaagataacatttgccctcccaagtctgtgtgggaccttcttggtcgcacgtggacttcatttggttagggactttgtctagataggtgacgcgtgtctttagttgaggttgatctgacgtgact

SEQ ID NO: 216068 - DNA, 569 bp, Cannabis indica
ttattattaaccataactaatagttaaatgttaaaacaagataaaatcatttattaaagcaaaaggttggcttgctaaggtcagactctttccatttagaatattttttattatattattattttaagttctttttatttttgaataatgatgaattttattaaatcaaatcatccaaaaccaaagatgcaactaccataggtaaagcatccccagacaaagtacaatcaacctcagaaagagaagatcgcgccagaacatgcgcaaccttattagcagatcgttttacaaaattaaaagaaacacccacaatatccgaacatagagtcaaacattcagaaataatatgaccataaggtgaggccatatgtttagacttttgaatatctctgatgactcttaagcaatccgactccactaccacatttgtccaagcatttgctttaatccaactcaatgcttccttgataccaatagcttcaaccacatgtggcttcaagatacccattttgctcatcttttttgcttgtaacactattccgtccgccgatctagccactagaccaata

SEQ ID NO: 216069 - DNA, 681 bp, Cannabis indica
atagtctatttcaaactgtttattacacgtgtgcttttttttttttctacatgtgtgaaatatactatttaacaatattttctatactgtaaataattctaaatttttcaaaatttacataatcttaaaatcctacatgatatgacaaaaaaataaactaaaaatttttcttagatattaaaaccaataaagataccttataatttccaatattttattagatctaatacataaaatgttagacatttatatgtataaactgaaatatatatgtttatgtataaaatgcggaattaaatcaaacatatatacactatgaataaggatcgaaatacctccagccattgattcttgagctttagtcccacataagctttgatctgcaaagaaaactggttgatgtgggtaatcgggcttcctcgctctctcaactctctttagatggattttgctgttatgaacagaatgagtgaggagctcggggaccgagaccctatatttataggtgagatactccatcagtatctgtgccacattaattgtcagaatattttgacaattaattcaggaaatcaaatcaggtaatgaatatagaaatctgaccatatatagaatattacgtaattgattctgtccagattcaatgaatataaaatattcatttatcagaatcaataatac

SEQ ID NO: 216070 - DNA, 796 bp, Cannabis indica
atcttttgggtaatgaggttttacctcttcatcactaataaatttctaaaaaaaaaaaaaaagattatatgtgtaattcattggcacttgtgtttcatatatgtatggtttaatgagcagtattatgattagttctataggttgatcaaattttgaggtatatatatcatagttattattatttttaggttttgttttgctatggttcaaatacttggacttccacttataattgaactttagcaggggctaaaaagaaaaaaaaaataaaattaggaggggctgaaatataaaattttaaagaaaattaaggaaaaaaaatataaaaaaaaaagtaatttttttatattttttaaaaggcagttctatttgcaccccttaaaacttataaatacaccccattattaaaaaaaaatataaacttaaataatttttaaaaattactcttaatatttttttaaaattttttcttcacattattttatgttaatttcaatacttattttgatttcattttcataattttttctaactcatgtgtatttttttttatttttttctaaaaaaatttcacataattttttattttaatttttttgtccataatatttaaaatacactttatttttgtttgataggtatattttttaagaatatgaatttgaaagaaaaaagttaaaaaaaattagtacaattaaaaatataaattttatataaaataaaaattatcgaaaatagggtgcttttagaactttttgaggttgtaaataaaatttccctttttaaaaaaatttcg

SEQ ID NO: 216071 - DNA, 778 bp, Cannabis indica
tattaataacaataataaagaaattagttatttaattatttttttaattttattggaaggaaatatatatagtaattaaataaataatttttggtgagttgtaataatcagtcacacgtgccctttttaattaggaagttgacccttattattgaaggaattaattgggaatcacgtaattaataagcgtttggcagcatttgtatacctgtgttttccacgttccttctatattagattctcattttctttcatttcccaaatcatatcactccactatataatatatcatatgattcatatctatatttccaattatatccaagttcttcattctcttttctttttcttttaattatagataaatcgaaggtattaataaagttttgattttgaatgtgtataattgttggattctaagcaaacaaaaatagaaataaaactatttttagttagggaccattgtttctcctaagcatatattctcttttgtaatttgacattgacttctaataatattataaattacatgtaaaataataaaattaagcaaagtaaaaaaaaaaaagacattaatttatcatttagcatttctatcagttaagtaatgatagataagttttccaataaaaaaataatgatacatattttgtaataacagaaaaataatctaattgatcgaattcaatctaatcggtaaagtgtaaagtaaatacctggacttaaaacatactttactacttacgaccactaaaattgtgagtatttatttataagt

SEQ ID NO: 216072 - DNA, 530 bp, Cannabis indica
gtaagttataaaaatgtaaaaataatgtgtttatagaataaattggatcatattttacaagaaaaaaaagatagttcagtttgggcagtttgaaccgacaaaccgaggttcaaaacggtcagttttaagatagaatctggattggtctgtcggttttggattgcaccaattcagaccgaaaacaaaatttgaatttttatatagaaaaaaaaaactaaaccaaactgaccgatactcaactcctaattaagataagcaatagacaatgaaacaactccattagcaacaaaaaaaatttcttgccaaactaactcattacaagcatgcgaaaagcccaataaatcattaccacctgcctagctttgaccttcgagaaaacagtcataacattaaaaaaattaggatagagtgtccctagaaccaaagaatcaaaccgctgccatcaaagtgagacaaatggacatttaaccataatatgaataataaacttggctcttccacgacacacttgacacatcaacggaacattc

SEQ ID NO: 216073 - DNA, 567 bp, Cannabis indica
attattttttttttttgctttgtatcattcttttaaaaaaaaatgtgttttttttggtttttatgcatttcctctctaatcaaatatgtatgtatatataaatatatgttaaatcaattagttttgtttgccaaatcatgaaaagaatttttttgttacttaaaaaaaattaaacaaaataaatcgatctaacatatactattgactaggcataatcatatttagtttatttttatcttttgttatttctttatatatatatatatatatttatatatataataaacatgaaataaaaaataatttaaaaaatgacacagtatgaaaaaaataaactaatgcaaaattttgttgaaaaaaagaaagaattagtgtttttcattttttataacataaaatagtgcatatttattataaaaaaaactaataaataaaaaaatgcatagtagtgcatattatttagtaaaaaaacttaatgagaaattaataaaataatctaaaaaaataaacgagtaaatgagattacacattttaattattattgaaagtaaaaaagtaataattgta

SEQ ID NO: 216074 - DNA, 463 bp, Cannabis indica
ccaatataaatcatataactataggattctaatttttatatataattatttcaaaatgttacatataataagtcgcctaataactactaaaatatgagtccaattatcctaaaatctgaacacttcaggtctaaccatctcgatatatactatttttatgtagctttagactcactgttgttcaacatttgccctgtccttacctacacatgtaaacataactgtgagtcgacaaactcagtaagaaaaacataaacataaacatataaccaaaccgtaaccaagagtccatacaccttatcgcgatcctccccgtatcaaacgcgtataagtcccgagcatttgtatgacaatatgattgactataatatcagcctatacttagcactctaatcatactgatgtgatagtgccaatccatactattagtataatcaactagaatattaacttatactcagca

SEQ ID NO: 216075 - DNA, 847 bp, Cannabis indica
gttatgataataatatgagtgattcacttaagggtgtgcataaataattctactacaactatcgattcaataatattcaccatcaaaatttaatgtctaatctagttatgatcaaattgaatcgaatgttgtttttgaatatctaatgatatttttgtaaaaatctgatattcaattgaactaattaataattttatataattttagataaataattaaattttatgttattatatatatgtatatgtatatggaatttagaattaaaattttactctaaaattttactctttttttttggtttgatggatttaatccaatccaacaaatattagattaaaaacatggatggatctaatccgaatccaaaaaaactatcaagtctaaaatattggattaatttgaactaatccaataaatatacagtagaacatctatttaagaatatattttagacttttattcaaaaaagaaatatattttggaccaattatgttctaattgaaaagttataaatattcataatagtaacttagaaaatatatttctaattaaaatttaaaaattattcttatttatacgattgaaattgagatttaagttttttttatatattaaattaaaaattatttttgaataaattattcttaaataaagattctgatctaatgcaagattcagttttggataattaaaattagttggatgggtgggattggtttgaattggaggttgataaatctagaaacgagcagacaatagtatagagagtatataagagagacacatttgtaagaaacaattgggccagtatataacttggcccacttaactcatccagggaaac

SEQ ID NO: 216076 - DNA, 721 bp, Cannabis indica
cctagatttatattgagggcttggcaagatgaatattgtagtttcacattatttatgtttgatattttatccttaattataaatatggtgtggtgctttttataaatttgtagtcatggtaataattaaaattgaactcatatttgtgtattaatatagaaatatgtcattaaggaataattacaaattaattatcttttttttggctagaatgtacaaactaagcaaagggaaaaaaattgataattctccgtggataagatgttgagtctcctataggctataggtggctcacacttatattaacacttctataaaagataaaattaagtcattcagttgcatgaattaattacttattaattcatgcttctatatataactatagctagtaaagattgtgtgcacgtatatatctctgtgataattaatttgaatattcaagactattaaaataaaaaatgcattatataataaattaataataataaaatccaacatattacaaatttaacataaatggcaataataataacgagagattaatcttacatggcatcttttccttccatttctctattttctctattttgttatgttttctaatttttttctattgaataataagaaaaaaataatgtaacctccccattctaatttttttataatctattagtattcttttaaactattagtattctcatctatatatatatatata

SEQ ID NO: 216077 - DNA, 504 bp, Cannabis indica
aattaaaataaaaaaaaaaaaacctataaaacaaattttattaattatcccaaggatagtatgtaaaaaactttaagggatgtttaaaataaatcataaatgaataaaaaatacaatctcaaataacttaatgaaaattcaaatcattcaatagatatattggatagactaaaaattattcaaaactgctaagattaactcgaataaattgatttataatatataacataaattatatttattagttaaattattttaaatttaaaatataaatttaatagtatttaattgaaaatatagagtttataattaataacttttattgtaattcgatattattaaaattaaaatttacactatattattacttattttttatttttttaatgaaaaatttcatccaactaaactaacttgatttcaacaatgacatgaacatcaattagggcattagagctcaaaaaaaaatataatcatcatttaaataagaaactcttacaattt

SEQ ID NO: 216078 - DNA, 508 bp, Cannabis indica
ggctacttaattgtttaaacgctttgaccccttgtctgacactgggagagaggccaaaaaggtcaagttggtggaagcaagaaaaggtccctcagaggtgagggggacttcaatagggttggaactctagtcagggaggtctaaacgaggccccaagtgtctataacccttagccagctgcaacaacaacaacaacaaccgcaacaacaataacaatagcaacgataactgcaacaacatattctgtgatagccaagtatatgcctaattcttcattgtccagaggttttgataagacaagaggttgagctaattgtttctttagctcttggaatgctctttcacagtcctttgtccattcaatttttttgtttcctctaagtatgttaaagaaagggacacacttgttcgtggattttgacactaatctacttaacgctgcaatgcgtccagtcaggctttgtacttcttttatttttgtgggtgacttcatgtccaaaagggcttg

SEQ ID NO: 216079 - DNA, 916 bp, Cannabis indica
attaattggaagtgaattttaataaacttatgtaatgtttaatgtaaataatagtgagatgtttcactttttctataatagaaaaggaagatgtgcaataacaatattctaacaaatttgacttttaatattctatcattttggtttctgtaattagctaagataatcaatactaatgtaacttacatatttttaatcaaaaaataaataaataaaaacttaggacttaaatgtttttttttaaaaaaaagtttaggagttaaatgacttgattgttattaatttatcaatatacattacatcattattaaatgttacattattattttttttaaccctaatctattcattcaaagaaagattataaaggatttggcaaatctcgctataaagccagatttgtacaaaaagtattaactccaattcacgtaacgctagttttgtgcaacaaagtttaattggttaaagtataagctaccccattaatttcacgatgtacaaatgaagtcccaagaacaaaatcaaataataacatgtttcgtatatgacaaagaaccctatcaacatctttgcaactatcttccttacattggattaattgaatagcttcaagatgattggactcaatacgaaaccttcgaaatttttgttggattcccatttgcaaacgagcatgtatggctagcaattacacacatgtaacgactgatgctcgtttccaaaacatcctcgtttccaagtcttcacatctgttttgtatattcacaaagttttcacacatgtctaaccaaattgcaactccgcagggcatgaaaaacattttcctgagcctctcccgaacacctcagacaagaaggatcagtgttaatacctcaagatgacagacctgcataagttgggagcgatgagtgagcaa

SEQ ID NO: 216080 - DNA, 562 bp, Cannabis indica
gaaagaattaattataataaaatgtctaatgaaaagtagattaaaaatataaaaattaatagcacaaaagtaatcaaactcaaattatcaaaaaaaataaataaataaataaacaaacttgaaataaagagagaaagtgagaagggagaaagacactaaacccaacaaaactatcatcatcgtccaacaaaacgaaggaaacccaacaaatttgtggaaggcaaaggtttaagaaatgttgtatctttgtcgaggtgaagaggatcctcctcctgactacagtaagaaccatacccatatttcataggatctttagaggtttcaaaaaatatttgtgttgtggttattaatgtctgagtaaaatgagttaataggggatttttatactaatttttctatctggtagtagtgttaatggtttgttgttcagagcttttggtctataccgtgtaaagtggttggatataatattaaagtttaaagtttaaaattatgggtaaaaacacattagttaaaggctattggagaatctttggttgttgtcttcttcaatgggaacatt

SEQ ID NO: 216081 - DNA, 719 bp, Cannabis indica
tttataagaaaacgtcttattcataatttttttaaaaatttacaaacttgatattataactataacgaatatcgttaaaaaaataaaaattaaaaaaaaaagatttcaagatgtgtttttgagtacaaaaattaactaaaaggttgaaaaaaaaatgatgatagcactacaacaaacgagactttttatcccagtttttaaatttaaaaaaaataaaaagtggaataaaaattttagtcacacttttacatttagaactttaaataaaattttagaacaatggccttatttgaaaaacaaacaaaaatgatattggaaagactatttttatgcatttgccaaatgtaaccttacactactacgtacaaaaagtacaattctagtcggtttctaattgtcatttatagaattggcatcaatcggtttaaaatgacacataaattgctgaaacactttttctttttcacctattgtgtcggttataaaataaagcagaaaaataagtaagaaaaaattacaattttttatgtaattttttccactgcattatcaaattttaaaataattttatataatagtaaataaataatacaaaaaaaaaaagtctcaaatatctcaatagagcacaatgaaatgatctaatgatatagcttagcgttgctatactcccatggacaacatcttttcttgtatcaaaatttaatcatgactctatttgt

SEQ ID NO: 216082 - DNA, 636 bp, Cannabis indica
gtgggatattaggaatgtggtcatatatgaccaatattattaagtatgtatttaggaaaaaaaatttaagattttctaagtatagaaaatcaaatttcccaaagaggtcacacgaaagcctaagacaagcagaccaaaggcataggaacgataccatcgcccgccggaaaaaacctacactctgccagccaatgaggttctaaacggtaatcatgatttttttttaacattatagattcaaactttatgtttattacaacattatcttttattatttgttggttagtaatgacatgttagaattttttgaaacacacatagtaaactgtatatttgaacagatattgtaactacaactaaaaagaggtcatccataaaagataatttgttcatgttaaattaacatcccacatataataaaaataaatatatactgtatctaataaggtatttgatcccttatagattcattcaccatacatccagttttgagttttaatgcataacaacttcaccattatgcaaacatgtttcaaaaaaaaaaagtcactaacttatctcccacttctccttttgtatttgctttgattccactagctgcacacacatcaatttatgttagtaacaaaccaaaaa

SEQ ID NO: 216083 - DNA, 543 bp, Cannabis indica
ctattttttgtagtgtataccctagactgctaatttttggagtgtataccctagaatgttaattaaatttccatgtcgtaattcttaattggtccaagttgttaactttttaatttttttttaaaaaaaaaaaagaaaatagtttaaataaaccaataacacttggtattggagtggcaatgacccctacctactgattctgctataatcttgttgggtcgttccaactaaaaaaaaatgcaatttgattgctttaattgttagagacatgtttatttggagaagtattatacatctaacatttaaattaaaaacatagatattcgtttcaataattttctcaaattttaattagagtaaataaccatacgattgatacagctctcatttaattaataaggaagtttataataatatattttttttacatttaattgataattataatgttataactattactgacgtgccacatcagtcaaatttgatgtttctgatgtttttcaacgtcttttaacaatttttgttttattattattttct

SEQ ID NO: 216084 - DNA, 1023 bp, Cannabis indica
ttagtgtcttcgatcagtccctgtgattgctaattgctggctattccttcgcttgcctattttctgatgttctgaattcattccagggtggcttgcttttgtcggattgacatcttcattttgtttaaatgggagagagatgtagaattcttcatttttccataatgtgtgattgcattttgttgagaattctgagtgagagtttgcacatgacttttgaattagcatttctttgattggtgagaatacgtttggtgccaggtgaaagtaattcgggatttgctcccattgggtgaagaaattcttgtaggccaatccttgtgggagtattcgaagtccttttttttttctgtgtaaaggtcgaatcccattatgaggtcctttcctggaagttttgatccaatgaccttgtggataacgggacatcctgggaacaattgcagctttattggcttgctgattagttctgtgcggaggacttgattatttgcgacatggaagtattgcttctttttcttccatagttcggggggtagaatgtccagatttatgattgtgtatgatgctcccgtatcaaaaaatgcagctacttttattggtcgtgagtattttgttgggatgacatgcatttttgcaatagggataggttggccaccggggaacgcatgcatgttgaagagtcctccatatctgtcattatcggaatcagaactcagttgtaatgcgcacatagtatttggggagatatcgtcttcgacggagaagacggactctacgtcattatcagagagagacaccccagtggcgtcttctatgtgtgttatcatcttggcagttttgcctttcggacattgttttgcaaagtggcccttttttccacataagaaacaccgggttgatgattttcctggatttttctttttctgaaggaatttccaaggggttttgctccttgaggatctgtacttgaaggttttcttcttttcacccttctgttttaagcacgagcatgtgtctttggta

SEQ ID NO: 216085 - DNA, 518 bp, Cannabis indica
aattaataccacaagattgagaatgaatggctataaaattgcactcacttgtgacaacaaaaataatgttctcatctaaggagtaccctgtaaatataaattttaattatgttcttatcagaaaatatgtgtcatgtattactattaattttgacttcaatattaattatatatttataattttctaaatatttattctgtgactatgtaacagaattcttagtttaacgggtttttttagtttttatgttaactttaatagaatattacatttacttaacaaaatattttttattaattttataatattaatatatttatttaataataaaaaattatgtaaatattttatataaaaaattaatttaattatagatattaaaataaaattatatctatatataatcacatctatatataaaatatatatatttaaacattaatttctaccacaataatttgtacactttattgtaaccatactctcctaactagaaattaagaatattgtatctatc

SEQ ID NO: 216086 - DNA, 659 bp, Cannabis indica
taagtgcatggtcttatttttatcattttagaaaatgcatggcctattttgtcatttaacaaaacagaaggtccaattagtaacttttgcaaaacacaggatccaaaatggtattaaccaaaaaaaaaaaaaaaactatattagataaaagttgatacgtcttgaaacaaaaataatataattattccaattctatatatttgtcaaactaaatggttaaagaggtactagaaagtagggttgtacaaaaatttccgtaaaccgcccaacccgaaataatccgcccaaaccaaatcgacaaaactgataaaaaatacaaaccgacataactcgataaaattctaaaccgcacaatcagtaaattgggcgggttgaaaattgaccaaaacaatttaacctgattttcacctttttttttattattttatatatatatatcatataatatataataatatataatatatattaaaaaaagttaccaaactctaaaattctttctcagcccgcctctctctctctctctctcgtatcctactatcatcctcgcgtgtggcggccattatcatcctcgtgtgcagcggccatcaccgtcatcacctctgacgtaacagcgtgcaacgaccatcaccgtcatcacctccagcgtaacagcgagc

SEQ ID NO: 216087 - DNA, 983 bp, Cannabis indica
tgcatttttacttgatttttgagttctctttcatttgcgcttttctttaatcgttaatttaggttataacattagtttaaacttttttgggttttgagattttagggtttatattatgagaaaaactcattaatttatcctcatttctaggtttttatttgtttttttagaaataaagatgtatttagaaaaatgtccttatttgaaccttaaattgaaatgggagcccaaaatttataaggaacttgttcccttatacccaattttacctttactacatgaatctaaatctttatcactaaattagaaattaacgatgagaaaattagagaacattaaaaaaaaagttaatatcgagcagatacttctactcgctatgagtgtttaattgttgagattattaagggtaagagtacgcttttttgctagatgcttcatggtctgagtcggtgtatttaacataattttttgttagcggcctttaaatattttcaatctaccactgtaataattgcttttttcaccaagtaatatagatttttgaaaattatggttccttcaaaatttcaaaattagtgtaaacaaaaactagttacactattaatttttatcttatcatttttattatttctattttataggagtctatttatattgctttatttttttttttctcaacatgaatttatatgttttatagttaaatttatttagattaatatcattgaaaagtattctatataaatgtatatctatatatataaagattctataaattaaaatacaaaaaacaaattgaccccaaacctttcaaaaaaataaaaaaaaaacaaaaattgataaccccaaaaatgtaagttttttttttttttttgtaaagaaaaacctcagttcattcaacttaaaaaaggaaattaagattgatagggggcaatccatcccctacacagagtcaacaactctcaacacttttagcttagaca

SEQ ID NO: 216088 - DNA, 1083 bp, Cannabis indica
tttttaattaatattttggactcgcgtgtgtattagttctttttttctatggcgaaaaagaagagagtgatacgaaagcctgctatcaaactgaatctagcaagttccccttcaatcaaagacagtttggttgatcaatcggatgttgcggagtcgaatgaagttaatttggtggagatggcttcgcaatcggaggatattatttagactgttctgaactctgaatcagataaggaggacattgaggagtagggaacctaagcagatgaagttgagaatgatgatttacttgcaaattctcaacaaaaatgaaagcgattcacagaaggtaagctctcgttctttgaacctaagctaacctacactgaacctatcaagaaaatgggaagaaaattgctcaagtagatttggaagaggttaaggatcaagcgactatatggagtactgctgtagtttgtatgatgttaggtgcaaaccccccatttgctattttgagggcttcataaaacgtaaatggggtaaactaggtatacaataaatagtgaggatgaatggaggttttaatattgtgaagttcaatgacacaatgacccgtgacatggttttggaggagggtgtagtccaatttgataaaaaaaaaaaaaaaccaatcataattcgcccttggtcaactgatataacggctctaagcttggtgaaattggttcctctatggatccgattacatgatcttggtttgcattactggggcaacaaatgtcttagtgcaatagtgagtacgatagggaaacccataatgactgataaaattaccaaagagagatctatggtgaaattatcaagggtattggttgagatggatatttcagatgagcctccaagagtgatagaggacaataccatttagtagtcttagacaaaattcacggtaccttgtcgtagtgggagggtttcaaggaactcaccctataatgacttggaagacacttgtgattaaaaatccattgttagttaaacaagtaatggattgtcagaataagaaactaagaagaaaagccaagagaactatggttaaaaccattc

SEQ ID NO: 216089 - DNA, 580 bp, Cannabis indica
catgttattgatgatttctcgacgtgttctcaactgtttctcgatgattgaatgattattattttcaacgattattgattgcttttctgtaggttctcgattagttcttgataatttgtcgacattgttttcaattattgtaattttttgttatttttgttattctgagttagttgtttgtggtttgtattgaattgaaagattgcttgtgttttcgattgtattgtatgatggtgcttaaagtgttaagggatttaattgggtgtataaaaggaatggaagtttaatgaggatttattaagcaaagtatacctacaaaaattaacaacaccaaaaacaaaattgtattagttgatgagcatttattcatatcgacaactctgtcaataatctatcaataataaacaaactcccagcttttttacaaaactagtgaaaactataacctgtcaagaacatgtctagattctattgataatccatcgataatccagcaatgataaccgacatagcaaaaaattaagtctaactcatatcgataacctatcgacaacccatcgataatgaatcgatagtcaag

SEQ ID NO: 216090 - DNA, 685 bp, Cannabis indica
tacgccgtattgtattgtattgtgttggattgtattgtattgtattagtattatttaatataatactatgtttggtattgacttgtattaatatattgtattgtattagtattatttaatctgggtcctagtcttgggttcgggtcgaggtcctgggtcggggttcgggtccgggtcagattctgggttcgagtcggggtacgggttcgggtcggggtccgggtcgaggcccaggtcaaggtcggggtccgggacggggtccgggtccgagtcgaagtcggggtccggggtctgggttcaggtacgggttgagatccgggttcgggtccgggtccaggtccggattggagattggtgttgaccccgaatcctttgtaaatattataatacaagttaatatggaccatttgttatgtattaaataatacaacatacattgtattaaaaattttggtcgtaataattaatacaatacattattttatccaaacatagtgttatttattatttaatacaatacgacccttatatgacgtaccaaacgagctccaaaagttttcaataattggcagtaaattttaatgtttgcatagagaaacttataaacacgctcctagtgtactttattagcattaattaataattaataattaatgataattgatagaataaaaataaactaaat

SEQ ID NO: 216091 - DNA, 827 bp, Cannabis indica
aaatgcaatattggctctgtgatcatctatattagtagaaagttgcccaattcaaaccacccacaatcagttcagggacaaaggtccaaccaacttcgaagggttacagttgggggagcatttgggggagtaggctctaaattcacattctttcacaccttagtcacaaatagtggcaacaagttgtccactcattttggccttcatgctcaagaacactcgtagttgactatctttcacttaaacctgtggtggaaacttggtgtctttcatgtacatgtaacaaaattctaatttcagttcatacaccaaataatccaaatccaactcttcatacaaaacttcacgcactttttctaatgtagtgtcaatgtcaaacatcattgtcttactttttggggaattgaatacccagttgaaaccctccatagtccaaatatcatcatatagtataggcacaaaatgcaattgaatctaatcaaaaaaaaaccacaaacaaaacaaaaataaacagaaaacatcagcatatcatatctcacaataattgcacatgaaataaaacatatcgcataatgtcgcaaacaaaaggcaagaagatatccataaaaaattaaacaatatcccgcaataatcacacaagaaaaaaatatatcgcataatgtcgcacaagaaacacaacaagtaaaaatcacgcaaacatcgcgcaaaaattgcccataaatcgtataaaattattgatttcggttgcacaaaattgcaatagcatcgttcaaatgtcgcatagattcatccataacctttgaaaattgcacaaaattgccaattat

SEQ ID NO: 216092 - DNA, 732 bp, Cannabis indica
gggactctttcttccctgtagagggccagagttcagaatgaggaaagctggtctctctctactccctgtaggggaatgggtataatgactttaccattcattgaatctcttctacatacataagtgagaataaggaaaatcgatcgccacaattaatgtccctgaccactgttctatctccaacaccagtaacagaagagatccaccccacccccgcgcagggcagccttgctaactctcctgaaatgctgagacgtccaggaccccgtcccatagctgcgtcatggctagcttctcttaaaccaagttcacaccctgcaaacacaaagcctttttcttaggttttggcacctccttcgcaaccctgatcctgaaggaattaatttctcatttggagtagtggagttgttgtgggaagtgggtggagtgggaacttctaggaatcacaacttctttcatgcacttctttctctcattttcaacctgatgctcccgtcagcccttccgacatgctcgtcagccacagtcactctgctttgtctggggtcatgagacatccgcaggcagaggggctacagtatccctacaggccagaccaacaggaggagggactctagctgaagctccatgaccccttctgccctccagtctgggaaggagggggcgtgtgtatgtgtgcgcgcgtgcgcgtgtgtgtgtaacactacaaggtgtcccaaatcctgttctccc

SEQ ID NO: 216093 - DNA, 519 bp, Cannabis indica
aacgcccaagttgataatttgtcaatccgggtgccttccaagtatcagatcgatgattcgacttttgcaccttcttcgtcttcacaaaaaatgggaaaacaggtactttcgggaaagaaacaacacttcatgggtgccagaagcaaggcctagcacccaggtgaacactcgggggcccaatgctcaggttgacatttttgtcaacctgggccaatttcgatgatattttttgagaattctttcaagcatcttcacaattttcaacatattaagattcaactatttttgaggaccaaatggaacttccaaatggccaaaaaggggacctagcacccaggttggcatatgtcaaccaaggctgtttctaatcaagttcttgaaaaagtgttcgggtattaatctgtcatcagaaataatgaagattcaagcaaactctgaaagaaaactacaaactcgaggcttgaaagcaaagcccagcgcctatattgacttggtggtgggcccaatgcccaggttgac

SEQ ID NO: 216094 - DNA, 579 bp, Cannabis indica
tatatatatatataacttatcgatcatttatataacaactttaattttaatataataataataacagttataataataataatataataatattaataaaaaattttattattaataattatcttatcattttttagctactaagaaatttttatttctagggtatttagtcaactttgagtaccttaaaatatcccggtatttctaaaaacaacttatcccaataattctaataatatttctaactaatactgttgtgacacttttagacttcaatcaactcttcaggctcgtcaaacttaaaaatatttttatctcacaaataatttacattatatccacataaataaagttccgtaattattaaattacacttatttatttacttatggtaaaatttacaatttatgctaaattaggttagcaggatcataatcctactcattattacttaattaacacataatgtataataaatcctaattatttataattaaattttcgagatattacacacacaagactgggcgaacttgcctccttttgacgctacttggaaagatttttttgtcatccaag

SEQ ID NO: 216095 - DNA, 558 bp, Cannabis indica
gtcaaattcaagatcatatggtggaaaaaaaaacagtgactcaagggtaaaaataatggtcttgctaaggaaatttgtactaaattgggcaattcaagccatgccacttctcgcagattacgacatctaccctcaataatttcatctatatatcacatatagcaagttgatgtttcttcttgactagccttaagggagaagttcctaattttttttgtcatttatctcaagtatagattgaggtttataggttttgaggtttaaaaataataacttggaattggggattatcgaattttacaaggtctgggtattcgtaatcttgatcaaaatgagacattatcttgattaaaagaaaaaaaatatctcaaaactctggaaatatagaacataaaaactcaggacttgtgaattatgtaaccctaaatttatagccttaagttgttgaaaatccataaagacaatcccatacaagaaattaacgaaagatatatgaaaaacaataaaaaaaaatgaaataattaaaagaacaatagtggaaatacacttactggtttg

SEQ ID NO: 216096 - DNA, 575 bp, Cannabis indica
gtttatgcggtttaaactatcactaaataatttaaatatcacaaatacaacaaagcttgagcaacacttgtcaaaaatacaataaggcttaaaaataaatatgaaaaaaagttttaattttacacaatacaataattagtgcgtttaggttgggctttcacatattggacctaaataaatataaaaattggtatttttatattatgcggtgcggtgcagtttgaaccgcatattaacaattcaaaaccgcaaaccgcaccgcaccgcgcggtttaggaaaaattcaaaccgcgaccgcaccgtaaagaatttcaaactgcatttttttttgcagtgtggtgcggtgcggacggtttgagcggtttgatgaacacccctaagtagtgatactaatttggaatcttgtattttgttaaagttattggacactgttttattaaataacaaattagactttatatttttaaaaataatacaaaatagtaggtgattttttaaaaaaaaaaataatacttaatgataacctaatataaaagctttataagaagactgagtacattttttgaatctgttta

SEQ ID NO: 216097 - DNA, 586 bp, Cannabis indica
tcgcattccacctgtgaaagaaataataattttaatgtatactaggaaatattgaatgatttacaattgattaaggattgatcgattaagcctcaatggtctgaaacacgtgcatattttgaatttttatataataactattgaaacattaaagaatagattaagtctaaaacttaaccaaaatatcattaatatctcatcccatctcttaatgcaataaaaaaaagtaataaatgataatggtgtatattttccaattttgcaaacaagcacctgatttaaaagttgaaatattttctttagtatagttgttgggtcatctccaaaagggttttaccttgcaattgcctaaccaactgtagattcaaaatacaaatagaataattcatgtcaatggcgaaaagagttttcctaaattaacattctcaataaaatttgataaatatttacatatacaaataattattttgtcacctatattacaacttaatacattcatttagaagttctgaacatatctaaaaataccacttaagctctgaccggctacgtcaaaaattagaatcaaaatataacacatcatact

SEQ ID NO: 216098 - DNA, 684 bp, Cannabis indica
aagtacggtacatacatatagatagcaaaatatagtaatttttcaattattaatatataaaacaaatcaattattaagtcttaatacgacgagttagggcatcgtgggtatataacttgaatcaatgtcaattactgacatttttggtgtcgttcataatgaataataatgtgtaaatagagagaaaagagagtcaacgatattttttcactggtgcccaatcgaatcatacacggaagttcgcttggagggtttttcacgatatttttctcttaatggaaatctattaataaattaaaataggcaagtcttgtctttcatgacatggtgtgattgtttctggttgagattggttcttgtttttctggtttgagattgcttcaggttctgccattgttttctggtttgacagttttgatttttctggtttctgccattggtttcttcctgggtgcgactatttttctgctttcctggggtgcgactggcttgccattgtttttctggtttggctttcttggggtgcgactattttttggtttgccattgttttctcgtgtgcaatttttctaggattgtttttttggtttgtgtttatttttcctggcttgtgattgtcttcgtggggtgggtttttttttggtttggttggctggtttgtgtctgtagctctggtttgcgatt

SEQ ID NO: 216099 - DNA, 519 bp, Cannabis indica
ttttggttatgttttggaagtaaaaggagcaactttaatcattcaaccacaaacaacaaactacaaagcaagctgccaaaaactgcagacacaaacttacaaaatgttaattaaagacaaaacatcaactttcctgagataagaaaataaacaactcttaactttgacaattaacttgatttgattacttcacaccatataagtagagctataaacaaattcaaagatacatatttatttttatttacaccaaatgcagtatacaataacagttactatagtattcaaaacaacagccacaaggcttttgatgaatttcttacatacaacctccacctctagcccaacaaataactgaccaaaccaactaatttgtacatcctaaatcaccatttttgtgtaaacacaacttaattagaaaacatgccgatgagtctcattagaggtcgcacaaaccgggcagcagcgagagtttataagttcaagaatctctaagatggtcccttgtgatgagtaaat

SEQ ID NO: 216100 - DNA, 1140 bp, Cannabis indica
atataactatgcataacacattctcattaaacatcactagggtaataaccctagaccattaaaccgctcatgttagggtgataaccctagtcccggttcccaattactcacaaatatcattttcaatataagcgccaccgtgcatactctacgtgctaaatactatcctaccaattgtcctgtaaacacggagattccaaatcccccagtgcccctaatccagtgtcggtaatcctagtcacaatttctgggattcacaagtatagggttaatccctaaataaactttcacataatataaaattgacattcaaaatatagataaacatataaagctcggaacaagctttccaacaatataaagaacgacccaaacggagtctcgagtcaaaagttatgaccaaaacaagttcaacatgcaatctgtccacgcgagcgggccgcggtgcccaaaagttgggtcgcggcgcttgggttgataacctagaaactccattctagcaactccaaaaatgcatcaataatcacccaatctcaccccaaacatgcatatatctcaaaatcatttcccacacaatataactaacataacagagagctaatacacacatttaaaggtcaaaatcaaggctcgcatgcaacaaaatcagatttaaacaatatacaataggctccaaacttgagtaaaatatcaacaaattgaagctcaaaccttgaatctttaaacccaaaacacaagctcaagctcaacaataaaatcagagctgtataaaagaattaaagcaccaacttaacctaaaaaattatctcaaaagcacaacacaaagcatcctacatcaatctttaacacaatcaagcatagagtatcaaaattaaactaattccaacacacatgcatcacaaggatctctacaataaaatcatgcttaaatcaacttcaatttcagcaatcaattcaaattaagacagtaagaaaactacctccaaatcctcaacaactcaagcttcaaagattcccacaaaataagcttgaatccaagcaattctctacaaattcaaagattagagtaaatgagtttagagggagagagagggggcggtttgggtaaagcaaaatacaaaaaatgcttttcattaatca

SEQ ID NO: 216101 - DNA, 444 bp, Cannabis indica
aaaaagaatcaatttcaattatattagaacataaataaaatagaaccgatttcaccacaaatttaattatcaacacattgtatctgtacaacacatgaattggaggcaagacacattggtcacatacttttaatcgtagtttggcctattgatcacataaatcatgctctttgaacatataaatccattatagtgatctgcctctttcacaagttcctcctcaaactccaccggcttcttcttcctctcccatcatttcaacctatgagactctctaattaacctcaaataaaataaaatcttaaaccatgacagaaaaaaaataatatatatatatatatgatccaaatttaatacaatctatcatcttcaagaaataatatatatatgatccaaatttaatacaatctcatcttcaagaaataatatatatatatatatata

SEQ ID NO: 216102 - DNA, 1055 bp, Cannabis indica
gagaaatgttgtggtacatgtattgtcatcaaaacaaagacggaggatggggattgcatattgaaggtccaagcacgatgatgtgcacagttctaaactatcttgccatgcgcattcttggagaaggacgtgatggtggtcttgataatgcatgcttccgagctcgaaaatggattcttaaccatggtggagcaactggatctgcttcttggggaaagatttggatgtctgtaagttcttctacatatcattacttggtacctaacactatttcacatggttggcctctatccctaacaaaaaaaattacctataatacattaaattaaaaaaaatatacatattttaataacattatgaaaatttgaattacagttttcaacaattttgtgatagttttttattttgtttgtaatattacgaacttgaaaattttaattcgcaacaaatttgtaaatttcagttgaaaaaaataattgctattacaaaatatagctttttttagagcaaaataaactatttattattttatgactatgtgcacgggtgcaacctctacatttttacaaaattttccatatattttgtagaataattttgcgatcatgttaaataaactatatatgttggattacaaaattcgtttttccttattgatataactctgtataaaattctctatatattttaataagatatgtatatgtaatggtatatttagtacttaattgtacaattaatatatattagctagttagtattgaatggcataatataccatagaccaatgcactttgtatatatataagcaatttcactgctagcattaagtcacttcactttattaattaatttactttatcattttgtagattacttggtgtatataactgggacggatgcaatccaatgccaccagagttttggttctacccttctatttttcatccatgtaatgttcctatatgtttctccctaaacattttacttatttttgtgcttaaagtcgtatagtatttatgtatatatgataaagaaaattatatttatgacaa

SEQ ID NO: 216103 - DNA, 652 bp, Cannabis indica
ctttaaaaaacatacacaacaccaaacaactttaatacatatttgaacaactatataacaacaaacaagtaactgtataactactctactttaatatgcaaattaaataataggcataaaaaaaaacaagacatcaataatcttacaaaataaaagaaacttaaaattaattataatacacttgctcactaactcaatagtatatgtacccttgaaaactaaatatatatatactcgtttttctgttttagttgaacaactaaataacaacaaataaaaaatttaattacagctctactttattaagaaaattaatcagacattaaaatagtgcgcccaaatgtaaaattgaaattaaaaacaatgaataaataatctaaaagaacaaataaaagaaattgtacatcatctcaagaataatattttcgacacatcaagaaatttataaaaaaaaaatagtaaaaataaagaagaagaaaaaattctccaaacataaagaatttttttatttgtaaaaaaaaatagtattttatttgtcaaaaaaaatagtattttatttgtcaactgacaatagaagcatttatacgtttctttttatgttttaagtttataattgtttatttaatatcatttttaattttcaagcattatt

SEQ ID NO: 216104 - DNA, 638 bp, Cannabis indica
ctgaagaagaagacgacgtcgttttcttccccgtttcgatcttaggcagcccgtttcgtcccatgtttacagtactccttccaaaactaaactcttctccactcttgtcctctgccattaaaaaaaatataatattcagacttagagagagagagagattgatttataatagagaaggagatattgtgagtatggctataatatgaaaacccaaatctatttaaaggatgagtttggtgttgttaattgattattacccaattaaaaaatttattattattattattagaaataattaaataaataagaaattaaaagcgtaatggataatgattgaacatttcaagaaaaattgcacacgtacgttggtgctggcactcatatatatacactttattataattactctttaaaaatatatatatattcacatgtatttagatatattgttacatctgtatctctcatctcacttcacgtcttccatttttattttgtattttccttaatttcctggaacttgcttataggattggataacattacagtgtatattatatgtaataattaaaatatattagatcaatatatatattttctgttttcaactttcttgggcagcgtttttttttttttta

SEQ ID NO: 216105 - DNA, 647 bp, Cannabis indica
tatttggaagaaggatgctgcatgcaatagatattttctaattgattgaagaaaacactgtgggagtgggaccctacacaagtttttgtattctttgagtcatgtcacttgtgataataaagcgaactcatgcttgagcaccaaggacacaagcaatatgcccttaccccttaacatttgtctatcttgatgacaacaaatagcttcaacatacaaacttcaatgtttttcacctcatttactaagagataaatattgggggaaagagaaataaagttcggacaatgttaacgaaatttcaaacataatggtgacaaaggtgatggttaatcatcaagcatcaccaaatattctaatcagaatagaccctgaaaagagtgggtcactccctaagagatccagggccatgcaagtagctcatgtatggttttaggtgagccaacattgctccctgtaacaaaatcaattcaccactatagtatgttatgttttcggtgctaatgcctctataaatattagaaggctttactaggagaatgtgaaaagataagatggaaagagtatgaatgctatctttaggcttcttcctaatctatttcaattcaattgaagatagaaatgagcttctcaaaggtggatatattttc

SEQ ID NO: 216106 - DNA, 562 bp, Cannabis indica
cctatgtaaaccaccacaaagcttgattaattcttttttaattacacataatatataggagaattactttatatactgttttttaaatttacggtttgggtttttaaagtggttgcatcgctagttacaataggagtgtctatacgattttttgttacaatttaagttgtaacgctagttacaatattaatttctatataaaattccgtaaaaaaaaaaaaaaaccagttttgaagtgtaaaaataaaaaaaaaactacctaatatttatccagttagtattattatgcaggggttagttttagagttaaacatcggacgagttcattagtttgcgagtttacgggttttaagtttaaaaaaaaattacacccaaaaatctacccgtgtgatgatcagattggttgggttggcgggataatttttttttttttaaaaaaataaataagactaaacctggcgtttacaaccctaaatcccctaaccctaactctctccatatctcaatccttctatctatcaactcctatttttctacctctctctctgtaaggaaaaaaatt

SEQ ID NO: 216107 - DNA, 1537 bp, Cannabis indica
cacttcaaaacagtttttgttttagatttttacggaattctccataaaaactcctattgcaactagcgttgcaacctgaattgcaacaaaaaatcgtatagaaacccttattgcaactagcgctgcaaccactttaaaaatctaaaccgtaaatttaaaaaaaaataatatataaggtaatttcccaattcatatttctacagtaacataattctattaattaacaacaaacaatctttttatattgcaggcagattgaatgcaaacacaagacaaagtggggatatattgataaatggaaataaacagactctagcatacggaacatcggtaagataataataataataacaataataataataattaattttaatttaattttaattaacatgcataagaattaatgaacaggcatacgtaacacaagaggatactcttttaacgaccttaacggtaagagaagccgtacactactcagcacagttgcaacttccggactccatgtcttcagcggagaagaaggaaagagctgagatgactataagagagatgggtttaactgacgctgttaacactcgcatcggtggtagtgggttaggaactgggagcaaaggcctaagcggcggacagaagaggagagtgagcatctgcatagagattctcactcgtccaaagcttcttttccttgacgagcccactagtgggctcgacagtgctgcttcatactatgtgatgagcagcattgcgtctttggatattcagagtcggaggggtggtggggccggtggtcggaggactgtggtggcttccatccaccagcccagttccgaagtgtttcagctttttaatactctttgccttctttctgctggtaaaattgtgtattttggtcctgctagtgcagctaatgaggtatttttatcttcttatatggacacaattttttattaacgtatttaaattattaattacaatacataaaggagtaataatatttgtactaattataaattgatttaatattatgtattgtacagtttttcactatgagtggctttccttgtccatctctccaaaatccatctgatcacttcctaaaaacaataaacaaggattttgataaagtgcagaaggtacataattatccatatatattcctaattatatattctagtcttgtaggatatataatattgttattacattataatttaataatatctagttttacatattttataatttagaataaaataatacctgaaattcaatactaaatttcagcaatcaaaagtaatatacattagtgatcaattgaatcatcattactattaggtatatcttaattaattacactaaaatatttccttattaaaatatgtaaacctcatataaattacacctataataatacatcatatttctatagtgataaaataatcttcagcaattaattctctttaaaataaaagtacaaaaaagttatgatacgtatgttatggcagtatatatagcatatatatattatctttaa

SEQ ID NO: 216108 - DNA, 504 bp, Cannabis indica
caatatgatattgtgatcaaatacaatcaatattgatttgtgatcaaatattcatacttatcacatattgatttattattttgacaatcaatattcgtatatacttatcacatattgatttgtgatcaaatacaatcaacgagataacgtaaataatcaatttaaatgattttgtacaaatatagaaatattataatagagctaacatgacttcacaatatcatattatgtctgacctaaatttataacttctatgtcatgatattgtgctccttgtttctaagttttcttttttttttttttttttattttttttttttgaggaaacttgatttataacattaatgaagaaaagttaaggttacaaaatcagatgaaggagcaattgaaactattacaattccaaactaaatctctatccgttcctagtagcctttttagcaagagtgtgtgcaattacattgttttcttgtggaatgtaacaaatcttagcactaggaaaag

SEQ ID NO: 216109 - DNA, 1266 bp, Cannabis indica
attaaggccatgttgcatgaataagatggttttttttttacaaaaatttaaaataaatattatttaaattttgatacaatatcaattttaattattttttgggtaatatcattttagaccccgagttttgcaaaaattaccaattggaccctctattttgttaaatgacaaaatggattttatattttctaaaatggtacaaataggatcatgtattttgtcgaaatagagtttaataataatctgatataaaggtgttatgacaaaattgtttacattttctgtatcttcgtattaggaattgtcttcatgttggttatattaaaaaaattgtcaaaaattaaactcaggatcttatttttactattttagaaaatacaaaatccattttttcatttaacaaaacagtagtccaatcggcaaccttttcaaaacacaagatccaaaatagtatttacccttaacttttttaacaaataatttttctcaccacatatgctaatttaaagtaatatttaattataataacatctatattaaagtataatatattttagcacttttgtaaaaaaaaaaactatgccaaaaattttattaattttttctaatcaattctataaatttaaaaagatgcgtaataattaataaatatatttttatttaattaagttataatatttttattatttgttattaatttcaataatttatagaggttattagggtctatttttatttatttatttaaatttaagaatataatatttaaaaatgtcattatctacaacaaaagtaacaatggtgaggatcacaccggcccaaaataccatcatcaatatacattttaagtttcaaactaataaattgttctataacattttaatgatatatatataacaaattaaaatttatatattttattttattttcatatatataatataaattttaattttttgggcttctaaaattgtgaggcggcctagtctccagttgcgccaccttgtagccggccctgctgcctgtccagcaaggcaaacaagagtgaatttggcctttaacactgaaagaggatcaaatacaatactccttatgataaaatctagctatataaatatggggtaacccttattttaagatgtaatacccttctatgtaattgggacatagttgtcctcgtgaccaggtaatctcgtgatcagagagaacataaagaatattgttactatcatgatttaggcaaatatatcatgtaaacttgaagcc

SEQ ID NO: 216110 - DNA, 699 bp, Cannabis indica
tccatgatcggcatacttggctgcgtagttaccgatgattgctcttgattctgaaattaataacacgtactttaatgtggataaaccttaataaaaaataattaggaaatttctgtagtacacccagtacacgtttaaaggctgttttggtaaatttttagaaaattttgaatagtttaccgtactacaaaataagttttaaacagttacttatcaggcgtaataaaaaaaaattagtcgtaaaaatattattttggacattgtaaattatttgagatttttgaaaatttacaaattatctttaataactataatttttgtaatcatgattctttagattaaaaaactcacttgaataccaaaatagataaacactttaccaaaatactttttagaggaatgcactataaacttacccaaaattaaccactctttaaaataaaattacttttaccataacaaattgacaaaatcattaaatactaatttgaagtgtaaaaataaaaaagttcaaaattttattatgccacattttaaaaagaatctatagataaggcatttaataccttatgtttattggtgaggtgtaacttaatactgtaaagagtggttgtatgataattagagtaatcaattttttgttttttaaatattattcaaattgtaggtttcgtcttcagaacaaaaaaaaaaaaaaaa

SEQ ID NO: 216111 - DNA, 1279 bp, Cannabis indica
gagtgcaaaaacgttttttctattgatttgcatggcttatttggttcaacaggaacagagctcttagaggacaggcacatgatcagacccatgccataacgaaattagcgaaaagtttttctggatgatttcaaattatcaatgtcggctccatcaccacatgcccgctccagtcagtcctcagcaatcacaacatggtctcctcctgaacctggtcgcctcaagctaaatgtggacgccgcaattcccaaggggagagcaaaagttggttttggcagtgtcattaggagaagtgaaggccttgtagtcgcggcagtggctttcccctacacaggaggcaggaatgttgtcactcttgaagtaaagtccctcctcgcgctgtgttggtgtatagaagagcaattcccaatccacgcagtagaaacagattgtaaagctattactgacgcgctggatcatcccaaagatgatatctcgtattttggtgaccttataagtcaaatcaaggaagctttgtctcacatttgcagataagctggcacactgggcttcgggattagatgaagttgcaatctgaattggtgatgacccctgcaatcttagtgattttctttccctctggtgggctcctttaccccctaaaaaaaaaaaaaaaacagaactaaattagattagccttcaaattttatgaccccaaaagatattcacccgccaaatctaaaaccaagattcccgccaatttccgccaaaacctaataaacaaaatccccatttctttctagcaagtagcaataaacacgaagtaaactaaaacgtatcccagtctcttagatcgatcactctacacaaccatacttgtgagactttcaaatcacgatcatgaaagtacgttccatgaagctgagagaagctcacaaagctcccagcaatggacgcccttcgttttgctcggtgctgtgggaccagcaagccaaccacctggtcaccgcttcttcttccgacccaaccatctccatccacgacccccttcttccttcggccgctcccaagctccttcgccatcaccgcgacggagttactgctctcgctcttagccccaactccacctgcctcgcttccggctcggttgatcattccgtcaagctctacaagtttcctggttattactgttcctctgatataatctttttatgtttttttttttgataataatggagttttgagtccggattgttgaagttactttgttcgatttgtggcttcgcactcttccaattat

SEQ ID NO: 216112 - DNA, 661 bp, Cannabis indica
attcaaatattaaccgcaattatcttacgtgatatataattaaaccccacgatttctggggataattgttataaagatatctgtcaactatgtaattaattgccctcttatgtaattataaataggagcaagttacactgaaaaaaggacgaaaaattcataagagaaaagatcctagaacaatattagaaatctaataaaattgactcgtggactatgcagagttttaactgcaaaaccacgtaaaatatcctttgtgttcatacttttcttttctttactgtctttagtttttctatgcaagtttatcactgtttaggctcatatctagttaacaaaaatttgcattaacagtttggtactttcattaagagccttcgtgtaaaagctcagagaaaaccctccttacatatacaaaacaatctccttcatggctgacaacacggagaacgttagcacatcacattaagaaactcatcaccgtcctggaaaagagcccatgggctccagaaggtcttccaactcgcagtctaaatggaccacccactctaggaggacccaacctgagggtggccctagcactcagaccactcgctccaggaggactcaacctggggttggtcccagcacacaaactgcacgttcgaggaggactcaacat

SEQ ID NO: 216113 - DNA, 1016 bp, Cannabis indica
aaaaaattggtcttttttatcctaagattgatattagctgttttagtggaatttctagattgggataagtgttatgttgaataaccaagtagaataaaacaaaaaattaaggagataactgtataaaatcaatatcattctctctctcctcacttcctctaggtttggaaaccctaagaacaacctaccattttagacctaatttcacccaattaaaattgtagttcttcaatgatttagaagcaagttgttagcaaagatttaaggtaaatcctagttcttttacttctttgattttaagacttaaagtttgggtttgagttttgattcgaaaaattctgttctgttaggatttgagtagtttaagtttagttttgggaagttatttatggttgttgttgacggtagaaacttgtcaaccaacttttggccagaaatcaaagcctgaattaaaaatttagagataaagtgtaaattcaaactacaatgggtattcagaatagagagaaaaatggtttggtattgcttcaaagtatgtgattacaagattgatttttcaaccctctcacatcagagaatggggcatttataggctctaatgtcttgagatacacttgtggccctcaagggacaagctggccttatattaatgtgagttgtaggtacaggatgtggtcttgcgccttgtaccattgtcgggtgtcaagtggtcctgagttgcaggggtggtggttacagagtacctattgtcgagacgtcaggggctatagaaaaagtacctccactacttgtaccctcctgccaccaggtcacgctgaaggcgtggccgtaatctgtttcgtacccttccgtgcgcataccttatcctttgattcctttcttatccttcttctctccaaaaaattaggaaaagtttgccttcaatctcctccttatcgccaccttttctcccttcacctctactcgcacatcccctatctcacttgcacacactcactcgtagctctctctctctc

SEQ ID NO: 216114 - DNA, 827 bp, Cannabis indica
ctaatttcacccaattaaaattgtagttcttcaataatttagaagcaagttgttagcaaagacttaaggtaaatcctagttcttttacttctttgattttaagacttaaagtttgggtttgagttttgattccaaaaattctgttctgttaggatttgagtagtttaagtttagttttggagagttatttatggttgattatggctgttgttgacggtagaacttgtcaaccaacttttggccagaaatcaaagtctgaattaaaaatttagagataaagtgtaaatttaaactataatgggtattcagaatagagagaaaaatggtttggtattgcttcaaagtatgtgattacaagattaatttttcaaccctctcacatcagagaatggggcatttataggctctaatgtcttgagatacacttgtggccctcaagggacaagctggccttatattaatgcgagttgtaggtgcaggatgtggtcttgcgccttgtccattgtcgggtgtcaagtggtcctgagttgtaggggtggtggttacagagtacctattgtcgagacgtcagggggctatagaaaaagtacctccactacttgtaccctcctgccaccaggtcacgctgaaggcgtggccgtaatctgtttcgtacccttccgtgcgcataccttatcctttgattcctttcttatccttcttctctccaaaaattaggaaaagtttgccttcaatctcctccttatcgccaaccttttctcccttcacctctctcgcacatcccctatctcacttgcacacactcactcgtagctctctctctctct

SEQ ID NO: 216115 - DNA, 870 bp, Cannabis indica
aaagtacaactaagctttcatagttgttagttgttaacttggtcaaatagcagtactttatatttttaaaaagaaaatatgagatatttaagtttcaaaataataaagatgagaattgtctcataagctcaaggcaataatcaattgtcaaagagttttatcgtggaataacacaagattttatgtattaattttacttgcatgcgctcatgcatcatgtttacaataattctaaaatattatttattattcatgcataatcattatgttactttatttattttcaaaatatctattatgccgaattctcttattgctttactagcgagtgaaaaattgaatggtgaatatttccttaagtggaaatctaatctgaatgtgatgttagtttgtgaaaaccacgaaattttttcttactaagtagtgtctctgtagaaactcatgtattgcaagcaaatacatgaggcgaagacacatgtctattgtagacaagaggactcaagtatgtattatacctaagtcgcttactcattgcttcaaagtgttcactacaaactgtgtgatgaacaagctatagttcaatatgaatcaactgctaaacgagttgaatatgtttgaaaaccttaacaaggataagtccaagaaaggtgattcaaacaagttgaagcaaagtccaactttccttcttattcggataagaaaaggaaatgggactatgaggacaacagtggaaagctcaaggtgaaaggcaagaaggcacctaaagctaagaagaacaaagccaaccctaagtccaatgaaaagaaaggcgaaaggcaagtgttttcattgtggcgtgatggagcagtggaagagaaactgtaacaagta

SEQ ID NO: 216116 - DNA, 705 bp, Cannabis indica
ttacaattctgggtctaggtttaagtccggttacggttctaggtctaagtccaagttctggttacggttctagtcccgttcctgggttccggtctacttcccgtttcggttcaaatttttggtcacagggtacgaattcgggtccaagtttgggtttgggactggtcttggtccgggtcttagtttgggtactggtcttgttatagtttgggtcctgggtcttagaccgggtcctaagtttaagattgggtctgagttcggggttgtgtcccaatagtcaagtccttgttttcgggcccagggttgggtcccgtcactcgagttcggggtcgagttttgggtcttcatcccagttccggtgcctagtttctagtcgaagtcctcaatcaagatccggatgctttgtcaaaatttgtgtccatgttcgggtatggggcccaagtcccccatctaggtctagatcttaggtcctggtcttggtccaagttcaggttcgggtttgaatctcaagtttgggtccgagtctaggtcccagtacgggttcaggtattggtttgggtctgggtccagaatgagtccaagtccctatttgggtccaggtcggggtcccaaaccgggcccgaggcaaggtctaggtcacgaaccaagttttggtctgggttttggttcgagtttaggtcttgagtttgggtctggatctgggtc

SEQ ID NO: 216117 - DNA, 720 bp, Cannabis indica
gagggaaagtaaatatgatttatgttctctatattttagagaaaagcacattgatctactgtacagtgggtgggctgtggatacaaaataaattataagttgtaaatagttaaaaacctacgaaaggatattattattattagtgatgttgttttgtttgttaatgaaaaatatgttttctttacaaaaaaaaaaaagaaaaatttttttgttggtaaagtcgagtgatgatctgaataataaaaaagtaaaaggaaaaaacacgaaaaacacgttttgaaaaagctaaccacgaaaattgggcgtgtgttaccttcatcatggcacgtatatgaatttgctcatgctacagtacttttaattttatgcatatttctttattttccttttaaagaaaaagaaaatatattttcttttactatatctacttagggatgtttattggatcttatccaatatttttaggcctatacaaattcgatccaattacatattggatgttagattttatcattcaatcgatccaacatctattagatattaaattagatcggttctatccgttgaatgtatttcatatatatttattagtttaatttaaatttattcaattttaggcctaatattttttaatcggattgaatcaatgcaatattttaggtcccgtatgtattggatccaatccaaacaaaagagtaaaattttaatgttaatttttat

SEQ ID NO: 216118 - DNA, 1146 bp, Cannabis indica
tcttcattttcctctacattctcgttttcaatttcctctatattctcatcttcacttgaattgtcatccaaaggatcataagatgacatttgtataataacctcatccgtgaatgtaaaacaacttattgattgagaataacacatactacacaacatagccagccatacaaaataagtttgtcgtaatcaacaacatttcaaaaataagaaaatgttaaaaaaacaaacaaatattacatattaattgagaataacaagaagaaatgagatatagaaacaaattgtacaaatatttttgatattacataacctacgaatcaacccataaaccttcaccatcttcccgacaacatatgctatcgtcatcaagttgatcatcattttctggtaaagtgatcaggacatgttgttctttaagaggtagatcatcatcttcatcataccagtctcttgattgtgttgcaagcacgacagaccattggttgtttgcaggatcagtcacataaaaaacttgcgtggcttgtgacgctagaacaaatcggtcagttttgtgccctaatctatttagattagccaatgtaaagcctaaattatctttttttactgcactatcacttttggcccaatcacatagaaaacaggtacttgagtaacaatataatctaactcccaaatttttttaactactccatagaaagtcatgttgcactgaactggattacgatcttttgaactagacacttgcaaagcactagcgacaaggctaacaccactattttgtgtggttttgcttttatcacgctcttgagtggtgaactttctgccatttactgtatatgatgaaaacttcgtgacattaaaagaaggaccacgtgaaaaccatcgaacaatgtcggtcacattgttaggcgtacttctcaattcacatacaacctaactagacgcaaaaactaatcaaaatacacattacacgaagtatataaacaacaaagtgaataacacatctaataccttatttttaaacctaaaactactaaaagtacgataatgttcatcttgcaaccatttttgattccttgacttgaaggaattttatcttaatccaattgaaatgtcccttcaagcacatggtatatcattagct

SEQ ID NO: 216119 - DNA, 586 bp, Cannabis indica
tgccccaagcgcaaagatactccataatctgttttagctgtcattttatcatgcaataatattagtgatgtaatatcgctttccgatgtgggacagattagagtaccgccaatatctattgatttaatcccaggtcccaaccttatcaactactacgcacgagaataaaaggcttaattattttaataccacaccagatttcaaacaaaattattgctgacaatagtatctgtagtacgcattaaaagctaatgaaatgaaataaacatgaatcacgacatacatttcttttaccacattttaaaacaaaacaaaaaatatatattataatatatatgacctaattccactattagaaataattgatcttccattgaagggtggatttggtgagacaagacactaatggagtgttaacatgtttatgaaataatataaagcaataaagttaagaattgagataatatatatcatggtgacatcaatataattaatggttccaataatcactctatcactcatatgccatcggtatttcttgtttttttttaaaaaaaaaaaactttttttaatttttttagttatc

SEQ ID NO: 216120 - DNA, 953 bp, Cannabis indica
ttgtcaatttttgttcttcgggatctgttccaacacgatctacacagtttcattttgtatatgatctttcgacattgagtgaggaatgaaagcaaaactcaattgaccaaatatgttaacattttgaaattagagaccactactttctttctaagtctagcccccaaactcagaactttatgaaccaaacaattattaatacatagatagaattgttgacaatccattaggtaaaaggtgtttgcatttacttgcagacattattcaatttcgatcttcaaggaaaaccaaaactcaactattttcaagctaaatatttctaatcaaaatgtgaaataatcaactaaattctatgcaccagaaataaagacttgtcctaagaaatgaagacaaataatttggctcggcataaaactcttccgaattaggtgtttcagagagatgaaagagaaggtggtgagatagctcattatccagcctaagctaatgttagtttgtcaaaagattaaacaccattatatcatattgcttggagatatacattcatgattttgaaacagatgtactagagtttacgaagcatcaccttcttgtggactaaaaataaaatagggtattagatggtaagcagcttgaacaagttttggcagatcccttgcctgcaattgaagttcacatcaaaatgatagaaaatgaagtaacaccagtcatttacaaactttgaaaatcattgtattgtgatgcttaacaatagaaagctcacttacaacatttgtgtggacaattccaggcgatacacaaagtacactaacacccgcttcagcaggcagacgtttaaagagaacgctactaaacataacctgcaaaaagataaaatctataaatgtgcgatagcagatttatcactcccaatacttgtaaagctttgatgtacataatgctctagtagtgac

SEQ ID NO: 216121 - DNA, 589 bp, Cannabis indica
ttatttttgctttcgaatattaaatgatgtatttatttgcatctcgcaaattataagtgcactttaatattaaaaaataacttaaataatttaaaaattactcttaatattttaatatttatttttcacaatatttgtatattttcagtacttatttagttttacttttatttttttaataaaatttcatatatttatcattatattaattaaaataaaatttattttattttatgagtacacttttcatgaatgtgaaaagcaagaattcttttaaaaaatataatatattttatctgagataaaaattattaaaatagagtatcttaactttatcaatttttaaggtacatataaaactccctatattaaataggaagaaaaccatatcaatttttaaggtgcatataaaactccctatattaaataggaagaaaacgaattatatctcgacgaaattcaatatatattaatggttggattgtaatttagaggtttgaatggattttcaatcctcccacctctcctttctttctttcaatctctcttaacaaacaaagggatttatcatctcctcacacctctttcc

SEQ ID NO: 216122 - DNA, 624 bp, Cannabis indica
catttataactctgatttagaatagtgagatttaaaaatatactaagaaagaacaaagatatgcattttgtaatatcctgcactaatcagagacaaacaaatatataacaccttaatccttatttattaatcacaatttttattatattccattccatcatttatcattgattttaaatattgttaaaactaaaaaattcgttataattggcaatatatataaataattatatatttattaaaagaattattaaatagaaaatataaattaattaatattgtatttataaaaatacccctttaaggcgtggataacatttatatcttttatgagattttaattatcaaaatacttcttacactatcacttacacaatcagacgataattgcagggtggttgttgcgtagttgtgcagtagttgcatcagacgaaggtttcaatcagacaatagttgcagggtggttgaccgaatgtttcaatcagaggaatgtttctaggtggttgctgggtggtttgccgaatgttgcatcagacgaaggtttcaatcagacgaaataactgttagcaaaatgtttatgcaactgtaaaactattatgaaacattaaaaataaaacaatattt

SEQ ID NO: 216123 - DNA, 511 bp, Cannabis indica
gtgccgggtcacgagctgggtcttaggttcaagaccgtgtctggggtcgggtcttgggtcccagtcctagttctgttgcccaggtccttatcctgattctgggtccaggtcccgattttggcctgggtttgggtcccgctctaggttcggttttgggtcttagtcccggttcgggttcgggtcttagtcacggttcgggtttgggtctcggtctagatttttattttggtttgtgtacgggtacgggtctggttcctgctccttgtcctagtcctagtttgattctaggtccagttgcgattctgagttcgagtttgggttcgagttcgggtcagggttcgagtattggtcttagttttggttagggtctggatctcggtgtaggtttggatcgtgctctaggtgtgggatagggtcctgggttaggggctaggttcgagtctgagtcccaaatttcgatctctgtctgagtccaagtattattttgagtctaagtcttgggttccgatcc

SEQ ID NO: 216124 - DNA, 608 bp, Cannabis indica
gagagagagagagagggggacaaagaacacaaaacagagagagaaatgatgtggatctaagatttattggacaaaacagaaaagagagaaaggagaagaaatcaagagagagagaaagagttgtgagagggttttttgaggaaaaagaaaaaggagaaaattgtttttttttctttttctgatttttaaaatttttaaatgttttaattaattttaataaattattaatattagttggaccaatgaaattttgtcatatttacacttgtgtatacagtgacaatctactttgaaacttaatagatcaaagtagacagaatgagtatagagcaaaacgattgtgaagattgagaagtgtagccctaattattttagtataggggttgatcgtaccaaactccaaagtttatgaaatttggcacaaaaaaaaaaggctaattaggatccccgaagtttgacatggaccaattcatgccttctgaatttttttggccgttaaaaattccccctgaactattgagattgttaaattcaaggacttttgtctaattttagtaaatattaaagtttgagggatatgatttggtagatattaaaatttagggagc

SEQ ID NO: 216125 - DNA, 628 bp, Cannabis indica
ttattattaatataatatataaaggtataatatttaatgatgtgaacataataatagagaaactgacatagaaaatatattattattattattaataataataataataataataataataataataataaaaaaagtgaagtttaagtaatatatttttcttagagagaaatgaagtatattattatattttgaagaatatagagtagagtaagctatccttttttttttttttttgctattaattagtacttagtattcataatgtatatattttgatgcaatcaaagccactcacgtaatgcttaataagattcctttggtatgagaaatcaataatactgaatttcaattacttcaattcttagctacccttggtccaacataaaatctcattttcccaaacctaatatatagcaaaaaaggtgttgaagtccttggaacaaagtagaaattttaatcacatatattatatatatgatccaaagactaattaaaaaattacaaagatattaataatacactgtgaggaaccatgtataggcaaaaaaaatattagttgttggattcttcactcttctcttctaactaccttcctctttttggcttaacgttttcaaaccaaaaa

SEQ ID NO: 216126 - DNA, 645 bp, Cannabis indica
ttgactatttccaatgcaatatgtaaaattggtgctcgctatttaaaattatgctccaatacacaagatgtaaaataagtaaaaaataatttattattattgatagttatttaatattttagttgttttgtcagttgcgatttgaattattgcgtgagtgataatgtgtcatgcgaattgatttgggttgagatttaggtttatattccgtaaaaattaaaaaaaataaattgaaaagtataaatgaaaatagaccaaaatgattatttttttatttttatattaattgtttaaataatgataatatggtaaatgaagaaggtaaaatattgtaaaaattaataattagtatcaccatatataataaataaataaaatagtatttattgttggccaaaattcaacacactttttagaacgttattggaattaattttttttttttttgtaatgtgctaaaatataataataggctacttttttaacacttcattggccgggatgctagtgttaaattgcatttatcacaaccaagatcatattttatttatagcatttaattatatatcaaaagcataatattgagcattgcttgattgtgacttaccttgacaactcaaaaaaaaaaaaaaaaaaaaactaagt

SEQ ID NO: 216127 - DNA, 786 bp, Cannabis indica
ctcagtcatgtctaaatctttaggtttcattccattaggcagtttccaatcaaaatggtatagtaacaaagcaagggaaagctcaacatggtgataccaaatgacatgcctggacatattctccttccagcaccaaatggaataaactcgaaattgctacccttgaaatcaatagagctaccaacaaatctttctggtataaaactctcaggttcaatccaatatttagaatctcttccgattgcccaaatatttatcatcattctagttttcttaggtatctcataaccattgatcttgcacttttctctactttctcttggaagtaataaaggagctggagggtgtaaccttagagtttctttaacaagtgattttaagtatttcatctcattgattgaggattcatctgttgacccattctgccaaagacttctctaacctcatcttgagcctttttcatcactctttgatttctcatcatttctaccatagcccaatctacagttaaagctgatgtctcacttccagctataaaaataatcctgacatgataaatgaattcaccattatttacaaacttatatgaacttatatatatatatatatataaatattacgagtaaatactatttttgactttatattttgtaaaaattattgattagactatctatttcgttaaatgaaaaattgaactctgtatttttcaaaatagtacaaattagtaccctgaactgatgttttttcaaaataaaagttcataataactcaatttagagttgt

SEQ ID NO: 216128 - DNA, 757 bp, Cannabis indica
cagtagcattaaaatacattcaagaacttcataccataaaattataaattataagtaatgttagatacatacttaaattatatacacttattatatataatcatttttagttgtgtggttaaaatttattagagtaatatatgtaaaaaaaatgcgtatgttgagtgtgtttgaatcattattcgtaattttttcaatgagattaagtaatttgagttatctctatgaatagtattatataagttgattgatttttcaacatcctcactaattttataataaaatttagatttttgaccctgaactttaacatgtaccaaatcatgtcctctgaactatagggattgttggatttaaggacttttttctaattttagtaaaaaagtctaacatggatgaaaattaagcgagcataatttaatacatgtcaaagttcgataggcatgatttggtagatatcaaagtctggggagtatgatttagtacataaacaatcactaaaatagtaaaattgaatgaaattagacaaaagtccttaaatccaacaatctcaatagttcatggggcatttttaacgaccttaaaagttcaaggggcaatatttggtacatgtcaaagttcaggaggcaaaaatcctaattagcctaaaatttatggtaaattgcagtgtaaatacctaatgttttagattttatacacttatatagttaatgtttatttttggaggtaaaaatacctaatgttgcaattctcttac

SEQ ID NO: 216129 - DNA, 908 bp, Cannabis indica
tgcgaagtgataatgccaagaaatatgcatctactcaatttcaatcatatatgacctctaatggcatgtctcatgaagcttcttgcgttgatactgcatcccaaaatggtgtagtagactgtaaaaacagacaccttgaaattgcacgtgcactcttgttgcaaatgcaagttcctaaatcgttttgggctgatgccgatttcacaacatgttttcttatcaatcgcatgacatcctctgttcttagtaatgtgatcctatttaaaattctttttcctagtaagtcattgtttccaattgctcatctaatatttggtggtgtttgttttgctccacatgtcaccaaattaaatcctaagtctttaaagtgtgttttttatggttattctcgtcttcagaaaggatatggatgttattatctcgatcttaacaaatatcttatttccatcgattttacttttgtggaaaatacactttattttttgtcttcacctactcttactcgtcaaagggaggatgatgatttgttggtatattatatcacatctgcacctgacacatgttttaacaagtctcttgttcctccacttgccttggtcacaactcttaatatgcataccgctcctccacctaggggtgaaaattggtcggttatggtcggtttttacaattttataaccgaccggtcggttacactttttattttacaaaaaccgtaaccgaccgtttagaaattataacagtataaaaccgaccgtatggtttttagcaatttttagtggcttttcagtttggcggtttttggcggttttggcagttttttggtttaagtatttttttatttcaaaattcgaaatcgaccgccatatcaaaaaaaccgaaacagaaatcgaccgccaaattcggtg

SEQ ID NO: 216130 - DNA, 934 bp, Cannabis indica
tttattaattattaattaattaagtttctttcgtagttagtggtaaattaactttttagtaaataatttacgtattcaatttggtaacttattataatttatggacatgagttaattaattaaattaaccagcagctagcccccactcttgattgtttttatttatttaattatttattttggtacttttctttttattattcaacattctcttgtagctagtcatatgattaataatatatcactatttaacaataatcacaacaagtatgtatatatatacataaaaatatgaaaagaattaatgatatgtaactaatgtacgttgtatatatatacattttttatttttggcaatagaaaattcaaataaggtagctatatgggaatataatatatgtatatatatatcgtttgttttattcaatataaataaaacaatagcatacacatatagacacattttcttttggtgctactatatcaataatagaccaacaaataaatttggatgcgagtataatagcaatttaagatccacgggtaaatattaaaatttaaaagtgtagtactgaaaatgaggtttataagaattagaactaattatgcaagatagagtgagtgtatatggtaaatgtatcgatcttgatctcaaaaccaagtgacattttagtcgattaataatgcattttatatatgatattatttttttttcacacattaatattaatagtgtaaaataatctaacatattatatataaaattaaaaataatcgtacattttatatatggtattattattatgtttcttatcattaatttgttttattattttatattaataaaattaagaattagtaacatttaatgcatgcatgttatttagagttttattaaagttactattacataaaaaaataatttaaataataa

SEQ ID NO: 216131 - DNA, 1190 bp, Cannabis indica
atttcggctagcaataagaagctgacacgtgtattagacctggaatatgaaccagcctaaattgtgcattattaaatgcacatcaattaactcgtctcgggaaacaattatagaaatatttggacttgtcgctatataggcaatagcgagacacaagtaaaaactactaactgatgagactagcgagaccaacaagtccatctcgggataaactgaatgtacaatgaagacagatcataacaagtgaacaaagagcttacaactcattgatcctcatactcgtaaataagagcttggaactcattaacctacatactcgtgagtatgcttaagggatgaaaacaacttcaacatttactcacctcacttttgatgtatgaaaataaccacctcgctaatacctttctcaacgactaaggagaactgcgagatgcattgtagttcaacacttaacatttatcttactaagatgaaggatgatattcaaattacaacaaccatgctacacagtcagcataactgtctacaaatagagacaaagagtggttaagcagtttattttattattatctcatgtgacataaagatgaaatatggggaatgtctacatttcatgaacgattatgaataagtagatttcaaaggaaataattgtcgccctatgcatctagaaatagggacagaactaagagtaaaaggaactaccaatttagggagaaaaaagagatactgttgctaaattgtatcattgtattttgtattcaaacatatttatccttaataagatggactcatagactatgaagaattaacttcaaaaccacgtaaaaactttcatgttatttattactttctagataattaattgctatataattaattttgcagtctacttattactacaaaaaaaagtctaatattttagctaacaaaaatttacattaacaacttaaatagtcatattttatatataaagatatatatatataaatatatatacattatataatattttagagacaattcaatacaataacttgattagtatatatgttataacgttaaaagtttgataagatattttttttcttctttttcaattgttgaaattttatttagactaatcttttaatttttattttaatttttaatagtgatgatagtgtaaactgcctaaaccgcaccgcact

SEQ ID NO: 216132 - DNA, 806 bp, Cannabis indica
atatatatatatatataagagaaccatataccctgtttttgtattaattcctattcgaaacactcacaccaatacttttccttttgattcgtttttcttcatgtaattttttttgcttattattagtttgcgggcattctattgagaaccctaattttgtgctaattcgagtgtttgagaggttgtgtttcatatgcttattgatatgtgttattaatgaatttatctaattaattacttttatcattattatcttatatttttcagtgattttaataagaaaattaatttttgctgtttcaataatgtgttcttacttatatatcttatacttagctttggaatataatgtaaagtgacaaactcaaaatttatccaaacatgtagaattttagcattgttgccacatcccaatatagaccatccttacttcacagttcacacacatatctttcaatttttcatgactcataatttttgttggcagagttgttgtttttaagtgtaggtgctattttcttttttttggtagataataattgcttgactcataatactgagtatgttgctgttgttaattactgaaccaggtcctatcaaattcaagttcacttgttagtattatgagccattgattagaattcaagctcacttgatgatagtatttaagtttagatttgtgttttagtgtttgttaagcttgttgaataagtagaggaacgttttcttaatttttgaaatcaaaagaaatcaaacactttgttacttgttcattgctttgatgttctaatctatttttactgtat

SEQ ID NO: 216133 - DNA, 1090 bp, Cannabis indica
atattttagaataaactatgatttgaatttaattatttaatctcacattacaatttttaacatatagatactgcttgtggatacaaaatagaaaaccgtgaacatttgaaacttttttcagattagaactgtctacttgaaattaccttactaaaaaaaaaaaaaaaaaaagaaatgtgtacttgaattggtgttttggaggtatagccttaactcgagtaagaattgccgtggtttatttattggctcatagtactatctcccagctggatattcataatatgaccaacaaaattaatttgcaaaaatgaaataaaattcaaaatttcaaatttaaaactatttaacaaatacaaacaaattggggcaccaaagataacgtaaatgtatacattataggatatatgtatataaataaataggaatatacatatatataacccaacaattggccaacaatcaaattaatttttcttcaacctatatactatatagatatatatataataacagtaattatttatttttgtccttctatcttgctctgcaaaagaaaaacatagagttttacccattttctatccaggtcctcgtgacttttgtccttggtatatattaaaatatatatatgccccataattgacagagatttttttcatatgcatattttatttttagcatatacttttataatgaattttcattccagtatcatttcttatttatttttattattattattatttttaaagaaattggtcttattaaaacttccaaagtaaatccactaggaaaaatcttaggaataagaatagtgtcaaaaaatattgatataaaatatgtacccgtttaaatcaggtcagaaatacaatgtagtgactatctaaaaataaagcaagcttaattagctaatgcatgagtcacactagtaattctaagacaaatatatatatatatgaacaaagaaatgatatcaaactattacaacaattaataatatctctaatgaagcacccaagataagagtgatcaattatcattggatctgcaactggtttggttgccttagctatagctgtcttgcaagcat

SEQ ID NO: 216134 - DNA, 502 bp, Cannabis indica
aaaattctcttaaattttttttttttgtaaatttaaggcatcaattaaatatcatcggtaaataccaactaaatgactattttgtatatacatgaaattaaaacttcaaagtcaatacaataataatttagttggtaggtatttaatagtttgtaaatataattaaatataagtgagtttaaatgttaaaaatcaaaacataaaaaaattttggcgcaaataatctaagtaataattaatgaagtcttacttgtttcattgagcttcaacaaaagttgttctctggttgggagagcatacattccagcagcaactgctgtcctaatagcccatgaatggtatggtgcacacacctgagcataagctgttgaagcagcaccctttaaataataatcactacacaaatttaagtgttagaatatatttcattaataataaaactattagtcacattattggataagtatggaagttttgatacgtactcattggacaaaaattg

SEQ ID NO: 216135 - DNA, 514 bp, Cannabis indica
tttgagtacattttgggtctagtcacgtttttagtctgtacatatatgtttcttttgatggtttttagtgttgtataggttgtttaaaagagtcggttatttattttgcttgtgaacctttgggagaaaattcaggggtgaataaatcaatacaacaaggataatgatattgtattccataaatttggtatgtacacaagatctacatccatactgcaatacaataaatgttttctttacaatcacaataacactttctgccatatttttctcttttagaatagagctcaacaagctaataataataataataataataataataataataataataataataataatgacattagcttgtgaacctttgggagaaagtgaggggtgaataaatgttttctttacaatcataacaatttcacacccaccaccaaaatctaacatcccgacagcatatacattttttttttttttgttaaactacccgaccagcatatacttttttttttttttg

SEQ ID NO: 216136 - DNA, 538 bp, Cannabis indica
aggagaagatgatggggatactgcatatgatttatttgatgattcagatcaaagtggggaagatcgctggtgcattgtagggaaattcctaaccgagagggctattgattttgatgtaatgagacatatgatggcatcgctattccaacccggacgtggtatgtacgttaaagagctcgaaccaaaccggtatttgtttcaattctatcatgagattgatctggaaagggttattgaaggaagtccttggacattcaaccgtacgcaatttgtttttgaaaggcttcaacggggacaagatcctcgttctgttgtcatctctaaattggatatgtgggttcaagtgcatggattgcaacctggcttcaaaactgaaagaactcttcgtgagttagggaattatattggaacctttgtcaaaacagacccaaagaacttccaaggcatatggcgagattatttgcgggttcgtgttacactcgacatcaacactccactgaagagaaggaagaagttacgtcgtactgctgctgaggaa

SEQ ID NO: 216137 - DNA, 937 bp, Cannabis indica
atctgattttattagagtgattgcctagttaattttttattatggtagaattaattgggagtaaaagtctaacgtatggccatttatccataatagtgcagtaaggcatgaccaataattgaccatgtcctgttacttttgtcatcaatggagaaagaactctatacaatatttagttcgtcgagctagaacatcagtcaaacttaatctcattcttttttacttgtatgcataagttgatggagagccttagtctatgtaacattagtttcttttcttgatgatggaattattacatattacccaccaccaaaacaagtttgttatatttattgattttttttatttactctctcattaaattagaaattattcttatactatgtacatattaaaatcataacaataatgtgcttaagtaataaattttattctaaaatagatcacataattttaatttatttatataataatccaatacatattttatatatagaatattggtgacccaataaacaaatttctaacataagtagccatatatataaatagtattcagtaaattaaaactactaagttgatgacatatgggagcaacaaaagagaaaaattaaagttgagaggggtcgatagagcttctccaaagcgagaaattaaggttttgatcatttacatatattaccaaaataacatatatatatatatcgattttgtaaaattggtcaaaatgaccattttaccccctaaaacttaaaattccacataaatatctccaaaaggtaatttaatcattttacatcacataaaagtatcccatataatcatatatacatttcatgttatttctctaagcacataactcataaattttggacctcgaatccagttcgagtcaaataactcgattatgattatactgtgtttacttattcaaaag

SEQ ID NO: 216138 - DNA, 704 bp, Cannabis indica
ttataacaatatgacacatcaactatatcagtattttcttcagatggaaaatttgaatgagtaataaaatttaaaaaacatgatttagtaattgtaatagttcgggaagaaaaatcctaaataacgtcttttattaatttcacttatacaaccaatattgatctaagagttgtaaaaactttgttatcatgaggaagcatgtatgtttaattcattagttaataacttttttttttaattatttacttataacatttaatctcatttatttataattttattagtctattcattacttattggtttataataatgatagtaattattaaataactcattttacatatttataaattaataaaaattttatccacttactaaaaatattaaaatatatattgattataattaaaaaaatatattttttcttatggtaattattataaataacttcttaataattatactaacttattatgaataaaaatatacttttctctcagcaaaaaaattagacacatattttctatcactatttagtaataataatatttacatgaaaatgatatattttttcttttttaaaaaaaaaatttgcacatgcattttatttttgtgagtaaaatattttaaaatttgtgattaataattaaattaaaaattgattaattaatgcatgtaatgtgtggtgtagaaaaataaga

SEQ ID NO: 216139 - DNA, 991 bp, Cannabis indica
ataaagtagatgagaagaaagaagaagaagatgaagagagaaagagaaagggtgagaatttttgagttgtttattccaatggggtgaacccctatttatacaaatacaagagtgagatattaagaaactaagaaaaggggaaactaaggaaaagaggaatgttgattacaattaatggtaataaataaaagatttggacatccacataattattaatatttataacaaaaccctagttttaaaaaaaataaagaaaatttcaaaaatttctatgtgtaccattaaggaagatatatattttatatgtttaataaactcttttatttcattgatataatgacataaataattaaatatcttctaattaattaatattttataaatataataaaaaattaaaagaatgaaataattaagaaaataatagaaagaagtgtttggaaaaattttagagtgtcacgtcactgtcttatacttttactatacctttctaattgattttgttttaattaataaaataaataaaaaaattcctaaaaaattttacaaataaaaagtcaaattaaaatatccccattacctttcataattatatgcacaaaataaaattattttaatttcctttctaacaaatttagtaatcaaacataaaaatatattatatttctaactattttatattttaaatcaattcatttctatcctttattatttcctaaatttagttaaaagattaaactagctagctataagatttaactagctagttagttaataataataataatgaaaatttgcggtgaaagtctttaaaaaatttattttattacagattagtccttaagttcgaaaaatagcaatagtagctcttaatgtcacactcttcgtaagttcgttagtcctaaatttaactattccgttaacttatttaaaaataccacgtattgaagttttattggtccaaataacaattttaattaaaaataattat

SEQ ID NO: 216140 - DNA, 585 bp, Cannabis indica
atataagaataatattttcataattatcaaaacatagacaaaccctttatggatcggtctcaccccatgataaacatttaatgtatgatatggtacatatttgcaagcttccacaacagatttttatagagagtatatatagtcgtataatactattaatttatgtacatatatgtatatttatattaagttttaatagtgattattattgactgtagcgagtacataaacagtgatatatatacaatatgatgattatatgacgtgaattatgtctctcatagtatagcagtagcagagatgataagggaacgcatggaatttgtctaggaaaaaggagacattacaaaggaaattaggaagaagcagcgatctacacatctaatttatataatatatatctgtgtgtgtgcatatatatatatatatatatatatatgtatatgtatgaaaccacaaaggcccctcaagaattgaagcttctgctttggcggtggttgcaacaacaaacatgttttccccatacccttttcttagattcttatccaatatgcatatatacaattagaatattaattattatgc

SEQ ID NO: 216141 - DNA, 972 bp, Cannabis indica
agagagatgctctgatcttatggacacttttaagaatgtgaaaaataaattactgaagctctcattttataaggaatgaggtcctatttaaataataataaaataatacaataaatatgaaaaaattactttggtttgatcttggtcattgatgatgatcttggtcattgagtgagagttatgagtaagtatcagtttaatccacgataggaacattgaaagacaatcaaataaatcttaagattgaaagaaaacctatatattagtctataagagtgatttttcgaaatgtttacactacactgactcagatttctagatttgcattaatgctagaaagtctaaatcttggatggtgattactctaggggtagaatagtaatttttagagaagtgtaaaaacttatttggagtctctaactttatcagcgagactgactattaaagtggcgcaaaaggctactagataattatatagcctaagaaaattttatacgccctttggcattatttcaatcatggattaactactagtgttacttctgataatatagatagttgccaaactaaaaagaatctaataccctaaaaggagtaaacatataaaaatgaatttcacaatatcaaagattttgtgactaaggagatgtaatggtcgagaaggttgatactaaatataacctatcagatcctattacgaagataatactacatattatgttgatttggacatcaacataatgagattaattaaaatgcacatttagttttatattagtgcaagtaggagtttgttgggattttatgccctataaataaaatctaattaaatataattagatttactaattaataaaagatcaaaaattattttaatgttgaatagttcacatgattataagttagatgtataaattatattaaatcccaaagatatagttatttatgattatagtgttgcatacacaatgg

SEQ ID NO: 216142 - DNA, 631 bp, Cannabis indica
tataagtgattgattaatattttgaccaattagttatatttttctttttagttctccttatatatttatttaaatttatataatgagttatttttaataattaatttttaattaataatttaacagtatttttttttgtaataattgtagataatttatttgatgattgttttattttcaattattaattttgctatattcttagtttattcctttaattagaaagtcagccaaagcctatcctttgattgatactctcgggtggtaagttacgtcaaactgtcctaactcaatcgatcactttatcaatcttcctaaagcattaagttttgattaaattttccttaaaggctgatttgttaagactgtaattggatgtgcctggaaatatggcctaatttgtgagattcatgaattaggcataatgcaagtttgttcagaggtgggtatcttgactctacccccagtaactttttactgacatagtaaacaagttacttgtgcttaccctcttttcgcactaaagtcgcgctaatggcatgcttcgagacaactagataaaggtataaactttctctagttattggtttggccaaaactaggggtgctgacaaatgcttctttattccct

SEQ ID NO: 216143 - DNA, 624 bp, Cannabis indica
acatgagtactttgagattaatttataaaataaagggaattaaattaatagcctcagaaatagaagtgtggtatatatggttttcttttagtaagttcccaaaacaagctcttgggattacatctacagaacaaatatacagatattaatagatatgatttttgttttttgttaaagttattaatggatatgaatatcagcaactcctccctcttttttcaatacaccctccgtccactgacctcacacaatcttactgtagattcactcatcacattcatcataatatcctcctcaactgcttatcataagtaattcgaacaaatgcttatcctccccaatctaatattatggtgtctgtaaaattatgtttttgacacaatagaataattagatttgagtgtaattaaaggtaattacataattgtattttacaattttcaattctcatactcatataattattgagtataattataatgtgtaattattaaaaacttttaattttaaatattacgtaattgctaccctactcttaataatgcgggtcatttgctcctaataaaaaaaaaaaaaaagaaaaaaaaataaataaaattagggccacttataccccaatcataa

SEQ ID NO: 216144 - DNA, 818 bp, Cannabis indica
cgagggaataaaatggattgacctccaattgggactgggagagtgaaatggaggagtcggtgaaaggaagctttggttcgtcggggttcgtcgagatgttggtttcgacgatctgccattgggagttagaatggaagggaagagttaagtgtcgcacagagtaaatgagtagggttttgagggtttagttttacttatatatttttgaaagttaattggagaataaaacctcatattctgttaaaccaagaaatgctgttagataggcacttttaatatgtaaagatatttaattaaatagaaaattaatatttaagttgaacacttaaatatttgatatttttcttaagagatttaattaaataggataattatatttatgctaaaaattaatttatttaattttagaccaacataaattagaataattttttcagttttattttattttattttaaggtgatttcaaaaatgtatctttatgcatgggatttcgaattcaactatatatatttatagaaaattaaatttgtgttgaaaattattttttaattaattttgtaccaacttaaattaataattttcataatatttattgaaaaattaatactaaggatgaaaaatatttttatttttatttttcaaatcttcatagggtataatttataaatatgaaattaaaatttatatttagagttatctaaattattaattttaattaaatacatatatgttaaaataaatagattaaaataagtatcaaatgaaaatgacaaaataaagcaaaaaaattaaaaaaacctgctttacattttgcg

SEQ ID NO: 216145 - DNA, 521 bp, Cannabis indica
ccgtacgtactacgttacatggaactcggtcccccttttgtacactactaccctcttgcattgttctttagttaaggtatagtaaggaattacatatgatcatgtgtcatgtattgcagctaatagtttaattattgttcaaatagggaggtgcttatatttggtgggaaagaaatttaattaagcaaatgtcaatatgtttctacttttgtggctctgtaatgtgtatgtttatttcttcattaagcattatttgtgctaataaattctgttttgagtgtatatgcttgctttgtgtgtggtatatattataaattataattggaagaatttatatggtttctaaaaaggatgttaaaggaaagaaagtaaatgattgaatattgtttttgtttgttgtggtttcataatataaatatataatatatatgtatattcatatttggtcctcagatcaggactctgttcctatcattaatatacaatacaagtaaatatatatattgaacatttgtttaatc

SEQ ID NO: 216146 - DNA, 756 bp, Cannabis indica
gaaactcaagtacctctcatgatcacctttcattcttcgtaagttaaatcttctttatctatatttgtttattgttttaataaattagtatcttttttgacattttaatttatatatatatatatatatatatatgcatgatcgtgttttaaggtattttacttttctttagtttttaacgttttttgtttattgttttaatggtttttttttacctatgtttgttttgttgttaggtttaagttaattaaagataaatatatatatatatatttatataaaatatacctaatcgatttgatattgccatgccgtaattggtatagggccggccaaagtattttgtgaaaaagtttaaaattgagttttttaggaaaaaacattatttataaattttttttaaaaaatactgtgttttacttttttaatggtttatactgttatttttagttattttattttgtgtttcaatgttgccttataaaaatagagtacttttgtaaaatttaacccaaattccaatatttttataagtttctctcaaaaaaaatttatatctaaacttttagttataaattttctatttaggcatgtatataaaaaagaaaaaaaagataagtgttttctttacaaaaaaacaaaaaagtttaggtagatgatgcaatggcacaagcaacccaatacttatgaaaatatatatatattttttttcttttttaaatttttgtttattattatattactgttaattggata

SEQ ID NO: 216147 - DNA, 722 bp, Cannabis indica
cttactgatcggagaggaggataaacaattacttcactcaaaggtacggcctttcatctatctttacagatatatattctttgatcagtgttaatgcaattaaatcaaactgtgttttgttcagaaaaatagtttacaaggaagaagataagttagtggttttgaaatatgctaatatactgatttgaatccaaattgagttctcttgttgaaacatagaaagaaaagattgaaactttatatggttgtttaatttttctaagccattctctctattctacattggcattctagctctttttacagggattgatttttttccccttctttctaaggattcctttaaacgttaatagtagaaatatgttgtaatatagaactggactttgttctggtctagatggttccgagattttgttcttaaacaacttccatttgaagcgaaagaaacttccatatttgtttgattttggttcgatgggattgcatacacctccagaatagaaatttctgcttcttttatgcgaattacatattcacacggtatttattacttgtttgatgaagtttttggtgacattgagaaacttccctccaaataaaatctaatttatggtgtttctaagcaatttgaattggaattattctcatagtgacaaatagtacctttgcattaaatgtgaagcaattctgtgtggggctaaaatggtttaaaagttttt

SEQ ID NO: 216148 - DNA, 506 bp, Cannabis indica
atttatatcaacaagtgcatcccataacttaagagctccaaagttaagcgtgtttggatgacctcctgggaagttttctaagaaagtacgagtgaggacgaagcacactggaaacactcgtgttggttccaggaagcagtcaaagtaacgtacccatataagagtcataagtctgtgggaaagtcgaatgaaaacttgaagcgagagcattacaaagcataagttttattaggaaattactacattttatatctgttttgatttgtgattagaattgaaacatgttcattcatatatataccaacacaaatgtccaatccaagtatgcctcaagagacaattgatttttctcatttctctcatcttattagtcagtgatcaaactggtattgttctgaccagctagccacagcagttgctttcatgtctctcgagtaatgtatcgtatctcgtgccaacttcaatgtcttctgcagactgtcatctcgccgtagtgagaccatgat

SEQ ID NO: 216149 - DNA, 701 bp, Cannabis indica
ttagaaggagcattcatagatcttcttcctgtgtgttgggattcatgtttcaagttggtcgaggaagtccaagaatttgattcaaaggtatatttttatagctgcgtgtcggctctgcagtgatactattatatttttgttgaatactggatcttcctgccaaaaccctccaaggtttgggatatagatttggattatgcaaaagcaagatatctgcaatttgcaaagaggagatcgatctcacgatatctatttttgtttcattatttacaggtacaagttttgaatttgatctccattctgacaggtcaagtcaaggaaattattccatttgcaaacaaattggtgctatttttccaaaaggtacttaattaaactttcccagcagtcctacttttctaactgctgattgtgtatatttttttttttttggaataaactgctgattgtgtattattttgttttatgccatttgataaggaaactgaatatttactaaacctacaagttataatttagacatgctattgtttttaggaaatattgtggagagtaaaaattgcagatctcacttttcttttccctttccacacccttttctctcaccaccaaacgtcccgtttactcttatcttgctttacccttgctttcctctttacaaatcatgttggataaaaaacttctcatatactagtacatgt

SEQ ID NO: 216150 - DNA, 773 bp, Cannabis indica
gaattcaaattaaaattctaaaagatgagatttgaatatgctcttattgatatgtatgcaaattaatttaggaagaaagtacccaggtcgttagtatgattttattagttgctatgcttaatgctatgtttgtgattaaacttaccataaaaatataggaagtttttacatagattgagtttataagtcttaactagattataaacttcttaattgattaggaagaagagaattcaaataattacattatgaagtaaaataaaggatagttggggatcacaataatccttgtttttatcattgttattttttttttaaaaaaatttaattatttttgtttaatttacttttaaccaaaaattttattcatcaaatagaactaaaatcaagcctcgtgggacgatactttatttatcattatattatttgtttcaattgcatatgcttgtgttttaccaaacaagttttttgtgcattgttggggattgaaaattatcaatatcaggttaattaattttatttctaattttattgtatgagtttgtcttgcaaggtacatacaaaaatactacatcaagattaccttgtgaatttttctaacaacacaatgagccattctaccactactacaaaaatgccttttagtgacaggttttgagagtgtctaaagtgttttagtgacactacaatgcgtgtcactaatggaggtgtcactaaaaaatattttttagagttacaaaaatgtgtgtcactatatcctttttattatctta

SEQ ID NO: 216151 - DNA, 875 bp, Cannabis indica
aagataaacttcattaagaaaaatttgcggttacagaaaaactaaaaaatcgtagacaagtatctgtccaaatttaatctcctaaattagtaacaaaggttgtcagtgtgtgggtaacaccatttgctgatcgcggaatggcgctacaagaattactaccaacaacaattaacaaagaataaatatctaataaaatagaatgaaaactaaaattaatgtggagcttattaatccaaccaattgccacaataaaatcactattaataatggagatattgaaaccatattgatgcgtaagagtcaaacccagacgaatggcaagcaactctgccacattagcagagaaattacttaacaaacctgatgaccacgccaaccaaaccacaccctttgcatctcgtatcactcactcggatccaataaagtccctccccagaatcaccgaagcatccgtcacaagagcaaaaaattcaggaggaggtggcatccatcgagtagctcaatttacaactgggtttgcaaggtccaatcccagatgaagaccttgccagccatactccttaaactcctctagatggatattgactaagtttggaataacatccaattttgactgcttgttgccaaataatactgagttcctgtcataccacaaccaccaaagggttatcaacaattcaaaaacctcacagggtagcctgtcaaagagaaataggataatttcctgcattggtccataaacacattgacagagcaccgactaaacccctaaccaatgccacactggaattaaaccagaacaaaaaaatagtacatgctcaagagttttagattcttctctacattgagaagagtaaagaggtacccgaacattc

SEQ ID NO: 216152 - DNA, 970 bp, Cannabis indica
aaaaaaatgtgatcataggcgtagacaacttttcaacaaagaagttacaactactcccctacctccaaagtacaaagttaaaaaaaaagaaaattagtatttacttaaaaataataaatgtaataaaattaaatatatgaatatataagtcaatatttatatttgatatattactaaaatttaaataaaaaattaaaaatatatatacaaacatatttacaaattttatatttataaacagtatatatatatggttattattattattattattattataaatataaatatttataatgctattattaatttagtatattaattatgataatcaatatattttttaagcaaatttaaaattaaaacacttatgtttattttttattttgttttgagaatacttatgtttattaattatttgtgtactaaaaaaataaatagtactgtgattaaatgtaaaaaataatatgtttatattattattgataatgataacttttataaatttttaatccaatatatttattatgaaaatatttgtgataatgtgttgatgcaatgtttattatttttatttaaaggaaattacacttactatgggattttaaaagttgtttacttaaatatgacacttttaagtttgaccaatttatatggtattttttttttgtttttaagtattcttatggtatttgatatgtcatatatacatatgtaaattaagttttcaaagcccatatttaatgtttttatttgtttaggtagttttatttgtcactagtgccggaaaagtcgctagagtttgtcgtcggcgctagaaaagtcgttggagtagttgctggtgccggacaagtcaccatttgttctgctggcgccggaaaagtcgtcagaattaacattatcgccagaaaaattattaaaaaactagtttcatgataagaaaacctgtttcttgatgaagaaaccactt

SEQ ID NO: 216153 - DNA, 695 bp, Cannabis indica
gacatccgtgaaagattgaagaatgtgaagaaaaatgctcaagtgaagttcaatgagagcatgaattcgttgcatatatactcttattgatggtttgaagttgtcactacaacaaatatacgatagttaggggcgactaaatttggggcgaaatattgtcgcctactaataatatgggtattaggggcgactttgatttgtcgcccttacgtaatctttgttttttttaatcttaaagctttaggggcgacatatgttgcccctaacacgtgtagaggcaacaaaattaggtattaagggcgacacatgtcgccccaaatgtcaaaaatagaaccgttaatttgggcaggatttttcccgctcataacattagggcgacaaaagtcgctcctaatagtctgaaaaactgccacttgtcaaccattagaggcgaccatttggggcgacatatgtcgcccctagtacttaattaattaaaccatgaaatccttcttcttcattttatctcagaccaaaaaactctctccaaaaaaaaatctcagaccaaaaaaaaccatcagaccacccataactcgtccccgcacgaccgtccccgcaccaccgtcccccgaccaccctctgctcgtccccgcaccaccgtgcggtcgtctcgcaccaccgtgccaccatcatcggccaaaaatgtatggttttta

SEQ ID NO: 216154 - DNA, 667 bp, Cannabis indica
tactaaaaataagatcatgagcttaattttcgacaattttttttctatacaaccaacttgaagacaattcctaacacgaacaaatacagaaaatataaataatttctcatagcacatttagatcggattattattaaattttattttggcattttgtaatttctcaaattacaactggagcataagatcttaaatccgtaaaaaccatactgcgaaaatgtggtgcactgttttaaacggtttacattatcactattacaaaacattataattaaatttaaaatcaatctaatagcattttaataatataaaaattattaaaattttaatatcataacatatatatactagtcatcaagtcattataaataaatatatacaagtcatcaagtcataaaattttaatatcataacatatatactagtgataagtagatttggacaaaagaaccaaatggtcgattttctacgaaatctgtctatcttactcaggccttggcacgagcgcctcctactaatgttgctctcgctctttggaatttcggaatcttagagcgtcacaaagtaccgctcttattagaagggtgcatattgaggatgtgtcatgccctatttatggttagtgagagaaaacaatggaacatctttttctctactgtaactttga

SEQ ID NO: 216155 - DNA, 506 bp, Cannabis indica
gtttacatgaaaatacataagtttggactgtcctcgtgaggtccagcccgtaagaggatagatgtgctgactaggtagataggatatggttaagctctaaaaattgtgtcctataattgtgggcaattgattaattgcttggtcttcatttaggtaatgtccttttttagcttgatacgatcttccgtcgagatttgagtaatatttcattccttattctgtgcacttgaataaaaaaaggaaaccagaccaatcttctaggaacacgctgtttggacctctaatatcacagtaatagaaatgcttccatatatgggttgtccttggcggaagctcatctggtcatggagcttagttaccttcttggaaggccttgtctaacttgggctacccaaattatcttctttgggccctctagtgggctttagatgttgacgtgaaatccatgtgtcccttgtcggaaatacggataacaattgatataaagaaaatcgctttgatcctat

SEQ ID NO: 216156 - DNA, 1074 bp, Cannabis indica
caatgaaaaaaaaaaaattgtacatatctcttctccgtagatcatattcaaaaaaaaattattttttagtggatataagtatttttgtcaaataattaaaaaaaaaataaataagaaaataaaattaaatatagacataaaatgaaataataataccaataaaaaaaatgagtctacataaaatcattttcaataaagcattatatatcctatactataaccatttcaaataataataattggatttggtttccacttggtttgttgtaggaagaagatagaaaaagtgccaaaccctttatttggtcatcaaggactaaaaacattacttatttattgtaactctaattaagtacttgtatttttgtatcatttcttcaattttaattttgaaaagtatttttgtacaaagaaaataaatatagataacgcatgtgtccattgtttgtttaatcccttcccgtcccaccaaaaagaaaatctggatcaattttcatttatttatttttttttaaaaaaagtcaatatatatagttagttagttaaaaatatttttcttttttcttttttagaagatcataactccctataaatcataataaaaatgtataatatattttccatatctttacttatttgaatataattgtgtttacataaaaaaatttgcatgcacttattatatgtgtttttttacctatatattgataaaaatcccacccaaaacactattcccaacgcaaaattctattgcatcaacagaaaagagattaaactcaagatattatttgcttattaaaactaaagttgagtcaagttttaaatcataaattttattttttcctaagtgaatcctcaaatctaaactttaatatataacttcatattatttagggtaaataccattttggaccctctgttttacaaaagttaccaattggaccctgtgttttgttaaatgacaaaatggaccctgtattttctaaaatagtaataaataggatcctgaattgatttttttgtctaaaaataaagtttaattataaatccgatctaaaaattgctatgacaaaa

SEQ ID NO: 216157 - DNA, 756 bp, Cannabis indica
tttttttaaaaaaaagtaagattaatagttacctagtattaattataagtatggacagattaagagataagcagattaataattaattaaattattaaagaaggaagaaaaagattgatttgactatttgaaggaaaacaaaacaatatatggtgtggtatgttataattaataatattattgttggaattgatcaagttacattatataataaaagcatgcatgtgagtagtagtttttcctaaaaaaattttatttgtgttatgtgataaattaaagtccctcattaaaaagaatttttttttcttcaatttttactataattcaaactttcaccaaaatgaaaaatacatttagtttttattataaaaaaatcattgtattctctatccgaatttaaaataacttatggaaacattataaattttttattaggataatcagcgaccaaaactcttttatattttagtttttatacacataactctttgttattattttttttttttggttagcaacacttccttaacttcacttctgctcgcaaatttgaagaacaagttaaattcaatatttaaatattaactgaaattgtcactatgtacacatgtatacgcgtggcgctaaaatctcaaagttaatgaaaacatatttcacatacaaaagtgtccacaatgaaaactcaactaacttttaatagtggaattttaacagacgtcttaaatttacaattgaaaataaaattaaaagagtatt

SEQ ID NO: 216158 - DNA, 659 bp, Cannabis indica
gattgtaaaataatttatattataatataaaaccatctatataaaagcttaaagtacttatctgttaaaattaaaaggccgttaatgtagaaaccacgagcacaaaatggatcacttctctagtccattaactatactacaaaactaacttaaacaattaaaagcaagacatagacacaaaaattgtaaaacggacaatagtgcccttaaaaagcataaaaacaatcaaatcattataaaaattattgaatgagaaaccattaacagaaacaaaaaaatataattaatatactttaattaatatatagttttaaaaataagataaaatagataattaattaatatacttttaatattttttatttactttatttataattatgggaaaaaaaatactataagtatataaaaataggctaaaatcagtatataaaatatgtttttgaaaaaaaaagatagtatagaaagcaacaaattatgtaacttacaaaaaaaaaaataaataactaataaataattgattagactttaaaagtaaaattaataataaaaataaaagtagtcaaataaataagaaattttactaccaaaaatacaaattaacacactttattacatataaacctacacacggttaaagcgaactttttaccttttac

SEQ ID NO: 216159 - DNA, 727 bp, Cannabis indica
attggacactaatttaataatagaaatttttaccttattaagcaccaccacacactattttcacacacaaaacaaacaaagaaaaaaacaaacggtgaacttgcacaagcaacataatagaaaaaaaaaatatagaaatcaaataaaaactatattaaacatcaaaatcgacataaaaaaacttgcaaccatgatataattcttaactttcataacaaaaaaaaaaaaaaaaaagatataatctcaaattagtaactattaggcttaaaagttcagaaattgaaagtagtatgtatgaatgaacactaaagcacaatcatgaatcaacaaccttgagggttctcaaactcctcttttttttagcacaaaaacaacaatgttgattaacattatgaatatgaaccaaatcaaagaaaataaaacaaattactactaattcaataactatacttttttttcaaatcttttcatactttaagatcatgctcacttatcgataaaaatttaaaataacaaacaaaactcctttatattatcactgtcatacatatttttttatagaataatattaatagaaggtctaattcaatttgacatatacagagtaccactaacaatgcttaatgatgctcaaattaaagatgaactaatatagatagttggatttattagcacaaaaagtcatcaaaattatacacgaaagaaaaaatagaaatgtaagaaaaag

SEQ ID NO: 216160 - DNA, 642 bp, Cannabis indica
ataatcatactcactataaatactgcatgtttatataataagtcttaattattcataattaggtttccaggtgattataggaaagttaaaataagaaaacaatttgaattaagggtattcattcaatcaatcttgcactattttgctcatagtgcatttcgatacatactaagtgcggatttcatattttagatccaatccaatttgcatattaactcaaatccaatctgcaaaagtgcggatcgaagttactttttaatattgaattatttaatattcaataattttatttacatggataaagtaatgtttaattttattttagattatattcttttagtaataaaaaaaaaataaagtatacatttgattttattaagttttaaaatatatttgtatcatatatattagatttttaaagtacaactttttacattaaaatattaattatatatatattttaaaatatatattaatttgtgtggattggattggattaattacatttacatgtcaatcaatatccattatgcttaagtgtaaattttagattttctatcaaatctaatacgcacaagtgcaaatatccacactttgctgattgtattggatcatgcgcattagattggattgaatatttta

SEQ ID NO: 216161 - DNA, 586 bp, Cannabis indica
tctaatgatagtcaacatattggactgttgataagatcacagccacccatattttttttattttttattttaaaaaagttgatttcacatcactaattaatcatattttttttgtatatctcattcattctaattatgttatatattttatgtttggatgtatataatttattggttcagcataagagactttttagggttttcatcatcaaagattcaaagcatttgtccttatataatattattattattaatacatacatatatattatgttgttcttttgtagtaagttgtttatgtgagaaggatttcttacctgttttaataggttgaattaatataaaggccaaaaaaaattcatagggactagacagaatgaaattataaaatacaagtgtcaagttattgttattccaaatgtcatgattttcactcatttattgaattttatcaattttgttcagcataaattgtcaaaattatttattggggggttcatcatataatgttattgtaaagaatgtcatattttgtggctttgaactcaaattggtttttttttttcttcatttttttttttatagg

SEQ ID NO: 216162 - DNA, 803 bp, Cannabis indica
gtagagagaccacatcgggacctcagaatgaatgatttgtgcaaatgcaataatgtcatattatacattagttagctgtttaaagaaatatgctcagctgcctttttagaaatttcaacaccaaaacacattgtacttgtagtgagtagtgagtagtgagtagtgagtagtgatcaattcaactcaaaacataagaagttggattcttgcttctaaacttaattaatagactatgcatgcacaccaagttattagatgcttaataaagaaaatgcagcccctcagttttagaatatatatatacatatgtaaagattgtgtatttgaaaacgtggaatcttattctttctatatcttaattcttaataaggttgtgctctttattttaattttcttttggctgagaaaactgtttgatattctcctacactatagaacccatagccaagtgatgattttgccgacagttatatatgacaagtaagaaattacaccagtatttatggcctataatctaaattacacccttaaattattatttacgtgtcacttttgtactaattaaaaattgtcatgtaatcattaacttacatttaacttacgtatagcatcactaaggacacattaaatttggtgttacactattatcaaatttagtgtcaaaaatattttcactccaaccacaacgctaaaatttacaccaaaaatatatttattattatattaataaatataaatatttaatattaaacaaaatacaactattaaatattaataataataataaaaaaaagaaatagcac

SEQ ID NO: 216163 - DNA, 644 bp, Cannabis indica
acagtttaaattaaataagtaatgtttttttgatctcacgcaattttcatgggttcaaccgcgtccttcacaatttctatactacaataaagattcgtgcacttgcgagttaataaatgtaaaacatactattttttatcacaacaagtttttggcgccattgtcgaggaactccaataagaaaaactactttaatccaagttagtacaattcttctagtagttatattttataattttattatttctagttattataatattacaactatatatatattacatattattataataagtaataattattatatatatttaaataaaaatataattgacgttactttaaaaaaaacaataaaaaactttttgtaaattattattatttataagtttattattattattatatattgttatatatattacagcaaaatattattataattatgtataataaaatttatatattattaattataattaatattaatatttatacttttcttaaatatttaattttaaatatttacacttataatatgtgttatacccgaaattcggctggaggacacgtgttaagataaagggaatgtgaatcagtgtcagatctttttatggttaaactcattaattgcgtaagta

SEQ ID NO: 216164 - DNA, 532 bp, Cannabis indica
aatctaaaaatctgtacttgtgccaattagaagttgattgttatgtaaaagtaactaatctaattcaatccatacatatttatatattttttaaaatatatatatagataattattattttaatgtaaaataatagtaatttaaaattttgatagatgaaatatatagaatataattttaaacaaaattaaaattttctttgtatctacaatttttttaaaattttttatttgttattttaatttatttttgaagatataaaacaacaataatttattttattttattgttagttatgtaatttttttaataaatattaaataatttaatattgaaaaggaaccaatttaaaataaaatttgagctaatatgcagattgaatttaatccaaaatataaaatttacacttagtgctgatcaaaatgtagataaattattataaactgctcaacccgaataacccgccaaatttgaataactggcccaaaccaaacccaagatacacaataaaaaactctgacgaaaatataac

SEQ ID NO: 216165 - DNA, 595 bp, Cannabis indica
attttaattacactatctatataaatcatgcacgaaagtacacatgtatagttgaaaagagtaaatgtacattattacattgtaaaacacatatgtctatatttatatttcacacacaacaaaatataaatcaataagaatcaatttacacaacaaagttattctagcatatttggtaagttatcctatctcttgttaaatgacatgagttcaatccttaacaccttcttttgataattttatacaatttattttttgtccttttttttttttattttatttcattttttgaagaattattatctcctctttatcattctcaataggggtgtttatacaattaattttgcactattttgctcatagtgcatttgatccgtactaagtacgaatttcatactttagatccaatccaatccgaataataactcaaatccaatcaaatctgcaaaagtacggattggattggttagtttttaatattaaattacttaatattttttttttcaaatagctaataaaaaaacaaacaaattatcattattttatgtcgccatgacacaagagaagaaaacaaattgtatgtataaagaaa

SEQ ID NO: 216166 - DNA, 746 bp, Cannabis indica
ttacatctgggttgatgataatgaataactttttttaccttttcaaattattataattattatatggatgtgcacataatttgaacattccctcaatcttttcaatcatgtgcacaccttccatttaatgtgcctttttaatttaacaataaatatgaagctcaggtaagtggagagcacttttttagcacttagttttttctactttaaatatttatatctatagtttcatcatatcgatatgcttttgcacatttgaaactccattaaccgtttccatcgctttcgagcatacctcagtagttctacaaacttttcaaaaactagatcacctaattattatttgcttgagtactgcagtgataatgtcgtcattttatctatcttttttacacaatacttttttggtccctcgattatttttgtttatccccttctaattttaaaattttgcaaatttatcatcttttactatcatgcttgtttgccccaatgttacaaatgcacattttctgttgaaaaaaaaaaaagagaaaaataataaccaagataaaacaagcagcttgataaaattttattagtagtgatcttaggtataattttcactcatttttaaaaaaggatcgaggttccgaattctactcgccttctctagtataactaaataaatgaaaaaaaataattaatcccaaaaaactaaatccaaaagattgatttgaggcttgtttagcaaacataaattagaa

SEQ ID NO: 216167 - DNA, 527 bp, Cannabis indica
  modified_base (459)..(459): a, c, t, g, unknown or other
gtgataaaactcgccacctgatcctgaatgttatgacgaagagtttcaatttcctacaatttagtatttagagcagagatcgcgttcgaggaatcactctgaaaaatcatcttcttgtacccttgctttaatgcttcctcggctcccttacacaacaccatgatctctccgataaggggctcactacagccaaccggaaggtaaagcagttaatgaaactcccagcttcatttttgaaaaccgcagcccccgcagcctagtatttcccaatagatacatccatattacacatcacccatccggggaggggggagccattcaaagatgccagcttgttgtgttcgcgcatcctccgtgatttctataaatcttgtattgatgtgttggaggatggtgtgaagaggggtaggcattcccccatgagacaagttgttctttcacgccatatgctttcaaagnttatggcagccccaccaagaaaaagatgcagttgaagcccatcaggacgattagaatctatagaaaaa

SEQ ID NO: 216168 - DNA, 656 bp, Cannabis indica
gtggggtatattgtttctatgtaaggtggtatattaagaacaaactaaattatattatagtatattgcttaaatagtgtactatattattttttatgtgcggtggtatataaagaacggaagacaaagatgtttattgtaagttttgcatctttgacgatttaatagtgtggtatagtattttttagaacaatgatatatttagttttacatcacataaatgtggtatattattgtttttatatgctatattatttctaataatgtggtatatattatttctaataatgtggtatattattttttagagcaatgatatattggtaaataatttctaataccagtataagatacaaataaaaatcatacatcacagccaatattagacagcaacaacaacagaaaaatctaaaaggcaaacagtataataaggaataaaaataaaagagcagcagaacaaaaaaaattaaattatcatagttacaaatcaaatctaaaaacattactaagaaagaatttatgatactgaaagaaaagcagagaaaacaaacctctatgaacaaatttgaaaaattaaagagaggagagaaaagaatcgagaggcaatgatcaaaaaattcagacgaaggaaacaaaaaattttgagagagaagaagc

SEQ ID NO: 216169 - DNA, 923 bp, Cannabis indica
gtagtagtagtagtagagagagagagagagagagagagagagagagagagaatttaaccgagaaagaatctagagaagatgagtttgggactgcaaatcagtgtcattttatagacaaaaataaggaaacccatggtctttatcgttgctccagtaaaaagagctcacgtccaccactgtccggttttccatgatggtaaggaaacccatggccattttcgtcgctccatgtgagtcctcccttctcctcatctccctcgaaaaacccatttgttctattgcttctttacttcccacagattccgaatcacctgaactttcttccatgggcttctccatcctatctcgaccaaattggcagaaacatccttccctcaacaagcttctccattctatatcatcatctcatgtgctaaacttcttgattcctaacgggtttttatcgggttgctgagaaaattcagatttccatgatcaaagtgttgggttttgtgccctaaataaaacccatttcaatataatcagatttacttattaataaagatcagaaataacattttatgttgcatggttcacatgatttatttcatgattatatatataatgtatgaattctatttaagtccagaacatatgaatttgttaatgattatagtgttgtcagcacagtggaatataatcttaattatatgttcgaaagtttattccctgatttgtcagaacactggatttagactgacatggtataatcagcgataggtattcttacaccttggaaaagtgttatgtcctttcctaggacattggcaaagtttaccagtatcggatgtatggagtatcatcggaagggccgatattgaactttgattagatatattaaaacttaccgtaatatctattcaattcaatatcacatgttgtat

SEQ ID NO: 216170 - DNA, 886 bp, Cannabis indica
acaatataaatgtattgggagacacatagcaacaaaaaatgtaaagaaaacatttttttttaaacaaaatgtacatagtatttaaataagacagtaaattgtaattatacccgtgctacattaaaaatgaaaaaaaatgaaaaagtcagtatatagtgtaaaaactcattttattttatttaactgtttaattggtatatgacgtgtaaaaaaaataattaacactaatctaggagaaaaataaatagattgatattaaacataaattcttatatataaaataaaatattactaaaaaaaacagatatttaaataaaaaaatacaaaaaaaatacttatttatatataaagacaacaaaaaaaaatgctaatctagaaattcataaaatccattaatcaataaataaaagaaaatagaggtttttgctccaaatactgatgtttttattgtaaattcttgagtaatccaaaataataataataataataataataataataataataataataataatacaacgtaatataacaattaaaattgataaaaaaaaaccccctacaattcattgatgaattaaaaaaaaattcccaacaaaaaaagaaaataaaatgaaagaaaaaaaaaggaggacacgctagtttaattaaaaattaatatttttaataattaatattattttattttcaaaataaatatataattgaatataattataatatgcataaagttttaattgcataccagcagtcttatcgtaaaagtatacaccttatatcttaataaccacatgatctaaaatcatgatcaaaaaagttagggaagctaagtcataccatagtcttgccctatatatataaatgtaatcaatatacaaatttattt

SEQ ID NO: 216171 - DNA, 871 bp, Cannabis indica
ataaattcacaatgcctagacattgctatggctctaatggctgattagagcaataccttcaattcaattgtaatgctttcaaattagtgtataatttttaatttattattttatttcatctaattgccgagcgaccaccgttgaccctttcacctcctccctcaaataagtaaattctgtattattttgtttcattattatcggaaaaatagattaaatacacaaaaaatattacatactaacaaaatataactaaatttgacctaaaagaaaaaaaaaaactatattacatttacaaaaatgtgttacgtaattttacaccgtgaattgaagcaagcaatgcagataataaacaaatttttacacgtagaagtatgttgatgtttcggttgcatttgtggtgtccctacaaaggatggagcgagcttccactactgaccgaggtagctcaagatctttgtcttgcagcgcattcccttgcaatctttgcatttgggaagcgaatgtgtcatccaatatctacatacaattcaacccaaggttaatgtcatacattactattattcttatcatatatagcgtgcgtgcatgctaatgtgtttagactaaaatgctctttcttccttgtactactactccatacttgttttgttaattatattttaagatacttaccccaagagcatagtaggatccgttgtaccacactcggttttctttccttccttcaagaaatttcaaaacaatctggttgacacagaaaattggaaggcattaattagcattgagaagattgttccaataccaacatgtgtgaattttacaacaaaagacacaaatatacaaattctgtttacctgccccatcctat

SEQ ID NO: 216172 - DNA, 1166 bp, Cannabis indica
atatgtctaatgtggtgtatttggtcagaacgaaacaaagaaatgcatggtacgaagcccaaaccaacagatattatttattctttctttgcttctcatttgaatcaatatcacaaggccacaactcataaaccagcagtaacacaatgttcaagcacatctatcggtggctgcaaggtctttgcctaaatggcagccaccagctgctgattttttcaagctaaatatggatgcagcaagggatcaagcaggggctatcataggtgttggagctctaatccgtgaccacgacgacactattgttgctagtttttcaaagcctatccgtggatgcttttctcccaaagagatggagtctgctgctatgttccatagtgtggaatgggcaattgagcaccagctgcaaatttaagacagattctcctttaattgccaatgctgttaatcatatgtcttctactagatttataacatattttcatgatttagtagatgatattgcttatcttttatccgttttttccaggagacaaaagtatctacaagttttaaaaaagatgactaaataaaaccaacccacgctagaaacaaaattgctcttcgattgaatgatacgttagttgggaaatttctttcttaatctgttattaatgactctctaattttaataataacatattttactaaaaagaaaaaaaagtaaagtcaaaattaaaagaataaaattgctaattattccaatttttaatacaatctattaatctatcctgtattattagtaaaaaaaagtatataaggataaattgtattattttggagggttggcgtattagccgatattctccttcacccgaatctcttctatttttccgttcggtactgaattctcggtgaagagcatcttcatcttctccggcagatctatccctaattcactgtgccctctgtcgagatcgatctctcagattcgtctggtacgtggtctctctctctttctctctaattcgtctggtatgtgtgtgtctagctatattacacatttatttaactggtttttttttggatttagatctgattttgttttctcagtggaactcctcatctccatagctctctctcacgctcaaaggtagctcagaatcagaggtatacatggtttcttaaat

SEQ ID NO: 216173 - DNA, 1163 bp, Cannabis indica
ttggacaaattagcctgtctaatccagtccagttctgcgtaccaaacggacccaaaaagattaagaaattagatgtttgtatcttttttttttgaatattactagaaaattaatatatattatatattataattttttaaaaatatataataagtgcggattggattgaatcggttattttttgaggtcaaacaacatccaatccgcacaagtgcggattttagatttttcaatccaatccaatccgcgcaagtgcagatatttgtattttgcggattggattggattggatcggatacttagtgaacacccctaacttatacatagattatttgtttttttttttttttgtaataatcctatatatcaattaatttcaaatatattaaaaaaattaaaaaataacattttgactaaataatactttatataaatgagaactaaaatttctttatatatcaaacattataaataattatccattcattattaattatttgtgagagaaatccaaacaatcaatatatcaatatataaaggagtgtttttaggagttgacgtggcagcataattgtcattattttttaatctctcttctctaatttattcctaattttttaatttatctcagtttttattatgttttgcattttaattggtattatttaaacacattaattggttttaccgggtcttcattcaaacgttaaaattgtaccgtatcttaattttttattctatttttccattttaattggtattatttaaacacattaattagttttaatgggtcttcaaacgttaaaactgtaccgtgttgtctacccaatttttcttagaatttatttgatttgatcgcctccattcccacgaaaaaaacgaagaatttgatcgaaccttcctctcaaattctcagctttctccttctcaatctctccgattttcaaatttccctctcaatctctacaggcggttatgcgtcggacaccctattgcagataaatatttcgaaaaaacgtgaacttgcagaactctaaattgggagggcaagcttatttagcattgaccttaatagtagtttagtgcaatttagtacttgttttatcaattgctagtttaatttttttataatttaatatgtattgacggctaattatataatt

SEQ ID NO: 216174 - DNA, 663 bp, Cannabis indica
gttctttgacttattcgttacacgcttacccgtaagattagccaatacttactaggggtgtacataagtcagtttggtcgggttatagtgtatttttaccaacccaatataattgtcaggttgtaaatatctaattgtaactcgtccaataaaaaaaagtacaattcgtctaatgatttttgtcggtttggtcgggttaacccgtttaaatcgatctttatttatttatttttttttattattgttagtttttggtgttcaaataattgattttaaaaaataaatgtacagcatatgcctttcaagattaaaatggttataatttaaattaatgttaaaaaataaatataaattgaataaacattaaagtattaaacaaccttttttaaaaaatagaataaaaaacatatactcctatgtaaattctaagcttcaacttcaatattcaaatatcgtcaaaattatcaactataaattctaagtttcaaattaaacactataaaatataaacttaaaatgtaaaatagtataactattaaacacaatttatatattatattatagataattttagtaaaaaatatgtaaattagttttcggtttatttcaggttatttgggtaggttagaataatattcagcccgtcaaatatattcattgggc

SEQ ID NO: 216175 - DNA, 587 bp, Cannabis indica
cttttatctatgagcactcttttctgatgaatgttaaaagggattattggtctctatcgtctatgtagtttaatgtaataatttttaaaaagtacgctaattaatcgtaaaatgacacttctagaaattggtagtttgccaaatctccgtttgccacctagtacctactactactactatactacttcagagttatcataatgtcattattaatgatttgagtcatattaaataataaatgttatattcttttacaaaaaaaaaaataaataaataataaatgttatataagttgtcacgacatatttagacgaatcaaataattattagtttacaccaaattctgagacataacaaaataatattgtgtctcatcaagcaaaaaaagaaaagaaaaaaaaaccaaaatattgtgtctctggatcattggctgaatggctgattagtttacttaagcatttggttgaacaggttttggaacttaagtggcatttggttggaggtaataaaatagaatagaatggaaagtaaacaattttcattctattcctttatttggttgcattttaaagtattggaatggcatt

SEQ ID NO: 216176 - DNA, 473 bp, Cannabis indica
agagaagcactatcctatttactttaatttggttttattattatttttgttaatatttatatgtgtgtatatgtataaattaagattatatttttaaaaataaataaatgtatattttaaaatataatattttagtagtgtagagaaaattagaaaaattgatgtatggtgtaatataaaaatttgagataaaataaaaaataaaatattactaatctatttgaaaaaataaagtaaagaaactgatgatagtgcttaacatatgatataaaaataaaaataaaataagattttagcaatatttttttctttaaataatagagtaaagaagcctccaacaggagaatccaatgttaccactccaaaataatagaaaattagattttaccaatatattttctttaaacaaatttgttatttttctttagaaaaataccactccaattttcaacaataacaaagaaatatcataa

SEQ ID NO: 216177 - DNA, 652 bp, Cannabis indica
ttttagtcttaattttttaataattgtatatgttatagtttttttagtatggtatatgttatatttatttaagatatatgtaaaattttagaaatttaaaataaatagaaatcaatgtttaaactatctatttcacacaagtataaaataaatgaatcacgcgtacaataaatttttaaatcttaattttaacattcttatctctgcacttattttaaaaaggtgtagtgtagaatttttatttattatttttctcacaaccaccacattagaaaacattattttgttttgttttttcatagatatgagtcctaccttaaatcctgtgccaagatatattgcactgtaaaattataaaacctcacattccacgtgctaatattatgtgggtgtaagtaatggtgcattcctaacataattttagtatttttattttctaataaaaaaacatattttagtatttttattaaaaaaatccaatggccttggtgtggtgttgttgagtgttgaggaattagatggagtgatggtggccacggcacaacacttggccttttgttctttgcctattttctttgagattgggctttgcgtttgtcttagatacactcatgttggtggaattcatttgtctcaatgttatacacattaa

SEQ ID NO: 216178 - DNA, 1088 bp, Cannabis indica
ctatctacaaagttaattacctgcagcaaagattaaagctagggcgacagtaaagaagattactatttgaatcttcattgtggctgatcgaacttttcaatactatataatatacttaatttgatgatatacgtgaacgttttaggttactacaatataatattatacatatatatatttatatataatttttacaaaacttgctaatacaatttgattgaattgggtggttttgttataaatttatagctagctaggcttgaggtttggtacacagcagtaatatgtataattcatatgcatggtggctctatagactgaagaaaattatacaatattttacgtgttggatacattaatctgatatatagtcaaatcaacattatttttttagaaattcgtacgtatagctaaatcacaaatcttaggccatctccaacccacactactatatagtagttagtttcacactatatttactctaatgagaactaaaactatactcataaattgatttgtctacggtgtctcaccaaatttaatttggtggaccacggtagatcactacttaagttttttaaaaaaaaagtttttaataaattaaataatactagttaaagaaaaaaaaatttaaataattatatatatttagtattaaaatatttttattatattaataaaataataaaatttagtgtaaattttagtgttgtggttggaattgaaaaaaaaaattagtgttaaaatagtaatttttttaatgttaatttaacactaaatttaaatttctccaaagacggttatgattgatcattttagaaaagttcatacgacatccattgtaatattgttagcattatattctgaccacttcaactgtactaatttgaacagtggataattattgtaataaaagatacagattttagtcatgcacaacatgatatgggtacgtacgtacgtacttattttaattattacattgtttttatcaccgtatactttgttattgatcctcaatagatagcttaaagaataataatataattatataaaccctacaccagaagagtaaattttactatact

SEQ ID NO: 216179 - DNA, 659 bp, Cannabis indica
tacataaattttattttttttatcggtcatcgcattaagcacatagaggtgtatcgttgtattctttttaagggatacattatagaattttttaaattttatttctcagaattagattcactgaatgatgtaggggtgaaaatcggttggttatggttggtttttacactgaccggtcggttacggtttttattttacgaaaaacgtaaccgacagtttagaaattataaccgtataaaccgaccatacgatttttggcagttttaagcggttttggcagtctaactatttttttattttaaaaacaaaaaccgaccgccatgtcaaaaaaaccaaaaccgaaatcgtccgccaaatacggtgatgatgtggaaccgaaaattcggttacggtctgatcgattttggtttatcgatttttatgaacacccctttaaatgacattgaaaacaattagtttttttttttaaaaaaaatcaatttaaaatttaaaatatctaaatttttatttaaaatacgttaaatctataaataattaagatctgtgagagaaaaaaaataaagaaaacttcatttttctccgttttctttgttttggtaaacactaaacgcgccataaaagcgttacactctaattgaaatccgcaaaattactcgttc

SEQ ID NO: 216180 - DNA, 990 bp, Cannabis indica
tgtccctctctcgtttttcttttctctctttttttcttgctttccctgcctttgggatatttgcacccaatgtttgcctaggagaatgcctaaattttttatctctggcagacatccggagggggcctctctccagcggttgggggaccccaattccctccttttatgttagggtttggtttgggggctaactgctggatttctctttttcagaatcttattaatctcaaggcatgtctgtccctacgatcgaagtgaaatcctcaggcaaaagatctaacactatggccaccctggaggaggtgatgaagggacctgtggtccaggagaagtacacttgtcgatccactggctgggaggcagacgagttgcactcaactctgacttgtgcccaccaactggagaagattgtcacagttgtcgggatcaagccctctacttgtggagttttccaccgtctttccagagacgattatgcccaaccgtaactacggtggctttgggtcttggagacaaacccacctcatgttcggggcgatgctacccctccaagactattttatagatgttttagtttttgttggcctcgcgccttaccaacttatcccccaagcttactgcctgctcttaggcttgtacattttctatgttgccaagcccagcccggctgaaattttttatttttatgaattatcatctgtctccaagaagggagacaaacttaaagacggttttttcaaacttgaggcccatcctgccaacgagggccctgttcctcataattttcaaaaaaaacattaaggagtatcgccatcgatttttcttctcctccgccttcaaggccattgagcgcctggagctactcactgaatgggttagggttcccttgtaacaccctaactaccataggcgtattacgtgatttttaaacgtactgtgcagctcgttgctaatcaacgaggtttatggaaaaacgtgattaattaaaat

SEQ ID NO: 216181 - DNA, 512 bp, Cannabis indica
tttgaattaggatcttttgtaagtcttacaatatataaagggtattagatcacataaaaagggattgaatctaagtcacacacccacagctctctctccctctaaagctccacatgcacttatggctccctagactataagtctattttttcataagttcttcatagaatcctaccagttctttatctgtaacacattgttcttacaattataatactgaagagagccataactagaaattaaaaggtctaggcctgtaatcttcatggtattatctcaagagtgaatacaactaaaaggagagtaggtcatacccatcatcaagggggccaaacttctataattaattcatgtattatttttactatttattattcttatttacatgtagtgataattagtaattaataaggcttcacagtcagttggctaaatctcgagtcaacatgtttcatgtccagcaatatgaaatttttttttaccgtggggccactttcacatctagtattgct

SEQ ID NO: 216182 - DNA, 949 bp, Cannabis indica
tgaaaaatacaaagtctattttctcattaaacaaaatagagggtccaattgataacttttgtaaaatatatagtctagaatgatatttaccctatttattattatattttagtctgaattaatatatatatatatatgggtattacccatgggtgcactcttaatgggtattacccatgaatgggcaatattaaaataatttgagtttttatgcttaattaaactatttaattagaaaaatctctcattttttcattgtatgggctgaggttgttccatcgactgaaaagaaaataataataaaaaaaaaattggcaaaaaaaataataaaaaaatattgagttttacttaaatatttgtcatataaacttatttttgatatagtgtaaaaatatgtattttttgatattttctttaactaagtagctaatttaagtgtagaaattcaaaattttcttttattattcgccatcacaatctaatggcttaatatttttaaaattaatatttatagttaaatttatttagtacccatcaatgggtaatacccattaagaagtgttccatatatatatatatatatattcaaatatatattaagaaatttatttgcccaaaggtaataaattcttaattgatatgtattttttctttattgttaacttcatgaagttagatcatgtgtgtaatatattctcaccacaaatgagagtttatttttaattatattgctcatatagcttgattaagttttaattttttgagtttacggaacaacaataaggcttccatacaaattctgaatgtgtccaattttaagacatggaaacagatgtgaaacatactttagacataatgaatttggacttatgcctacaagaagaaaaatttgttgatgttactaatattagtattgttataatacttttatattgagttattattaaat

SEQ ID NO: 216183 - DNA, 1039 bp, Cannabis indica
atgttggaaaggatctaattataaaacttaagaaaggagagacatggaaaaaagtttttggccccatttcgatctttcttaattcagtctcaaccaatcctaatcctcattcggtattatgggaaaatgcaaaaacacaagtacgtacatacaatacatatattatcgtagtaattataattaattttcttcctaagtttttgattaacaactaatgatttaaatggttatcaggcacaagaggaaggttcgaaatggccatataattttatgaattccaaagactttcctctttctaatcagcgaggcagtgttaagggtcagttgtttgttcaagataggtacttatttattaatttatatcaccaattattatttattaaagataaagcaatgctttttttttttttttatggaataagtgaatataactaattttttcaattttttctttgtttggttttagatacttgaacaagaacaatacgagtgcaaaatttgcttacataggattagctgcaccaggaaaagctgggtcatggcaatgggaaaataaggtacttaattttgtttatttattagtaatttgaatatgatatgacaataattaatcgtgttattaattaattacacataaaataactaatatgtgtgtaatatttcagggttaccaattttggactcaagcagatgcagagggagttttcttaataaaaaatgttcgacctggaaattataatttatatgcatgggtccctggtgtaataggagattacatgtacaacaatacaattgccatccaagcaggtatatatatatatatatacaatataccaattttactgtaataaatatttataaattagaattattcacttattaattattttgttatatataatagggaatacatagatttaaacaatctagtttatataccacaacgaaacggtccaaccgtatgggaaattggcattcctgaccgaactgcctcagagttctatgtgcctgacccattgcctaatctcacaatccattg

SEQ ID NO: 216184 - DNA, 584 bp, Cannabis indica
tcgacggtagaatgcggattgacggcgacggagaaatagtagtaacaaatctattgtctctagaattttctctcgaaagtgttcttgaggtgaaatggcaaagtggtgaaagtaacccagtgaaggaaaaaggctggcttttataggccagaacgggtgcaaggcagctgggatcaggcgtcatcatacggtgggaatcataatcgatttgtattctacagatccaacggttgggataaatgctcatcagggcggttaaaaatgcttgagtacttttctgacacaccgattaaatgcgccgaatcattaatggatgggcaacgaatcgctgcctgcaaaaaaaataaattataatgatgactatcatgaatgcagctcactgacccgaagcacgtgccacaaaatcgatgagccacctggagccaccaaacaagcctcatttattccccaacaaccaaggcttggagggtaatgtttgttgggttttatgccctaaataaaactcatttcaaaataatctagatttacttattataaagatcaaaaataacatttaacgttgcatggttcacatgatttatttc

SEQ ID NO: 216185 - DNA, 763 bp, Cannabis indica
cttgcatactttatcaatctgaaattaaataatcatcaatacttcctatatatttttaataattccaacaaattacaaagtatgacggcgtttgataacacttttattttctttaatttttttaatctacaaaaatgaaagtagattttttgtgtttaaaaattttgtttttaaaaaacaaaaatgcgttctataactatttttattttttaattttaaaaacaaaaaacaaaaatatgttttgcaaagttcattttcattttttgtattttattttaggatcgaggctgggggcaggtttaggtgcgagtttggggtctggggtccggggctgagtctgggtccggggctaggttcgggtctagggtttaaggctggggatggttcgggcccgaggtccggggtcggtccggggtctggggttgggtcccgcgtcgagttcagggtccgtataaggggtcaggtttggggctggggtcctgggttcgaggctaggtttggggctaggattggggttcgtggccaagttcggggtctgggtccgggtctgggtcctagggctaggttcaggttcgggtttggggtctaggtttgggtctgagttagaatctgggttcaagtttagggtttaggtttgggtttgggtccggggtttgggatctgggtccgaggttgagtttggggccggatctagggttggagttcgcgtccaattttgggtttgggcttgatcggagtccaaattatatattaagaaaaaaaa

SEQ ID NO: 216186 - DNA, 742 bp, Cannabis indica
aagatatatttctataaattctcacgtaaaggaacaagtaaaaatttattacaacttaattagagatataattaaaagacatttgaagcacatgagattgaagaagggaaatggtgaaactttttgggagagaacttcaaatatgagaagttttttaccttttgttttatttgcggtatcatgcatgagtcatgcggagaagaagtgtcatcgagtcatgtatattacccccagagaccattttgttggtttcagccatatggtaactttattcgtgctacgtcacaaaaatcgtacaaatatgataggagctaggtggctacgcttagctctaggcggtttttgggggaaaataagtgggcgactttagaggtttaacattttatatgggtagtcgaaagtggggtttaaacgagatacttgggttcgtactctgaagaattcatttttttctttcgtggtgtaatattgacaatcaaaataatgtagagatcatagtgatgagaagagaggagggagggtgtaatcctaaactggtgttggaaggtttccgagaaatgttaaatgatttgtagtttgtttgatttttgagcttgagtggatatccttttacgtgatctaggttgtgatggcataaggcggattggtgatatgctttttgtttaatcaatctttgttcgctaagcatggatctcatctatataactatcataattcttggctgccaatgtaatgaaaaaga

SEQ ID NO: 216187 - DNA, 608 bp, Cannabis indica
ttcttttcacctaaccatacttgctcatccaattgggcctggcccagtccaatatttcaaagctcagtgggcccaacagtcgccggctttgctttatctcggaatattatatacacttttttatggttgtattataatatgatataaaagataaaatttcaagtggaaaataaaactgtcctgagcactataatggttatattgatgcgttataagttaattgattcacagattttggatgtaagcttcgtctaaagtcatcaaactttgtccttatcagttaattactatttttggtagcggagagaagtgagaggaaagaaaaaagtgtgtttggttagaaagtaaaggtggaacaggataaagaatttttccaatccaacaaaatcttcattcaactctaaagcatgttttgctaaatcacgagcggcttgattagcatttctgctaatatgagaaacagcaacttcagagaaagagaataaaagacaacgaatatccaataattaaatctgaagaaatacgataaatctatacaaactaaaattcaaagccttagagactctaagagcatcggttcaatatgagtaatatgtattgttcatgca

SEQ ID NO: 216188 - DNA, 740 bp, Cannabis indica
gcttagctacatgtacgagaagctactatttcattgagactaaataaatatttaatattactaaacttttttaaaatatttttataatatatgtgtgagattatttattattatttattttatttacttataaaatgtaataagatataattaaaataaattaattttcaaataatatagagaaatttaaaatgtagtaaatgtatgggttaaacataagaaaaatgacagttttgacaaagttaattttaaaaatagagtagataagctaatgcgagtgctccttctactgctatacattagtaagggattatttcataaatgaactaaaaaatttattaattttattaagtttttttttttttttattattgttaaaaatttttttttttgtcttacaaaaacatggagtgttgtttattttagtgttgctgctatgatttttttacaataatataaatttgttattattcgttgttttaaaataatattattttgagggtgttactgcgtaacgtaaaaataatatttttctttaagaaaacaagtgaaacttgaaaaaaaaaaatacataaaagtgtaaaaaggaatccatttttaaatatatcttgtaaatttgagtaaattatattgtatacccacttatctttatttttatattctttaagatatacatacttttatagatgatatcctcattataccccttaagttaacgtaaattatgtgttagagttaag

SEQ ID NO: 216189 - DNA, 901 bp, Cannabis indica
cataaatatgtgagaggtctgtgtataatgggggtgccgaggtatttggtttagaggtagtgagtgggcaggaaacatgtgatgttggatgagactcaagaatttgttgtttgccttttacatcaacattttgagtgaggggctgacttatgggatgttgtgtggagtcaaaatgagcatggtttttggaaagggagctgttatttggtggaggttgttgagtgggagggatgcagtacgatattggagatgtaagagggggtctgtcacggttggagttggaagtagtgggaatggatggataacaattggtgtgattagcagtgacattgaagtgattagttggtggggaatggtaatggttaggaggccgtgagtgggatgtaaacactgtcagggaatcaaaggcatgattattgacagcacttcttggattagggccagcattagaggattcaccttgatagagaggagatggataaggctgagatcttgaaaccaaattaggaatagatgacactatagccttgcgagcaagtcgggtaacaaaaggccatgcattagctttagaaaaatttgttctatacttatcatatcccgttgttggaagcctagcacccttcatccatagtccgtactccaaatcatcatcattaccattgtccatcctttccataaaagcaacacatttttcaaaagggtgtccaatgactccacactcaaagcaaaattccggtagacgctcataacgaaaatcaatccagaaatcatcttttatatggggcaaactaatcatccgccctctagggagcggtttgttaaccaaaagctttacccgaattcgaagaaaggggccccatccttcatcaagggactcctcatggacatcgacatattcacc

SEQ ID NO: 216190 - DNA, 605 bp, Cannabis indica
gtaattgtacgctaggacgaaagttatttgtacagacagtttaacttttgtaaatggtttttgaatcgggatcccgagtatttgtataaatattttataagttattaaaaagcaaaaatttataatcacgttttccataaacctcgttgattagcaacgagttgcacagtatgtttaaaaatcacgtatacgctatgcttgttagggtgttacagagagctacttcagttcagacccatctctataatgatttgagtatctctcgacatcaatacaactaaaagggagtagtcattatccgctaactaaaggtgtcaaacctctataaatcatgtgttcatttaccttattgttctaattgtgtaacacatggaaagcatcggtattacactcgactccactgtcagttggccaaatctgaggttaatagtttggtgctttcattgagagcgagccgaactcaagtaatctaatcaaacgctatggttaacatgagatgaactccgactacagcctctgcctcatcgggtgtcccgcaagaccctttgattctagatcttgatgtccatggtctaatcacgactggaatttccacgaacactgca

SEQ ID NO: 216191 - DNA, 962 bp, Cannabis indica
ttctccacttgagatttgccaacactaattcctacattgttaccttaggagagctactttagatcccacctatagtgatttaagtagtattatctcccaatatccatacaactaaaaggggaataggtcattacccgctaactaagggggccgaacctctataaaatcatgtgttcatttactttattattcttatgtgtaacatgtgggaagcatcagcattgaatacgactccactatcggttagcaaaatttgaggtcaacagtttggtgctttcattgagagcgagttgatatcatatatgatcaaatgccatggttaacacgaggagaactctggccatagcctctgcattatcgagtctccctaaagatcctctgactgtagatcctgatgtccatgttcttgccacaactagaatttccatgagcactgtagatgtggtcaattcttccatctcgacagacaccacaaatctggccactacaactggccagagtgacacaaacatcccggtggatttgaacaatctgcccatacctccaagggaagaccctccacaggcacctccgactgaaggaaggacccacagggaatagcccccaagtacaacaattggacctcgtccctggtactacactaaaaagacgagtctaggaattggcgagccccatgtagacttaagagaagatctcgagttagcaagacttagagaggctgtctgccaagctggccaaactgaagaaccatgccctactgattgtaatgtattcgctcaacaaagacataaatttctttggggatcatgcagcaactttgggcctatagaagaattggaggaagtggatgtcgatcccacttctccacctgaagaccaaagattggaagggtttagcgctagaataaaatcgtattgataaaatttctaagggcaaacatggacctctttgcatggtcacat

SEQ ID NO: 216192 - DNA, 592 bp, Cannabis indica
ttcctaggttgactccaaatgtactggaacatttttacacgtgtagttttagttatgaatagtggcggttaagttagttatgaactaacttaaccactctgtctaaattgtatccttaggcctatgtctataaataggtcaaatctatatcagtgtaaaactaacatctttgtaaaatacttttagattaaataagagagctatatacattcatattttagatccgaaactgtgttttattgtgtgtgtaattggcattactgccaagtgttctcgagggctagcaagtgagtttagatcgtagttattgggaatgcaaatccaacagtgtgtgaaactactatatttccgctaacattaactataagtaaaaaaccaaacaaaaaattcactgcccctgtaagtgacatgaattgtaaagtgatttgagttagaattatcaattgtggaaccatctgcaaaaagctggaagaaaaggtaaaaataagttaaaattttgtgatactatgttacaagttttatatcgaattccaataaaggcaaaaaaaaaaaatcaaattctgatatggacattgagttcctatcgagctct

SEQ ID NO: 216193 - DNA, 716 bp, Cannabis indica
tgactttcggcccaattcactaaatacagcaatttatgcgacttctacaatacgagttgtctattcatattcttgcataagctcgaaggcttaagatgcgtgcaagaccagtcgagtctgagatgtctgcgtcctgtctgagtcgcatatacgaacatcctgcaataactcgacaacttaagacatgcaagtccttatcgggttgtcgacgctgttgggtcatccggaccagctcgcaaagtaaagaattgatctttagaacctcgcaggaagatctttgtagtccttgcatatatctcgatatacgtgactcttgaaccaatcttcggtcctacttcgtccgaactatacgaatgcgactagactctatcaaggtcacatcatcctacttagtctggttcaggcgaggttttcactcaagaggtctcctactgacatctcagccctcctcgaggagagtgagtccaaaagtcatttttataggatcctggtctcgagtttctaggtgaaaaattctcactataacaataattaattatatgagattatttgagaattttgcatttaagatcacatttatgagtaagggtatttttgtaattttgaactaagaagggtaaaactataatgttaacatttattgtgctaatggactatattattatatagtatgtttatattatcttactacatgttatttttgacaagttggcacg

SEQ ID NO: 216194 - DNA, 526 bp, Cannabis indica
tgaaatgatgctatatacaatactaccgaagacggagttatagttatggaaaagggagggttgtaagggtcgggccaaggttagcctcgagctaagataggttagggctgcgccaagaatccacttaacccaacgatctcattttttttaaaaagaaaaatgcacatattttttttattaaattttaaaaatactacatatattttaaataagtacccgataataatattatttcttaaggccccacgaatctcaaaatcaaccccagtcaggcctaagctaatagggcgctcctatcctaaagttaggcacccaaaagaaaaaacaaattatattttgacttcttttaccttttcttcaaagaaagtgacccaaaagcgagccaaggctttctgataagggtctttgggaagcaaagggtggacgatgtggccatgtctcgtcgatgtattggacgatgatcatggactcacatatgggttttttcgccgatgaacaagcacgggtatctgctcgtggactggat

SEQ ID NO: 216195 - DNA, 727 bp, Cannabis indica
ataggattcgaggtctcagcctctattttgcttttcacggcaccattcctcgaccaccaatttacacttttcaaatttttctagatcctcgaacttactctgcagatgctccatcatcttcttcattttttgcaatgagcatttttgtttcagccaactctgcatgagttgcctctaagtctttggttacttgaaataagttttagtcatggtcatagtgataaccatccttgtaatacccgtctctaacatagtcgtcactgtcatcttcttcattcctccttcaagtttttggccatcatcggggttgtcaaacatgttctcagtatcctcccctcagttttttagcgagggctgtaccttcctctctaacgccaccagtcaggaggtcagaggtgtgggagtcagccttctccatgactgtgtccagtagagttttcttactggtgttcttttgcgtattcaccatagttgaagtgaggcaataacttacaatctttcctcggttctcaatgaaagcaccaaaatatttaccgagatttttagaaactaattaataagagcttaagaaaatgtaaaatattaaataatagacaaatagattttttacgtggttcaggcattaatgatccttagtccacgagtcagtagtattaccgttctttggtaaatgtttgagtattataaatgtttacaatggtaatctttgtattccttttgtttctct

SEQ ID NO: 216196 - DNA, 539 bp, Cannabis indica
aaatctcaaaaaatttcatgactatttattgatcaatagtaccaagtgagtgggttatataccccctatacttagaatatttatgttaataaattgactaagtataaatacatagcgagtaaaaacgatacaatgcgagtactattgataataaaattttaagctctcgccattccaggctctttgaattgcagtaccatcgagttctgcgagtcagtatgttgcgttaccaattttttctgcgatgagatatggtccttcccaattgtcttcgaagaacccatgtgctgggttttttcgtgtttggcattacttttcgaagaaccaaatctcctactcgcagaactctctccttgaccttagagttgaaataccgtgcggttcgccgctgataagccgcatttttcaggtgagcctgatcgcgcttttcttctagaaggtcgaggtaaagcgactacttttcttcgttctgttcaatgttgaaaacatctcttcgtagggaacttgccccaatctcgactggtatcatagcctcacat

SEQ ID NO: 216197 - DNA, 893 bp, Cannabis indica
aagaaattacctttattgaaattctagggtttgtgattgtgtgagaagagaaagaagacaggtgagattggctgttggttgcttttgttgggtctgagagagatggacagagaagcaacgcggggtttgggttgggaacgtcaaaccaataaaaatcacttctttcctatttttttaaaaaataaaataaaaatcataataatttacttttttttaataaatcaataaatctccctttccttccttacattataatggccttttttttttaacaaaattattaaggctaatttaatgctttataaaatttatatatgactaatttaatgtaatgatatcaagtcaaaaaaaattaatgtaatggatatgacatgattttatagaaatgtcaaaaaaaaaaaaaaaaatggactttaggaaatgtttatctagcgaataagcaaagcaaaggtccaaagcctaaggtcggtgggctataagacaaagtggtggggaattagccaacggtgttctttttgttcgactatccactaactttttttttatccctattagttatattatattaattttccttttcttttgtttttttttttcaaaagaatattatataatttttctacctggtttgttttatattttattttattttttttaaagttcttttcagtttgtatgagaactttccacatttatggttggacggttttggaataatctttaatgggaattcttataaatatggaaattgagggtggataagttgaagaatacctcttttttctatgtattaatcaaaaatacccttatattatatttcattaaaatctacccacttttatgagtgacttgtctaatatatcattgtccttcacttaagtgtagcacataat

SEQ ID NO: 216198 - DNA, 601 bp, Cannabis indica
cataacaactgacgccaaagggtacctatgacgtcagttttttcataataaccgactccatagttaccgtttggcgtcggttgttatgaaaaaaccgatgccataggtaccctttggcgtcggttgttatgaaccctacagcgtcacctggaacagcgtcggtagtgaattttgctaaaattccttaaaaaccgcctccaaaaaccaattttgtaatagtgatatttgtgagctactaaaaaaattacaaaaaaaaaaacattagtcgtactatatatacgttaaatgttctctcaaataataatatataactaaaagaaattaatatattattttaattattaatattatctttcgttaaaaaaaaaattatgtcctttatagctcatcgtgtctttttatacaaaaaaaaagtagtgagatatttttaaatattaaagttttgattggttattttatttcttatgtcatcatgacaaaaccctggcctaacccttaccataagtttagcctatacaaatatatactaataattaaaaaggaaaatgtacgtggcacacgtgtaccattctcaaattagagaaaagaaaaaattaaaaaa

SEQ ID NO: 216199 - DNA, 1083 bp, Cannabis indica
taatataatatcgtattgttatacttacatttcgagtagcaaatatgactacgacacgtgtacatgagagttaatgagaatgaatggaggtagaactttttttttttctgtcgacttacttgtttaagtagaatggaaatgaaaaagaagaaggaatgaggtttaaaattaaaaaataagacctcaaactcaaaggacaccgttagatcttaacgaaggaatggcatttaaatgctaatgtgacatattcttggtaatataaaactaccaagataaaagtgtgttcaatacacttgagatattatgagtttatcatcctagtcatattaaaaaatcttttcgaaattaaaaatcattttttaagaaaattattatactcatattttgagcagtaaatatggttacgacacatatataggaaatcaaaagtaagtaagctcgcatgttaaaagaattagcgtgctattcaatgcgtcttaggaagtactaatataatttagaatttaagttttacctttttaaataaggataagtcaaaaatactgattgaaagagtaataagcaagtaagaccaaaggcttataccttctcgagaaacattgaaaataaagtatgaactccaaaaacttgttcattataatatgaatatagcgggaagaaaaaattaagcaagttgcaagattgaatgctttaaccacgaagcacaatagatacaattaaaggatcttgtgtgcaaaaattgtacaaaattatccaaaataatagtttaaagtaaactctactaaaagagtgttcaacaaatcaatctttttgcgaaaagcatttgcacgaagtatgctaactcatccttgttatttgcgaggagcacacatactaaatagaaggatggctcagtcaacaactattcaaacataagattaaaattagtgatagttattgtatatattatttaaatttagacaattattaatattatttccagctgttaaaataacatgaaacgtggagaatatcccgtttcatgaattgtcatttagataaagatcaaaataaataactatcatagttaatctttataaatag

SEQ ID NO: 216200 - DNA, 683 bp, Cannabis indica
ctctcttaattttgaaatctatcaaatcgtacctctaaactttgacatataacacattgtaatatttcatcttcaagcctccattgtgtactcgcacgttttttaaaaaacttcccaggaggtcacccatcctgaaattatcccaaatcaagcacgcttaattgtggaattttttcctgatgagctaccaaaaacaaaatacaccttattgatattggtagtaccaatcaatcaattgaagctctcttcaactgtatagtctcatacctaaacagtctcagaatcatcacacttgaccttctctaagcaatgtgagattggacatcttacttgatatttttctcattctaagtctccattgagcccttacatccacagaatgatgactcttatattcagcgcgttttgtcctcactcgcacgctttctagaaaacttcctaagagatcacctatcctgaaattacccctagagatataccttgttaatatatgtagtactaatcaatctacttaagtcctcttcaactgtataatctcatacctacacagtcttagaatcatcacacttgtccttccccaaacaatataaaattacacaacttacctaatattttttcttacgaatcacagaactactgactgtcacacaaattgtgaccccttaaaatttcattcacaccaa

SEQ ID NO: 216201 - DNA, 524 bp, Cannabis indica
taactatgctatctgataatttgatcgcatcatggacccagcttacggaactcaatgcatgtaattgtcaactccttgtgatttgagtataactcaatacttttgtgcatataacagtgagctgtaatctgtgcagcaaaaaattttctgagtagcataccagagagcattggatgcctttcacgtatcattcgtcttgacctccatcagaacagtgagtaattatgagttaccttcttcagtaatttttcattgattccttaaactcaaataaacacattcatagttgcataatactacaacttacgcaggaatttcatctgtcccttcatcaataactggttgctgttcccttgtggagttctacatggggtatacgctgtgacgatcatatttcatttattttttaaaacttctatcatttcacatctatggcatttatcgaatctatcaatatcaattttcagaaataatgcactgtcaacattaccagcagaaatcgggacactctctcatttagggac

SEQ ID NO: 216202 - DNA, 683 bp, Cannabis indica
gtaaacattccacgcttaattttttttgtatgtaactttcatttttcctattaatttttgaaaaatttaattagtattgaagtgtacttattttttttgagaaaagattcaactattattataaattaaaagtcatttataacaatagagaaaatagaataagaaattttacccatccaacagacgtcttcatctaattttagagtatatttttgctaattcatgtgctaatcgattagcatatgtctcctaacatgagagataataactctaaaaaaaaagaataaaagatagtgtacatttgaatttaaatctaaaaaagaagataaatctaaagatgtaattaataatgcatttgaaattcgtaaagcaccagtttcaatgtgagttttaggaattttttagttgctcgcccaattgatgctataaaaaagagcctttgcttccatctcatctgatctaaagctttcttggacaagtttggataaggcagcgataacgtgtccattatgatctcgtataactgcaccaatccctaataattttgtgtccatgttcatcgttgcatccacattcagcttcaacccatttagatcaggtggtttctaaggaacctcctcaatcggtctcgtatgttgcattgttgcagcaagcaccacaccagtaatagttggtaaccttcg

SEQ ID NO: 216203 - DNA, 871 bp, Cannabis indica
gggatagccctacttcatactttctaacgcgataaagtggttcatttgtagatgtcagtgaattgagaattacagtgtaaaaagtgacatttgcagaatcaaaggctactttcatgtgggtgtttatacatatatatgcatgtacaaataaattaaagaatgagactaatatatatatttaataggagtaaaaagcaatgcacacaaaagggatctaaagtaagtctcacccctgaaaccaagaaaacaaacgaaactaccaggaaaaatgattaactcaaaacaagaattactgtatatattgagtggaaaataactctaatttgatttaagcttcttatgtctttggtttccagtgcaaacgtgaaggtttcatccaaaagataaaagatgaagatggtgaaggatgtaatattgaagggtctcttgaagttaacaaagtggctggaaatttccatttttcccctggaaaaagctttcatcaggcaaatatgtttctgcaggatttgctagctctccaaacagatacatacaatgtatgtcgcatttagtcctgtgtctgataaattgttatttgatttactattactaattatcattatcaagtgaatctgctctttcttatactcactctaaggcgttcttgtgtttctttatatcttacatgatgcagataagtcacaagataaacaaattagcttttggtgactattttcctggcgcggtaaatccactggatgggtaataatatctttctattcaatcatctgtatttaaatttctacaaatgattagaatatctatcttgcatcattctcatactggtgtttttcgaattgcatttaacaaaaattggttacatatttcttct

SEQ ID NO: 216204 - DNA, 567 bp, Cannabis indica
ttcgggtttcggtctcggttaggtttcgaggtttggtccagttttgggtacaagttcgggtccaggtcccggtcccgttccaagatccaggtccagttccatttcaagtttcggttttggttcccgagtgtgggtctgggtctgggtctgggtatgtattcgggtccttgtttgagtttgagtttgggttcgcgttctagtctttgggttcgcgttctagtctaagtcctagatctagacactgactgcaggtcgggtccaagcatcgagtcccagatcccaggtcccgtggtgggtcgtaggtccaagtttgggtctggggtcgggtcccgaatgtcgataaaagttccgaggcccaatttcttgtcccagtttaggggcccaattctcgggtttgggtcccccatttatgttcagattctaggtcccggtctggatccaagttcatgtttccgttcaggttcaggttcgagtctcgagtcccggtctgagtccaagtcccaatttggatttcgctccaagttcaagtcccagtcccagtgtggctctgagttttgggtcccaggt

SEQ ID NO: 216205 - DNA, 634 bp, Cannabis indica
tatctcaaggactttactcctaactccatggtgggggaagaagaggaaatatggtgctggacggactgaacgagctcatccggagaattagctgattcaactgaagcgtgaagctaagttgaaaggaggtgcaagggccaacaagtattgtcaggagcccttgaatcctgaagatgaagctgaggaagatcaggtgaccccattgaagaggaagaagaaattccaggccctgcccaggccagttgaacatgcgattcgcataagggagcccatttcacctgttcggccatcccctcctgtgttcagaaaagggaaagctgttatgtctgaaataagattgctgtcaggtgatgatggactttagatcttgttcgggcagtcaccttgcatattactttgtcttgtttttgagcttcttgattttcatgccgtatgtttctgatgtctgttttctaaccacgttgttttcattctgtgcagacatgtctcggcagatgctcgaccctctgaggaagagaataggtggaagctctagcacctctcctccagccaagaagtctaagggcggtgaggggtcctctactaaggaaaagaggcctaccatggaggtcattaatctttctgaggagctgac

SEQ ID NO: 216206 - DNA, 927 bp, Cannabis indica
ccagagtaggcatccatgaaggataacaacttaaaacctaaggtggcgtccaccatttgatcaatttggggcaaagaaaaacaatcctttgggcaggccttattaaggtcagtgaagtctatgcagactcgccatgttccgtttagtttaggtaccaacactggattggctagccactctgggtaatacacgtctcgaatgaggttgttggtcattaacttatgcacctcttgctccaaggcgtcgcccttcacttggtcaagtagaggtcttttttgttgtaccggaggcatatctgggttgacatccaggtaatgggtgatcacgtgggggcttattctagtcacatccccttggcaccacgcaaagacattcgtggctgctttaacgtatctatgattttgcttctttcctccagctctagattttttcccaggcagataattttagtggagtcgaggtcgcacacgcttacttccttgatgtcctccataggttctaaagttgttttagatcccacacggggatccaactcgtcttgttctgttacaaggggttcttcatctctttgtaccatcaaaactgacagatgtgctgcaatattgtaacattgtcttgcctctccttggtttcccctcaccgttcttactctggcctcccgagtagggaacttaagtcataagtgtcgaatggaggtaatctctccaaaatcaaccaaggccggtcagccaaggatgtcattgtaggcagtgggacagtctaccacaacaaaggtgcagtacttgaaagtgttttgtggggtgtcaggttacaggatgacgggaagccttactttacccgttaggataagtgttatctcgttaaatcatgtgagctgagagctgctaagcgaaagctctctgtttgggagccctatggccgtgaagg

SEQ ID NO: 216207 - DNA, 1121 bp, Cannabis indica
agtaaaatattgttcattcaatttttcgttttaacattattttcattttattactgataatattgaaatgaaaaactcttaaaaattgaagtaggagttgggcatactcatccactttctctataattttgactttatcatttgagagagattttattttattaaaaaaggaaaattcctccttgtcgttgtagagtactctatcgtagatgtagttatattttggcacatgcatctcaaacaattttaacatttttttttatgaattattagatccaattcaattagcacatagatttgaaaatactataaagatatcattcttataaatttaatgtaactaaaaacttaaaataactaaaacaaaaatattattaattaataaaataaaacaaaatatgaaaacaaacacacaaaccaacctaagccttacaaattcaacaacaaaaaaaaaatgtaaaaggtaaaaatataatcaaaatatataacttttatttttaaatatttttattatttataaattaatataaatatttttttaatatatactaaatgtaattagattggatcagtttttaattaaattttaagattgatattaaataacagttccagtttaattagaatttaactcttaacatctaatctaatttgtaattggatatctaattttttataattagattagattggatccattcagtttatttagattagattagattagattgaatcttgtctatctctaattataataaccctactttacttttctttgattgtttgtgcaagctttaaaagtaattcggttatcttttgcagatctccatgcttatttgcttccttgcccttcttcgagtacggaggatgtctggcgtcctctctctcaggattggctgaagctgaattgtgatgttagagtggagttggacagcatgtgtgctgcggtggttgcaagggatcattttggtagggtggtctgggttattacacttaaattggagttttctgatgcactatgtagggaagtggcagcttgctgtttggccctggagacggctaaggctcgaggctcaaagtttatcgtggttgaaagtaattcaagggtagtgatcaatgct

SEQ ID NO: 216208 - DNA, 503 bp, Cannabis indica
cagtaactttgttgccaaatatgatgtgagaaaaaaatatattttaagagattttgagactttgaagttgtttatattgggatgcttttaagagactacttattttagaagatgaaaagaaaaaaaaaaaaaatcaagttacttttttttcttttatattgtcacatggccttgatggcactaccttaaatatttcttctataatcatatgggaatattttatttagaatttttgtcattcgaattttgatatgtacaaataatacttttttaattttttagatcgttaaaagtaactttcaaattattaaaatttttgtataattttactaatggaagtttgaagtgaatgaaagtttagggacatgatttggtatatgttaaaatttaggggcaagatttagtaaatgttaaaatttggaggagacaatttagtacatggacaattgttacattagtaaatttgaatggaatttgataaaaatcttcaaaatcaataatct

SEQ ID NO: 216209 - DNA, 640 bp, Cannabis indica
aaaaaactatattgagttatcataattaagtatactaaattaataatagcattataaatatttatatttataataatataataataataataaccatatatatatactgtttataaaactataaaatttgtaaatatgtttgtatatatattttttaattttttattaaattttaggtaatatatcaaaatataaatattgacttatatattcatatatttaattttatacatttattatttttaagaaaatcaattttctttttttatgactttggaggagggagatttgaacttctttgtgaaaagtgtctacgcctatgatcacatttttttagaaaaccaattgaatataatgaatatgttaaaattgtaaaaaattatgtttatttctatgtaatgtcaacatgaatggtttatttataaaacgtttataaaattgtacagttttatttttttaaaaaaattagcagatttacttttctttagtgaaaattgctctttgattatgtataataaacattaggattgaggaaaaggtggacaaacctattgtgaagataaacattctcaactattaataaataaaataaaataaaataaaaattctacccactgtctttttaacattttcattctag

SEQ ID NO: 216210 - DNA, 804 bp, Cannabis indica
gtgtgttaatggcgaaagaattcagagtgtgtgtgaaaaagatagagaaggagaaagattaattaagagcatgtgagttttgtttcaaaattaagaaagtcgttttctattgttgtttggttaaagagaaaattgtatgcattcatacaagatagggtactccttttatagacctccccgacctaattatcttatatttaatctcttaattatttttagatttttatttaatttaggtgtgttcccattttcctttttcagctgaataatcgaatatttcagcccaggtcgatataaaactattgtcattttttttttctaaacttatacttttgccaagtataaaataagtacacatataattttttacttattttttactatttagaaaattatttttattaagataagtacttaacgaaatattgtacttttcgagctgtttgaatatcataaaaaatgtgattaaattagaaattacataagttattttaattttaaaagctaaaaataagttgttttggtccattaatatattaatataataaaatgaaattgcctattattttttaaggaaaagaattcactggtataggaatttttttttatttaactaacaaaaagttaaagaatttgcatgtgtagaagtggattttgttttttttttttttttgtttaatatctaaattactaaagaccccattatttggtgaggaaaatccttgatacaattatttgttaacttcattgtgcctaatttggttgcttttgcttgtcatattaaaattatattatgagaataat

SEQ ID NO: 216211 - DNA, 552 bp, Cannabis indica
agacaatttaatgtgttgatatatttaaagagtagtaatttgagaatgaaaatttcttaaaacagcaaaattaatataaaagtaatcataaatttattgacagttttaatctcgatccattagaatttgagggtcccacttacacttaaataacaaccacactaaccataataacatccaagagtgctttaattggtgtatcactattagtgattggaagggcctttttccatatgccactcttactcatacgaaattttttttggctctaattatagtcataaaattccatcttacccccaaccccaacctctctttgtcccctaaaccataataacataaaagtaatagggattccgagcttcatccttgtatccacgagagacctgatcttgaacaggagcttgattattgccaggttgatcgcttgaatgctgaccttcttctataactcctccactttgcatttgaaccatggtggaaagtgatgaacagaaaagaaacagagtagaaaagaaattccagaagaagaagaagaagaagaagaagaag

SEQ ID NO: 216212 - DNA, 671 bp, Cannabis indica
tgtgtagagtttgagagatgtgaatgtataggaaaaaaggcgcgagtggtgatttattttcagattcaggtgattcttaaatagatttttttacatatataaaaaatttggtatataatgtatttagataagtttacataatttggttattaataaaattttataatttattaaaaataaatgtttgcataatttcattgtagtaaaaaaaattgactacaaaaatctattttacaattttgcatgctaataatatcattgtagttttttcaatagccaatttggcatctatttccaaatccaaactacttgattatatcataattccttttaggtaaaaaaaacatgtttaaaagtgtgcatatgcacccctattttgtttcattgaaagaactttttttacttaattttttttatagttaagtacatgttgtggttatttaaaatattttataaaattttaaaaaattataaaaaatttaacatgctcaaaatagtatttaaactacttcatacattcgtgattcttttattttaacggactgtttgttcgctaatttttttattataaattattttgaatatcttaaaaaaaatttacaagatatcttaaataaatataatataaattctcctcgatttcgaaacgtacattgattatataatttttt

SEQ ID NO: 216213 - DNA, 982 bp, Cannabis indica
agggtttcgaagcaagaaggaaaaggatagctgctacagagcattaacccaactcgagcactttgaaactatcgagagtttaactttatgatagatttaaacaaacatttagtttaggaaaaatgaaactttattatatatcttattaaatttatgataacactattaaattaaatcctcataacttaaattaatagaatataaatttgtcacgtgtacacttgtgtacacgtggacagttcactgtgtcacttaactgaaattttttaacgaaaaggtaatgagcaaaacggaacctcggttcagtaggcttactgccaaagtttttagtttttgtgtttaagtgttaaaaaagataaagtttaggtacttttgccgccaatatcccttgaaataaatagagaaaattctgttcatcattttatcttctttctttttctatttctttctatatattatattattttataatatattattggcaatgagtctctgcccaagataaatattatttgttaaattttttgaattatttcgaagtcatgatacattaattaaataaatatttatatatgtactcatatgtttgaaataatttcaagaattatttttctttttctttgttatttatatattatatatgtgtgtatgagttcgtttggtacgccgtattaggtcacattgtattgtattgtattaaattgagttatatgtcatatttttatgtaatatactatgttcaattttaatttatactaaaatattatatatttatatgtctataaaagttaataccacatataactttactacatatactatacaatattataattttaccttgtaattataaaaaaaaaactaatatattctattattattttcttaaaaaactaagaaaagtaataagatattctaaaaataaaagtaattaggttaaagttaaaatttagtaatataattatatatatttttattaata

SEQ ID NO: 216214 - DNA, 535 bp, Cannabis indica
attgtgtattaaatttaacataagattaataatgataggttttaatacaaattttttaattacaatattttactaattatttcttaaatatttttattaataatcacaataatattttactttttatactaatttttattttaaaatactattatgtattggagtataattacagtaaaaaaatataatatataaatatattaatcaaaattgacactatttagatctttattggatattttctaagcaaaaaaaaaaaaaaaactttaatgtatttttcacgtatttatctttttcttttttaaataaaaaaatcatctttattaataattaaactctgttatcaaactaggtaaaaaattagttggaacagactccaaattgaaacaacgactaaggtataaaataaaagatctagcgtaactataagtcaccctattagttgatcgctttatgaaaaaactgaaacatttctcaaatcttaaagtaaagatgtatgatcttgaataacacaaccaaataaagaaatcataat

SEQ ID NO: 216215 - DNA, 1117 bp, Cannabis indica
gtcttagctcaaggctggcctgtcctttctccttaatgtggctcattgtgcaaatatttctaagtcacctctatagaagtatttgttatgtgagaagtgttgaggtgtgagagtatttaaaacttggtatattttttttatgtaagagtgtggtgggtcccacttttaatgggtaatatgaaaacctttccatacttgagttttatattctttcacatgtgattcacttgctcgcaccttgtgcaaaccataacttatataatggcatgggtaatatgaaaacatttctacagtcgagttttacattctcctacatgtgatttccctatggaccatgagattactgtttacaacattcccagtatgctgcagctatttcggaaatgcctgctttgtcttttgacaatgatcaggtgaaggtattgtttgatggctcctttagtcgtggtctaggtgctgctattgtggttgtggtttttatgcgtgggtgtgctatcctaggcctccaaactagtgttgtaaatatgggtcagactttatttgacacgacacaaaatcggtaagagcttgaacagcatgagcacgaccagataatgaaaaaatacggacttaggcacgacacagcatgatgctacatattggcatgatatgtcacgaaaaatatgtacttaagcatgacacgacactacaagtatcagtgaaacagcatgtaagcatgaataaactaacctgaaatgcacgacatgagacaagtttaaaaagcacgacacgactcatcaaacaaccttataatttaataatattagatgtgtaaataatttaaaataataataaaatttaaatataacattaaatattataaatctataatcaaaattattaaaaaatatgaagtaaactatgaattcgaacccaaaacaagctgactcatttaacaaaaatagaccagtacgagcaaagcatgatacaaaaatactgggcctagggttgtgccagatttatcctttaaaaaaagggaaatttacaccacttactgttttttcctattttattttaattttactgctataaggaaaatattacatttttactgtattttttatactatgtgtattgt

SEQ ID NO: 216216 - DNA, 850 bp, Cannabis indica
gtgaagcttgtgttttggggaaacaacgtaagctgaagttcactccggcaaggcacacaaatatgtgcatgttgatactttggggaccacacaagatgtctactcactctgataagcaatactttctttcaatagttgatgattataatcggtgtgtttggacttacttagttaactaccaaaaatgagtgcctagaacagtttagaaattggaaaactcaggtggaaaaccaaactgaccttaaaattaagaaccttaggactgataatgggttggagtttgttaactctgaatttgacaagatgtgtcaagaatttggaatcactaggcatagaaccataatgaagaccccaaaagaatgaaccaaatcttgttgaacaaagttagatgtttatagttcagtttcggactagaaaaccattttgggggaagccttagcaaccgcaacttaccttattaacaggagcctgaatagaattataaaccttaagacaccgtatgaaatgtggtacaaccgaacccccagcctaacgcatttaagaatatttagttgtacaacatatgtataccaatctattaacaagctggaacctaggtccgtgaagggaaccttcctaggttatgccttaggaaccaaggggcatagaatatatatttccaggaagggtaaactaaaggttgtgattgctaaaaatattgttttcaatgagttagaatatcctcacttgaactctaggaaggatagtgtgtctctgtgtgttacagaataggaaacaaagacaccccaagtgtggaagtggagtacagaacgaagctcccaaaagaaggttcacatgtggaagatagtgt

SEQ ID NO: 216217 - DNA, 528 bp, Cannabis indica
tactcattattttttcatattatattctccctcatcactctctctcatcatttctcacattattttctctctcatcactttctctctcctccttctctctcatcgctttctcactcattatttttctctttcattgctttctctcttctcattttctgttcactttctctctcattattttctatttcatcaaggtccgggtctaagtccagggccgggttctgctttatatcagaatcttaaagtattgaagtatttttcaaaaactaaaataaataaaataaaaataaaaattattttcagaaaatattaaccaaacgtgacttgtattttgaaaacttcaaaagctattttttgttctcatttttagaaatattttttttgaaaacgataaaacgaaaaacaatgacaaacatgctttataactcgttcatatgcatattcccttcgtttatttccttaatcttctattttggtcactaattaaggcatctgataacaagttagtgattttacaacatcttatat

SEQ ID NO: 216218 - DNA, 709 bp, Cannabis indica
tgcccaccagccccccattgagatagattttgaaggttgttatcgtaatacactaggagacccaattgcaaaacttcataggtgtaccataacaagacagcacttggttaatggaatcccaattcagcttatcgtaggctttcatgaggtcaacttttatggaaaaataacctactttgcctcttttccagttgaatgaatggataatctcctacactatcacattgttgtcttgaatattccttcccgacacaaaagcgacttaagtggggcaaataagattaggcaatataggcttgattctatttgcaatgatcttagaaatgaccttgtacataacattacaaagagaaattggcctgaaatggttggttctttgaaggttctagacttttgggataagcacaatattcgtagccttgacacctttgtgcattttgccagtcctaaagaaatcggaaaccgcttcacagaattcatcgtccactgactaccaatagttcttaaagaacaaaatagacataccatcaggaccgggggctttatgattgttcatggcaaagagagtaattagcatttttgtcttatggatttttgacactaactaattatgctcactattacataattatgctgtaatatcccagaaaataaataatatttaaatagacatattttattaaatatgtaattactttggaaacgaagt

SEQ ID NO: 216219 - DNA, 771 bp, Cannabis indica
actacaagtctacaatattctttatagcttaatattattgtgcttaggaatctcaatcaggtagggctggtattactttgacccgacccgaaataatatgtatcgggccgtgagcctgataaaagccctaatcattcgggtcaaagtcgtcctgttgggctcccgagggcctaacctggcccgcaaaaataatccaaattgttaatcctaattgtgttgggttgtgagaaaaaatagttgtagcaaaattataaaaaaaaaaaagaactaattgaatatttagtaaattttaaattttaaaatgctgtgaaatgttaagattctattataataacaataatattataatctagttcattataattataattatgaaaaaattatattacataaattttttattttatatataagtttttaattattttctctataaatttgtatgcatttggtaaaagtaattaataatatttttaaattatacttttattacttgtaagaaaagttgtagtttataaaaaacggtagcttgatgtagtttgttaatgataaaaataaaaatataaaataatttttaaataactataacatacacgatcattaaaaaaaaactcatgattaccaaactagatagatatctattggaacacacttttagaggagtgtactttcctattagtatatagaagtaaaatttatatgagttttaaaattttggttagttagcaatttttacccctaaaccttcgagctttacctatttcggatgat

SEQ ID NO: 216220 - DNA, 636 bp, Cannabis indica
acaacagttattattgtttgtttttttttatgattaacatgcttaaacatcgaaaattgggtccccatgcattgtatttagtttaatgcatggtgttaatcaataatcatggtttttccgtgagtagttacatgttagaatattctttccaagatatttttttttttttttcaattttttgtggtatgggccagctaagtttgaccaaacccagttaagcccatattagcttttatactgcaaaactaaaaacgcaccgtttaggttgacgttttcaatgaatagtaaatatattgattctttttatatatgtaagatatagagagagagagctttttcagctgagaaagaagatgaggaaggaaacagtagcagcgactaaggcttgagacagttttttcaaagttaaggctaagttttcctgacaaatgaaactcaacgttttgaggatgttgatattctcttgttgtaaaggtaaatgtagcccacagtaaaatgaaaacttcatccaaaaaaattaaaattacataccaaacattggttagacttagtattcccgttcctgagtaaggaaagctgtgtaccaaacagccccttaatatttctgcttttcgaggaaaatgtgttttgattagg

SEQ ID NO: 216221 - DNA, 793 bp, Cannabis indica
agtacacccagtaatgctagtaggctatccatgatggactcatctactagtttgcggatataaaaaaaaagaggcgaggaaatgaaacatgcataacattcatagtgcacaaccgaaaaattttacaacgaaggaacaaccattcatgtagctaaatggaggaagcaacaatgacaattacacactaaaaatttttactaagtgtgaaaagcaaaaacaagcacatggaagcacatacataagaccccaagaggtaagcaaaaaacagtcgtctccaagtcatgaagctgcactacgattgtcacggagaatcactctccaatcgccaatgaaggggtctcggagtagtacaccccgaccccccatggggtggtctcagggagactacaccccgaccccacaatggtaggtcacgggggtggtgtaacccccaacctcggtcaaaaacgaagagagaggaggcatgcttcgaactcggggtgtacctcgagacccccaaatttgggggcaaaacttccatctcggggtgtacctccaccccaactcggggtgacaacgaacgaacgagacaagccccatctcaaggtatggtagcctcggggtgtgtcctaaaataaataaaataataaagggggtctcgatctcgaggtgtatcccggacccccaagtcaaggcctcatgtcggggtgagccaaagcttggtctcgggtaaccactaagaccctcttcaaagtatactcgttgtgccaacttgaaaaataggctattaatttgggtttaggggatttttgtg

SEQ ID NO: 216222 - DNA, 554 bp, Cannabis indica
gatccaaaaaaaaaagaaaaaattcgtccatcttcctcaatcgccttcctccatcatctaaccacgtcttttctaatttttttcttcttttttctattctgtaaatggtcattactcggtcttcatcttctccatcaccattgctgaaaaaactttcaaaaataggtgttaaatttcttgctaacaaatctaaaggtaaacaacctgttgttgaaggtgatgattcatactttgctctgcctaccaaaaaaagtgattgtcagcctgttaagaaaaaattgaaggttaatgttgctgaaaatatttctctccctgaagttaagaaagggaagaaccaagctgatgagagttcgaagatttctttctagtttctttatcgttttgccctaacattgccatatcttttcttattactactttctttaagagacaataatcttatttatatttaaatatctctaaggatgatttaaggttttttttttttttttttttttttttattttttaacaaagtaagttatttatttttaattttttaatttagatagtatt

SEQ ID NO: 216223 - DNA, 836 bp, Cannabis indica
ataattaaaaaatgtatattcattaatgatcaataacaaactttaatataaaaattatattattgtgtattaaatttgtacaatattatatcttatgccaaatttaacatatcttttaacattggctaaatttagcacactattagagaactaatttcttaaaagagtctattacaaaaaaaaaaaatcttaaaagttttaaaatatagcactacactactattttaatactctattagagatgttctaaagtttttatttatatatcaaacacctaatccacaattgaaataatgtacaaacactaatagtaatagagacactttaaataaaaaaaagagtttttttttttgagaaaaataaaaaaaaaagagttatgctatctataaatataatagtaggtttatttgatgttaagttgcaaacaaacctttctcattcatgatttatatattaattctacacatatcaagatccaagattgcctatcctatacatcaactcaccattattattttttgatacaaaaataatttttaaaatacaaaatatacatcatatattctttctctcaccaaaatttatatcatatattcaaattaacaccaaactccaatttaaaatttgacctacaagtacaatataacaattaaacaattggtcaaacttcatgctacaaataaatcaatgatataaaaaaaattataatttaataataacttgacttttttttcttctaaaatcttattatattatttccatttattttgtgttaatgtcatcatttcagaaatttgtttagtttcttttttccttcaaaaaacatgaaaaaaaaa

SEQ ID NO: 216224 - DNA, 726 bp, Cannabis indica
ctctctctctctgtgtcacactgtcaccgtttccctcactaccggcggcgccgactcactcgccgtctccgccaccgtctttctcagttcaaggttcatccacttaaaagacttaaactcagctgttcggcaatccaatccagctcaacgtcacaaccattttttacttttatttttagtgagagaaagaagagagagagagagagagaatggccactgctggtgctgccatgtgcttcacactgagcaagccctcaactggcctcttcccaaactcattctcttcttcctccaactcttcaaggtttagggtttttactgtcaaatgctctgctgacatttccgcccctggtactactcttttttttttttctcaaaatgttttgatgaagttgaaaaatcatggaacttaatttgctactgtgatgatgactaaattttaattatgtaaattttgcatcattgtactaaaattatatcaccaattagttatctattctccatatcaattctataaaatttagaaaacaaatttggtgtgataggaagagttcaatctctactcttgttattataagtagaataattagtttttttagtccctgtacttatgacactatactatgatgccccttaatttataagtgtagttaaaaataccccctaaaatatatcagttggaatagtataattcttctatctaattctgttaaaattagactaaag

SEQ ID NO: 216225 - DNA, 534 bp, Cannabis indica
ctaccccctctctctctctgtgtcacactgtcaccgtttccctcactaccggcggcgccgactcactcgccgtctccgccaccgtctttctcagttcaaggttcatccacttaaaagacttaaactcagctgttcggcaatccaatccagctcaacgtcacaaccattttttacttttatttttagtgagagaaagaagagagagagagagagaatggccactgctggtgctgccatgtgcttcacactgagcaagccctcaactggcctcttcccaaactcattctcttcttcctccaattcttcaaggtttagggtttttactgtcaaatgctctgctgacatttccgcccctggtactactctttttttttttcctcaaaatgttttgatgaagttgaaaaatcatggaacttaatttgctactgtgatgatgactaaattttaattatgtaaattttgcatcattgtactaaaatcatatcaccaattagttatctattctccatatcaattctataaaatttagaaaac

SEQ ID NO: 216226 - DNA, 1074 bp, Cannabis indica
cacatacaaacttccaaaatatacccaattaagccacaataatataattcaagcattaaaccatcatccatcctctagaaataaaaaaaatatcattattgagctaagtttgagtttataaactcaaattcaactcaaacccaactagcaaaaactaacaaaatcatcaacaacccactccaaacaagctctcaaaacgattcccaaacaccccagatcctaacagaagaaaaaatacaaattcttaacccaaacccaaccaaagctttgaaatttaaagagataaagtaattagggttacctttgaactttctcgtgaataaacacttgaatttttaattgaaaaactcttgaatttggtttgaaaaccttaaaatttctttggttttgctttgggttccttggggttggatcttgccaagacaaagagagagatgtgagatgatgtgtttgatttcttggtgtgtaatgtttatctctaatatttattttattctaactttaatttcagtttataacactagagtaaactctagaattcccacttgaataattaatataaatctaataaaaaattatcaatttatcatttatttactacttaagtaaacttaatgcctagtagtaaaatggttaaaaattattaccttgcatagacttgacatttcaaatgtctaaaaacttgctctactaattctttgatactccatcgtatcactgtgacactaatagccaaatcgtcacattctactcttatcgagcattaatcatgaaaaattataaaattcacacatagcatgcatgatacatctaaaatttcacataatctcgatgattgaaaaattatctctctaatgtctatttcagacaacaagtcttatttttctactaatgaacatataatcaaaaaaataataattaaatctctaattttctgctaagtctcatgtttaaactatgtagtcattacatagtaagttcgagcgggccaattgcctataatgtcgagaaccccgaagttctcctcgactctactattcctttggctgctcacactactacaaatattagaat

SEQ ID NO: 216227 - DNA, 1308 bp, Cannabis indica
tagaataataaaatcggaactgtgggagaaaagtaataatgtccctatatttcaatttttttttttcatagggtgcgatctataatattttttttaattaggttttgtattgttttaaataaaaaagtaaaaatatttttagaaaatatattctataaaactgtttttactttttaatttaaaaaaataaaaatcaaaattttaaaaataaaaaaagtcaccttcaaaaaaatttttaaacatttttttttaattataatttatttttattttcttttcatcaatattttagaacccgactccgaccccgatcccgtaccccaaaacccgaaccccaacttgaccccgaacccgacacacgaccccaaccttggccccagactgcagatccccgatccttgtccctggaccctttacccaaattcgttaccagacccaaactcaaacccgaacttgaatttgaacccggacccagtctcggtccccgaccccggccccagcctcagaccacggacctagacctcagcctcagccccggaacccgaaccccgaacctagaccttggaccccaaaccccgaaccccagacctcagacctcgaatcgtgaacccaaactcaaatcccaaacttcgaaccctaaacctaatttaaataaaaacaaaaaataaatttacagaatattacacttttatattttatttttaaaattaaaaaataaaaaactaacaaacaccacttatatatttaatatatggagaggaattgtcggttgtacatttaataataaatatattaaatatttataaatagtgaagtgatcatgtagcccctaacgcttcacgacttttcattagagtaaaacattaaaaggtaccagtggtacttagtaccctcctatgtgttaatatcgatattggtctaattaaatattaggtcttgtatagtttattatatagcttttaaaggagtatcgcgctagccaatcgcaacgcgacatgttgaaaaagtgctaggcaccactggtacctaatagcaatacacttttacattattattattattattattattattattattattattattattattattattattattattattattattaatgtatatgatgatctctcaataaatgcaaaatattacaaaatgtaaaagtggttttccgttttacagctcactatatatatacatttggaaaaagttcttaaaatttaaaaggggacataaacatagtacaaaaaatttaatatattaccacatattactgtagtacattcttttataaataaattt

SEQ ID NO: 216228 - DNA, 688 bp, Cannabis indica
aattcctctgcattatccttaatccttaacaaagacctccacagcttgatctggagacgtggaaatttggcaaacatttaaaagctcattcaactcaacaatgagctctaaatcggcagtcaaagtaggggtagggtgatggaagagtgaacattaccaatagtagtgcagagttgtgacacatgaaacacaagatgtatggcagccgaaaaaagaaggtcaaaacgataagccacattaccaatacgcttcagaatcgaaaaagaatcatagtaacttgctgccagcttctcgttctttcaagtggcttaagattttcggtagtaaggtcctaatttgacaaagaccttatccttgatagcaaactccacctgcccgcgagaaccgtcaaccatctccttcatcttttactgagtacgcaagagatgcatcttcaaatcatcaaggaagaagtccagcacttcagcctctgatcaacaaccaatatcgaggtagaacccattaaataacaaaccaaggaaggtgggtcatgcccatacaaaactttgaagggtgttcaacctaaggaggaatggaaagtggtgttttaccaatattccgtacaagccagccagttggcccatcctatgggatagtttgaagaaaaacaatatagatgggtcttaaggcaatggttgacaaccttagt

SEQ ID NO: 216229 - DNA, 531 bp, Cannabis indica
aagacccctcatctgaaccccaattgtcgccggtcacagcactaccaccgccggtaatgtctgaaactccaatctctgattccacaaacacctcctcaaagccaacactacctgccgcaaacctccaatcccttcccaaaatcttcgtccccagttaactcacacaaccagaaaatgagagagagatacctggttcagtgaagtgaagaggaagggaacaactgaagtggagaacggctagggctttaccaagctaagttttggagagatgatgattttccaagctaaataaaacacatcattttcggagatgagatgttaattttcttgctatgtaaaggtaagggtaacccacggtaaactcaaaaccccactcaaaaaaattaaaaatacataccaaacataggctatacttagttttcccattcccaagtaagaaaaactgtataccaaacagccccacaggacaacaatattttttactcagcaaaccagcgatgaacattatcaaacaactgcttctttttcccc

SEQ ID NO: 216230 - DNA, 699 bp, Cannabis indica
atattaaaaaaataattataaatattttaaaaaaaaattaaaaaatcaaattttttttaataatttgtattttaaaaaattaggtttaaatatttaaaaaatagaaaaaataattaatttttttttttcttcttcttctttttttttctttctttttcttcttcatctttcttctgcttcttcttcttctgcgtttttttttccagaaagcaaaccccccaaaattgaacaccaaccgtccagcccaagccgtccatccccaactgtccaaccccaaccgtccgctcttcttcttcatttttttttccagaaattaaacccccccaaaacggggaaaacccagaaatcagatctgggttgactgagcttgaagctctctcctgttgacggtgtcgacgtttacagaggagagacaaagaaatcaaacaccccacgtcgtcctcgccgtggtgtcccgcttcggtgtgcgggaagtcgtcggacctcttcttattgtgcatgaaggtgattgccgtggtgaaaagctgcttcggcttgtcgatgagctgcgacttgtacagggacatcatggggtactgctgctgtaacgaagccatgtgatgagattttgagttttgggtcagcttcgatgactttcgcttcttggaatttgagagtactttcaactgacaaactattgttggtgaacgaagttgaggt

SEQ ID NO: 216231 - DNA, 680 bp, Cannabis indica
aaacgctctacgtcttaagttctaagcttgaggtccaagctcaatgtgctaagtctaaaaccctggctctccctctctctcttctacatgcctcaaccaatgtagaagagactaagtctctctcatctcttctacttgagatttgcttctcgattctcaccattttgatcttaagagagccaattcataatcttcaaaagttatgatctgagtggtattatatctggtatcaatacaactaaaatgggagtaggtcattacccgctaactaagggggccaaacctctataaaaatactacgtctcttcgatttacttatttttattgtgtacacgtggtgatatcagtcataaatatgactttactgtcggttggccaaatttgagatcaacaatattgtgctttcatttagagcgttgtcgattgatttgatctaccaccatgtttttaataagaagaactccggctacaactccagcctcattgggttttcctcaagaccccatgactccaaattcggatgttcgtgttctagccacaactagaatctccacaaatctgacaaatgtgcccaaccctgcctgctcgacaggcataacaaacttgaccaatacaactggtcaagtcgacactaccaactggttggttcctaatgactagcctatgtcgcccgaacggta

SEQ ID NO: 216232 - DNA, 501 bp, Cannabis indica
ctagcttttctttgcccttagctacaccgcagagcaccgtgagtcataaactcagcaagaaaaataataaaagaaatacatgtaatcattaattatccatcttactatcataaaataataaaacaatatatgttccaaagagtatgtagtataatcgatcgtatacgtggcgataagaagtaatcatatattgctttgcctaattaggcaagcccgtgtcataacctgacaccatacatcatttgacctcatcacctaattaggtgagctcgtgcaacaaactggtaccattgtatcgcatcgcctaatcagaagagcatgtgccctaatttagcaccaatgttgtaacaccctgatacttaggcgctacagtgattttctaattaacgtagcacattttctaatcaaaggatttttcttgaaaattttgctaaattataacttttgatttaaattattaaacttttatatacttatctacataaattgggatctcgtatt

SEQ ID NO: 216233 - DNA, 227 bp, Cannabis indica
tttgtgtatttgtgaaataatccttattttaaagggtaggcttgacacggccagtaggcccgatattttagtgtcgtgctcggattcataccgtgattttcttgtgccgacccgtatttttaaaacaggctagctcgttttcatatcttgacttaaattcatgcttaccttatttttacaattaccaaattatatgaatatttaaaagttttagttatatttatata

SEQ ID NO: 216234 - DNA, 610 bp, Cannabis indica
aaatgcgttctatcaccagtactggtgaatatttaaaattttagaaatagaaaataaaagtgtattctgtaaatttcatttttattttcatttgttgattttatttaagttgggtttgggtctgaagccgtgatcggggggtcgggtcaggtcgagagtcggggccaggggtccgggtccgggtccgggttccaaggtctaggttagagtcagagtcgaaaatattgattaagaaaaaaaattatttaaaaaaatttagaaagtaaatttttttgtttttttcaaaatttttaaaaattttaattctcaactaaaaaattagaaaagtgaaaacagttttatagagcatgattttagaaaatattttcactttcagtatggaaaatattccaactgatttgttacctatgttggtgacagaatttgaaggttaataaaagtttaattttcctttcaaaaaaataaaaataaaaaattgatcaaaaaagtgttaccaaacgcaccttatatttaataaactaataaggtacaataaagttaataaaaattttaaaatggtactaatcagtatatatttgagatacattttttgtttcctccaaaatttatt

SEQ ID NO: 216235 - DNA, 524 bp, Cannabis indica
aaaaaaaacctttagattgataaaaggatggataaaagcgtggacggcaggattcgaacctgcgcgggcaaagcccacatgatttctagtcatgcccgataaccactccggcacgtccacctttgttgaacatgtttagttgacaatatatatacaaaaattatcaccaattattactattaatatttaactaaatataataaaatcatgattttgtttgtattgttttatatttttttgtggaaccaagattaataagagtatcatatcatgtatgcataggaccacgtctatgtttttcatgtcgtgtagcttttagcaatttttactcattttcctatacaattaaataaaaagcctaagtaattaacagctaatacatattcaacaaatgtcactatgtatagatacttgcaaaaataaaaattcattgttcttctcattatagttctttgcaatccatattgtatagtacttgttttaggaatagagtcaatgacaaaaaaacataatatatatatata

SEQ ID NO: 216236 - DNA, 532 bp, Cannabis indica
gtaatcataatgttttaatttgataaaactgcaattgttaaaatatgtaaatattttttgtttatagattttaaagggcatatttgacttttttattttttattaataaaattaaaattaaaataaaataagttaggaaagagaaatatattccctataaaaatgggggagaacacttctatttgttttgtccctaatttgttgtgtgggccttatactttctttctttctaaaatttagtaaatatttatatgagaattaatatcataccattgattctcattctctttaagtaaacatgatataaatagggttatttgcggcaaaacctcctaaagtggacaggtttttgcaactaaccccctaatctaaaattttagtggtaaaactacctaaaccactagtccgttagcagttagccatttccatccatttttggctgttaactgccatggtggaatgtctacgtggacccagtgtacacgtggcacaatttaattgggccacatttaccatccatgatcgatcaaca

SEQ ID NO: 216237 - DNA, 654 bp, Cannabis indica
agtcgaaaaaaaagtataaactcgttaaataaatgattatagagatattcataactcgtttgacaatgaagcataagcgagataaggatagaaaaactataaaacctatatcggacagacacatacctgcctcgaaatacataggcctaagaagatctcatttatttgcaagaataaatacaattatgcaatgcaacctcagataatgaataagcgtgacattcacctaaatattcaaaaggaacttggcgagacgaatcatctgctaacacttagcattttttccacattataaaagacaaggacaacaacttggagatatgcgagatgctattgtccaaatcaacattgaccatcaacaagccaagcgagatgttattgtccaaatcagtactaaccattgaaaggataagaataacaagtaattgtgcagttttaaattgctatcaaacacgtgatctatatgaaacgtgggaattaaccacgtttcattaaactattattatttaaattaatgtaaataactgtcaacctatattcctataaataggggcagattccacagaaaaagggatggagaatttgaataaaaaaataaatacgatcaattgtatattgtattgaatactcagaaaatatcttgaataagataga

SEQ ID NO: 216238 - DNA, 368 bp, Cannabis indica
taatggaccaactaattaaactattcatataaatatatatatagagtagagatagagatatatataatatgattcaatataaatatataaattaaagtatatacatagagctcccaacaacaacaacaccagctcttagggagataaatcacaaagaatactatgactctatgctttgtaattgtagaaaaaattacaatggttgataaaaagttgtgaccaatgtgccgaataagggcgaacataatatggaagtggaatcatttgtaggagacacgtcggttggagacccaacggtgacgatcatcttcatcccccgttcacagtggtcatcaacggtacaaaggaagaagtacgaaccatttttt

SEQ ID NO: 216239 - DNA, 611 bp, Cannabis indica
ttcgaaccaatccaaacgcttctcttttatttcggccaacaaatgtaggaagaccgaggtactttgagtggttttcagtgaatgtgactccaattgatgatgctaaccgctgaccctccgcttgagaaattttcctaccaacacaaagattggatttagagaaattaatacattggccagacaaatcagaatacttctgaaggacctccgtgaaagctctcccttcctctactgtggcatccataaaaatcaagcagtcatcggcaaataacaggtgtgtcaatcttttttctaactgcccgaatcggagcccatggatcttgttagcacggctggcttcgttgattaaacaggacagaccttcggagcaaatgagaaacagaaatggagatagagggtccccttgtcttagccctctttccggaatgatgtgaccccgagcctcttcgttgagtaaaccgagaaggttaccgacttcacacaactcattacttgggctatccaacgatcgtcgtatcccaacgcttctcatcatgccttctaagaatttccaatcaaactcggtcatatgctttagtacatatctagtttggagagtcatcttctttccc

SEQ ID NO: 216240 - DNA, 537 bp, Cannabis indica
  modified_base (503)..(503): a, c, t, g, unknown or other
aaaagtctaacattttgaccatgctaccgatatgtggcaagacttagctgaaaggtttaatgagggcaatggaccccatattttccagctccgaacccagcttactcgtctccaacaaggtgatcattctgtcacctcttacttcacataacttaaatccctatgggatgaactgaaagaatttcagcctaacactacatgttcttgtggtgcaatgaagcaatttattgattactataatcaaaaccaggtcttgcaatttctcactggtttaaacgaatcgtatgcttcggttcaagcccagatcttgttaaatgaacctataccgaatctatctagggtctttgctatgatcgttcaagagaacgtcaacgcacctcggatctttagacacccaccccttgcctcttcggttcgtcctcctcctgataatcctccaagagctgaaaaaccccatccgtcttgttctcattgcggcaagccaggccatctagtggataagngttttttcatccacggttttccacctggttatgg

SEQ ID NO: 216241 - DNA, 894 bp, Cannabis indica
acaacctctatgtgtttcagaatttatagttatttacgttgtatttatttaagatattctgtaaaattttagtgatttataaaaattaacatgccaaaaacaggattcaaacaatctgttacacgcaagacttttttagtttttaagcgtatgaaatagactgtttggaaccatattttcggtgtgttaaatttttttgaaatttcttaaaattttgtaggatgtcctaaataattacaacgtagacaaacataaaaaaattggactaattttttttatccaaatgtcaaaaagataaaagatgtattggtagattccttttagggttgcctttttaaatttttttttatgtatattatatataccaaaatatgtattcacatgttttatacactacatgttctgtcactttaatgggtcatatataaataaatatataaattaatatattttatatataaataaaaacaaaccaataaatgtggagaatattaattaacaaataattaagctttaatataatattttttaaggttaatttctccaggttaaaaaacttaaaaagatcgagtatgagaaaattattatttatgaacgacattagtctaaaagatataatgtcgttcgaaaaaggttaaatgaaaataataataatccaacaatattaggaacgacttggtaatatttttactaatactcttatgttgtcgtttctaaaattcatatttgttgtagtgtggtttgggtggatttcttgaggaatggctgatggcgggggttcttgatctggtggctccttggctaggttttcatgggtcatggtggttattttcgggtttctaatggtcaaagagggttgggtacgattggggtatcttagataaggaagctttg

SEQ ID NO: 216242 - DNA, 568 bp, Cannabis indica
cttaataagcttcaaattctcatccttcaatttggcaataagttgcttttgctcgatgccaatcattaatattaagctagtaacttgactcttgctctcttcactcactgcaagagctttctccatttcattcacctttgctttcgaattgggctctactctcattttgcttcatctaaatcaaataaaggaccaaaataagtgatatatactattatgtcattaattgtataattaaaataaacactttttagagattaataagcaaacaaaaaaattactatcttatctcaagctcaccttttgtttagattccatttcttctaattatgataaatttaacataacaaacacatcatatataagtccaacaagcacataatattgcatgctcattcatgggtgatcaagctttattacaacattacaatatttttgatttagtgtcgtttcaaacaagagagataagatgattaattaatagctacaatacaagaaagccaaaaccttcgttttcagaaaataataacaaaaaaagaagagaaaaaggctaacctgaattcgtaac

SEQ ID NO: 216243 - DNA, 502 bp, Cannabis indica
catgaaaaagaaaaaaatagtgtgagaattttaattcattaagaaaatagagagaatatgtttgagttgcatgagtaattttcaacaaagatcttttctcggtctcacaactagtaatacaaatctgtgtatatatattgtaaaatacttacgtgtagcttctatggagaaacgagaggccttttagcgtctggggcctgcggcggaggacgacgacgggagcggagagggtgagagcagagagttccccccgttaggtcttaggtcgccggagaagtgagatcagaaagacgaaaaagagggatagggttttctactcctatactaatactacatcgtttgtgggtgtttacttgttttacattattaaataaaaaaaattatttgtaaaatgaccattttacccctcaaaatttctttgtaaatgactattttacccctcaaaatttctatgtaaatgaccattttgccactcgaaattctgtttaaatgaccattttac

SEQ ID NO: 216244 - DNA, 674 bp, Cannabis indica
gattttttatatataaaaaaaaagccacgttttttttttaaaaaaaaaacttaaaaaattattaattaatataattattaataataaaataataaataaatatttataaacctaaaaaaaaaaattaaaaaaaagagagaattaagggagagaagagaaaaactatttgaaataattttaggatgccatgtcaccgcttcatacttctcttttatatagatatacatagatacactcttactctttatatttttctctacattattaaactaggaaataagctgtatgcggttataatttatttaatgatatatatcaaatttatatatttttttaattatatgagtaactgttgtactaattttttttattcaaaaatgtaaaaataaaataaaaatcatcatacaatttcttatttataaataaaagaaataaagatatatcttcaaatattatattgaaaaaaaaaatttgaaaaacccttacacaaaattgaggcctaaaaaaataatcaataaatctatataaaaaaaataatgatatgtataatctcaaaattattgtatcattatcttgtagtcgagattaagtttattgaaaatcgttgtcatcaccatatcttacctcatagttgtctattattggcatcatcctatctcactccacctatttat

SEQ ID NO: 216245 - DNA, 531 bp, Cannabis indica
atactaaaacacactctaaattactctaaaaaatcatataaataaacctagcgccaacaatataataaattaataggcatacaatttgttggtttattttatggattaatgtaattagtcaatttcttcttcttcttttagttcaattccatataatttgttttgattgtaattatttattagtcatctataattcttgtccatgaatttaaattaaaattcttgaatgtgaaatttgtatatgctttgattgttatggatgcaacttgatttaggacaaaaatacataggttgtttgtataattttattagttgttatgcttaatgctatctttgtgattaaacttaccataggaatatagaaaattttcatataaattgagcttataagccttaacaaaattataatcttcatagctcaacttatcaattgaatagaaagaagagaacttagttaattgcattaagaaataaaataaatgagttgtttttattattattctctctaaaaattaattattattttattta

SEQ ID NO: 216246 - DNA, 551 bp, Cannabis indica
aatctcttaaatctctgaatcccaaaccaccaacatctttgtgacgacacatacgactccaactcatgcatccaactagtacctttactttgattagaatccgtgctccaccaaaaatttttgccatgagtcgttcaagctccttacatgtatcaattggtaacaagaaaacactcatagcataatttgaaagtgcttgagcaactgatttaaggagcacttctttgccagcccttgacagcagcggcccctcccaaccattgattttttttcctcactttatcttttaggaagccaagaatagcgttcttatttttcccaatcgagtacgataaccccaaaaaagaaccattttcatcaacttcaaaaataccaagtaaatcacaaatagcatcatgcacaccagcactagtatttcagctgtaaaaaactgaagactttttgtaattaatattctggcttgaagccatttcaaacgtaagcagcaacttttgatattaaaaacttcatcttctgttgctttacaagaaatataactatcatccgcaaac

SEQ ID NO: 216247 - DNA, 1453 bp, Cannabis indica
ttgtatagcaacccatatagaaactacaggagaaactaatttagaaatccaaactgtaaatttgaaaaaaaaataataaaaaaataatatatgggagtaattctccttttatttattatatttgaagaaattataatttgaatcttttatatgaaattgtagtatattatagttatttatggactaactctcactaattttaaaaaataattgaattatataccattctaaaaataaaataatttattttaagcttttattgtatagaataatatgtaaaataacattttatattttaaacattgtaaatttgttgaaaatttcataaatttgtgaggccacctaaaaaaaatatattatttgaggtttattttatatgcgtaaaatttattattttaacatttattttagagatgattaattatttaaaatttcataaaagttgattaaatgcttattttaaccacattctatatttattgtaatatatacataaaaagacagaaattcttcaaatatcaaaaaaaattatttgcaccgataaaagacatgcatgccccacgaaagattttttctaaataagtatgatcattaattagatatttattactattattattagtagaccaccacggagctttatttgtacttccaaaaattataaaaacactatatttttattatttttattttatataatatatatttaatatatactagttttttcacccttctcatattcttaaataatatactataaaataaaaaataaaatatattttaaaaattaagataaaaaattaaaagaaaaaatttaaaataaatatacatgattttaaaaatttatatgaaaaaaaatactaaaataattattgataattaaaaaataatatgaactttttgtaaaaattattaaaagtgattttacaaaattaacttaagttaatcttttttaaagattttctaggatatctctatgtatagcttgtaaatactactcctatataaagagcaagatacacatacttaagggggcggagccagaataaaatggtaggggggccaatattaaatgttgtatacaacaattgtgaattttttgtaattttttttttaagtggtgcctcaattgaaaaaatatcatatttatatatattaatactttataagttattcttaaaaaaaatatagaaccaataaaaaataaaatatgagtggtgatataatttgttcaagactcaaattaatactaccagtatttatttgtaatttcttaaaagaatatatatagatatatgtatttttaatagatattactcttgaacgggtaaattttagtttttaagtttaatttttctatctaattagttcaatctcttatttttacattatatgagttggagttgttttattggctgaaaaaattttaaaaaaaaatacagcaaaaaaagaa

SEQ ID NO: 216248 - DNA, 721 bp, Cannabis indica
tatatttgatatcttgttatttttgttaatttatagtcgtctttttgttattttataattatttttatgttgttgtttaggtgttctataattgtttttatattatttttaagtgtctttttattatacagttgtttagtttgtgtacattttttttattatgtatattttgtttattctagataatttttttattgtatatatgtgcatttatttgttattttttagctgttttaagtggttttcaaaatattttcttactgaacaattattttttagttgtttttttatttgtgtattttttataatgtactatttttagtttattctggacaatttttttgttgtatgtgtgttgctttgtatatgtagatatatatatttaatttatttttttgacatattttattaaaatacaatgataaattttttcgtgttttttaattgacacaatatgctgtagtatatattggcatattatacatatattatataccccattttaaaattataagattttattatttctattattaatgtaactatttatttagcttttaaaaaataaattgtcgttttaaccgtcactaactcaaaaaggaagtgttgaccttaaaaaatgatcaatcgacaatggggtcgtatggatctgatacttgccacgtgttacacaagcatgaatgaaaagcaataaacacagagatttgctataaaggttcag

SEQ ID NO: 216249 - DNA, 691 bp, Cannabis indica
tttgttggtagggattagaaattacttactaagtaggttttttaatattaaagttttattgtctagcgttttcgggccatttatttctgatgtaagtacgtcaacgttaatgttgcgacccatagattggtttaactatgtctttagaataaacaataagttttttggtatggaagaaatctcttcactttgtctctcggcgtgttcttctttgtccttttttcgttttttttttttttatgactttttcagcctcctttgaatggtgttggattcgctaatgtaaaatgtggttattataataaaatgttacaagtaataattgactaattagtacattaatacaaaaattacaaatattaacaattaacttctttattaacttaacttattaattctctaaattataggagttactatatatatatttcaaatataaaacaaggattatttcacaaatatacaaaaacaacaaaaaaaattataaaagtaaagttttacgaaattttaaatattttaatgatttttttttattttatttacagaaaatacggtctttttatgttgtactcttgttcatttgttgttgatttttgttatctacatgttattttttgttgttgatttgatgttatttaaatgttatttttatgttacttttatgtatttttcttgttattttcgtgttgtt

SEQ ID NO: 216250 - DNA, 651 bp, Cannabis indica
taatcatggtgctatgacaacagcattcaagaagggaaagattggatatgttcaacccaaaattgttgagattataagcattaaagaagcattgagttagattgcaactcattcaagggatagagttatgttggaaacaaatagcttggtgtttgtcccgattcagagccgtatttttatgccttcacaatttggtcttattgttcaagatgttcgaaatttgattttggctttatcttttgttgatttatattttgtaaaacgatttgcaaataagttgactcattacttggcaagagactcttgtttctctacaggtcgtgtgcttcagttggaggactgttcctctgaagtgcgttatattgttttgaaataatttattaattaatatatttatgattttattaaaaatatattataaatattattaattatttataaatactattgttataaatatacaagagattacaaataaaaaaataaaatgaggtgattaaagaccaagacaacttttaagtaaaattttacaagaattaagttaaataaaagttacaatctcaaagaaaaaatacaaataaaaaaataagagttacaactcaaaactcaaaatatatattgatgtaaaataatataaaagtatatatatat

SEQ ID NO: 216251 - DNA, 994 bp, Cannabis indica
aactagacattatactattgagtaatataatgcataccttctattgtattcaacagtctttctttattttttaagcaagaaccgttttaaacaaaagcaaacacgtagaattactaattttttattacacctagtcattttaaattgcttgatagtacattacaattacgataagttagaataagaaattaaaatactatgggctcgtttggtacgccgtataagaatcgtattgtattaaataataaataacacaatgtttggataaagcaatgtattgtattaattattacaactaaattttttaatacaatgtatgttgtatcatttaatacataacaaatggtccgtattagtttgtattataatatttacaaagggacccgggacccggacccagatgccgacctcgactcgggacccagaccctggactcgggacccggacctggaccccgaccccgaccctgacccaggacccagacccggactcgagattcgggacgcgagacccagattgagacctgggacccagacccggacccgggactcggacccggaccgagacctgaactcggacccaggacccgaacccggacccgatcccggaccccgaacccagacccagacctcgacctcgacctggaccctagaccccgacccctacccgaacccaaactcggaccctgacgcggacccaaattaaataatactaatacaatacaatacatcacaatctattaatacaagtcaataccaaacttagtattgtattaaataatactattattcaatacaacacaatccaacacaatacaatacaatacaatacaatacaatacaataccgcgtaccaaacgagccccataaaaattataatatttgtataatattagtagtagtagaagctggtttggtaagtacatatataaatgccctatatatataaatttataatctcttctatgcataacacatatcgaccatgtctaggg

SEQ ID NO: 216252 - DNA, 1439 bp, Cannabis indica
atgtctagtatatactataatcatgatgatttgacaaatttttcttttttctttattctttcactttataattattgcaagcaagcagttttatatatatatttataatagatatttgtactaggtattttcttgtttatacaaagttataaaaaagaaaaaggtaaaagaacgaaagccaacaaaaaaaaaaaaaaagaaataaaaataaatctggcctagatatactctaactaaactttaaaatcaaaataaaaattttagggaaataattaatataattatagcagtatttctttttaatgaaaaagttttattattactcgaaaatctgcatgacagtcaaaaaataaaaaaagtacaaccccttcttcaaatatatttgaatggacactctctcaaatagaatagactaaggtgtaatacttaagaataacgtgccttttattttagaacaacaatagaaagattcttcttaaagaaaacatagctaataatagtcgaagccaacataaatctttaacctgtattcattgtttgataattttgaaaaagattactattaggcactaataatgtctaacaccactataaggtgacatcttaagaattgttaacgatattctataataattattatattaaataaatctaacgaaaaaaattattatataatttatattaaatcacgttgaatatgatatttaattgtatcaataacaatataacattttgagtggtatctaacatagttagcctctgtataaatttttaacaaccagactcttaatttactattattaagctattatttacttctagaaaataccaaaaaataaaataaagaccaagacataaaatcgacatgttacaatttttttaaaaaatatatttgaactacgagctcacgtgcgaagcatgttagaccccaactagtattaggcatgtcaaaaagatccatttagttggagcggattggagcttcgacgatccgacgaatgtgatccgacttgatttcaatatttttttttaaaaaaaaacttaaattcaagactcggatccttttagacctggactcggacccggacccgaacgtagactcggacccagacccgaatcgagactcgaactcggacccagacccggaccccagatcgggactcgggacccgggacccggaccggaaaccgggaccccgacccaggaccaggactcggaccctgacgcgggacccagacctgggacccagacccagacccggacccggacccggacccgagacccggaccccgaccccagacccaaaccctgacccagacttggacccggacccggactcggacccaacctggacccgaactcgaacccggactcgggacccgggactcgaacccgaatcgggacgagacatggtcccgaacccggattcaaatctttac

SEQ ID NO: 216253 - DNA, 571 bp, Cannabis indica
aatccattgctggtttctcagtttcagctttgtttatttttaattccctattgtgttcggtttggtgttgtgattacagggcaattatctcaacacatatgtatccagacataattcattcaaagacgatttccgaaaatgactaagctttccttggaaagcgcacttgatttgaggaattcactaaagccggaaaaatattgaacaacaatgggaataatataagtatttttccctacttatgattctttgtaatgtatcaatcaatatgacagggatttcttcctattaaggaattttcttgactgaaaaaccaacaaaatacaatgtgatgcttattcacataattaaaagaaacaaactaacagtccagtgttagaactcctatcagatttacttatgctagaagggccaagggtaataaggatattgacatgtaagggcagcgatgcgtgtggggggtcgttttggtaattgttgagttgtttaggtaaagggagtatagtggcagctaatgctagtgggaatgtcatgtaagaaattgagatttctctctctacatcaaggcctg

SEQ ID NO: 216254 - DNA, 684 bp, Cannabis indica
caagacacttcccaatctactgtctttgaaattggaaagtaattcacttggacaggtaagtgatgcatatgtgtgtgtgttactacatatatgcgtcggaatggaagtgtgaaattaacattttataccattataaatagcattagaatttatgttaatgaactaaaagtttttctggtctcattagtggctcattcgatcagtctatttttcagactgaacagaatctaacttctgaacatttaagtagcctagctgttgcttaagtatttttcacacgatagtatgattattcacgtgcttttaatgtgaaattcattcaactactgtagaataactaaatgaaattttaaggcagcattgttgtatcttacagacgcacaggttatttgttacgtgatgatcaagtttcttttttaaatgctggagaaaattgtataacaggaaacaggactgcatgctagatttcacaagggtttattttctagacagtacaaacttagtgatgaataagaacattaagcccaaactgattcagtgatgcccaatttttttaagggaaggattctcttcctggtccttgccgtgcatgtttttttatgctatgtgtgacgctttcaacagctgtacaatctgatcatcttttttttctacatggctttagattccatcagatgggttcca

SEQ ID NO: 216255 - DNA, 598 bp, Cannabis indica
gatcatttatcctctatagagagtctacaattaatatggactaaaattattattttaccctttaattatattttatctttaaaacacttaattgacttaataatatttttatgaactaatataatcattgaaatgagtgctttatcattaaatactttaagttagatcaaatgaaacttttatttcacttctaagatagaagttaaagtcaaaaagttacttctttgtggcattgtaagtattaaaagtgagaaaggtgagattctaaaggttcacaagcataaactgaaggcatgcaccagtgatagtggagtgttgactgaacatctccgaaatgacaaaatttaaagcaataacaacgtgtagctaaagacgataacaaagcgctttatgggaggcaacccataattagtttttatttttgttcatatttatcaaattttatttttaattattttgtattttagtcgaggtatcgtgaaatacgtgaaaaattttgaatttttttttggcgctattgcgccgtgcgtatacagaaaaaaaataaaaaaaataataagctaggtgctatagcacagggacagacgccataacaccc

SEQ ID NO: 216256 - DNA, 556 bp, Cannabis indica
attaaataccaaacgttatgttaatccctgttcgtcactaccattctgttaagagtgaaaaaatgtacacgtgtaagaccctgattaaatatatttttttttaatatttagtaaaaacaaaacttaaacttaatattcctaatatatctctaatcaattaaaagtaatattcctaaaatatctttaatagattaaaaaatgttaaaaaagaaaaacatcaacctactcgacccattcgcaatctcacaaccctggattctagttgtaagatatctaatgaaccgtcgctggaattgagatctcattcaaagagaaagatgtcaaatatatggagtttctttttgtatattatatggatgatccgatccgcaaggaccatgattgggaattgtttgatcgtctttctccgaggaagaggcaaaacataatcaacttgaattcagcatagctattcgaaatcttagtgaaagactagattttttatctcatgtttgcgttttgtgaaaagataccaattgaagtgaagggtttattttttattttctcacgaaagata

SEQ ID NO: 216257 - DNA, 653 bp, Cannabis indica
ataatggacaaatttgaagcctatgacaaaagctactgagatctattatcacactagttgaaaaatgctttcataatgatgaggatatagtttcagttgatgatgttactattttcttctatctgtcttagattacagtttagcgtcctctgaaccgttctagttagaccattgttcattgctgactaagtttcttgagcttataagttataagacattaggacagggcaaagatataatgtggcgtttggttgagatgaatgaaagaataagaatgagaatgagaatgagaatgagaatgagaatgagaatgagaatgagaataggaatatgaatgaataaaatttaaaatgcataagaaaaattgataaaaaatttttaaaatttttctcatattacattggaatggtatttctttctattttaaaatagaatagtcatttcactaaaatattagaaagggcatttcatgggaataatattctaatattttaaaatacaaccaaacaaaagaatggaatgaaaataattgagattatttatgcaatgatacttcatttttcagataattgagattgaaggtgactgggtggacagttggggtggaaataagaaatgctgctgatagagtaggagagtgctggaaggccatt

SEQ ID NO: 216258 - DNA, 904 bp, Cannabis indica
aaatctagcactttattacattatattttttagaaaatttataatgtataatatatataatttttcagttaatatttaaaaaaaagacacaaacttctaatttctttaatctttttttagaattatattgagtcggtgtattttattagttttataataaaaaacaccaaaaaaaattattcttatttcacatagacacatacacataaatttaaatatatatacttaacttattttatttttagtaatgaatacatatatattttagtgtaaatcttaaagatgagtatatatattgacttatatgtatattgggttttgattttatatataaaatgaagatgggaatagattattattggagatttaagaaacaatttttttatgaaatattaaataatttatctttaaaaaaagaaaaaactcatccagaattatgcggatcggattagatctaaaatatgaaatctgcacttagtgcagaataaatgttgtttgactaaaaaagtacggattgaatcggataaacactcctaataataaatagtgttatagttgttaatagaaagagttattatatataagtttcctaaaattgtcggcaggaaaactttcatatgaagtatgagcatatataataacaagagtcaaaaattctacttgcggtgacactaatatttaattaggtttttgttgattattttttaactattatatatatatggctaattaagattttttcgctttgaactttgacatgtactaaattatgtccctcaacttttaaggtcattaaaaatggctatcgagattgttgaatttaaggacttttattcaattttagtaaaaaaaaaaatctaatatggaccaaagtttagggagaatgatttagtacatatcaaag

SEQ ID NO: 216259 - DNA, 915 bp, Cannabis indica
ttgtagtttttggaacctaaaaaagtttgtagtttttgtaagttttttgctattttatgtgttctttttcatctagttttccaatttatgcgatatttcacgatgatagattaaaatctgaggttagtaatgaagtttagcgatggttagaaaaatgttacaaatcaatcaacaaaaaaaaattagaaaatacaagaaaaaaaaaacaaaaaatttaaaatccattatttgggcaaacattaacaaaacacaaacacaaatgtgtaattatctattaaaaataaactgtatacatatagtttgagaattgcccaaacaaaaagcaagagaataaaaggtgatctcgacagtttttcgtcgctcaacaattttttcgatgtctttgcctggggcttggttcgcagtgtacacgcggtggtgagtttaggtgggttttttcagggagagattacagagagtatgagaggtgagagatgggggaggtttaaatgagtggggtatttttttaatttaggtggaataatagcatagttttcttgtttttattatgggcgaattaacttgggtccatgcattacatttaagcatggtaacctaaacttccaataaaaatatatgaaatgaaatgagaatgagaatatatatagaaattgaatgaaataaaatgtaaaatgcataaacgaaattgataaaaaaaaattattaaattttatctcatcttctatttgaatgatctttcattctatttcaaaatagaatagtcttccaacaaaataatagaaaaattattttattaaaatgacatttcaatactttaaacaaagaaataaaattaaaatttagtattctacatttaattctatttcattaccttcaactaaagataactatagtgatgtttggtttattgtaatg

SEQ ID NO: 216260 - DNA, 643 bp, Cannabis indica
acggtgagcagactgagatcgttgaagcccatatcttctttcctatctctctctctcagtgcgatcgtagttcttgaacagagaccaagccagagaataagaagacgacggatttgagtttggatttgattcatttttggtttaatttttattcttatgtgtgtattaagatctgggttcgaattttattgtgtgtttttaatgtttgagtatttagttttttattggggttttactgtttgagtttgtgtttatgatatcttattttttttattattattattttcatagattttgagaacctaaaatttgatataaagagttttattttttatacgggaatcaaagtttgcttttcgtttcattgattgaaaattgttaataggaagtttatgggatggaaattttgaatatatgaaaatagaattgaaagatagtatttgaatcgaaaatcaacgtttattgttaatcttcttgaactcctttgacccaagtgagttttgtgcatgagagctcttggatgaggttattgaataaagacttatcagaggtatcgaactgctcttccatcggtttgataaagtctttgacctttttatggtggctccaccgacccacgcaattttggacatgatgaacatga

SEQ ID NO: 216261 - DNA, 584 bp, Cannabis indica
tgcattgtagaatcacctaataattttaattagaaaagaaactaaaaatatattttaaaatcatatttttttcttttttttttgtctccttcgtcattatcctccagccacaccaccccgacttcatcttcctccaaccacacccgacccccacccatcccatcaccagccacaccctgatctctagcctcactggagtttcaccgcgcgcagtggccacctaccatcaacggcaaagcttgcagaaaccatcaacgagatataaaagttctttacgagaagatcacgtttttgaaagtttttttactcaatggatctcaggcaggattaaatcggactcaaaagtttctactcgtcgagatcttaacagtgactgaatgataaaaggagctttaggaacctcaaagtttgtcgtttgaaaacctcaaagtttgtcgtttgaaacatgatgaaggtcatggttgccttaactccagagaacgatggagaggcctgtgacttctatttttgacggcgagacttcttcagcatcgaaaatcatcccaaccggcagcgaaaatcatcctagagagagagagagagag

SEQ ID NO: 216262 - DNA, 601 bp, Cannabis indica
gataattatatgaagacgtgtttaaagatgttcttaatatacaaactgtgtattttttttttaaaaaaaaggtactgaatacttgttgtttattacagaaataatattctttgaagggtttagatcaatgaaaatcaaattctttgttaatgcttgcattttttttttcatgtactttactttttttgtttttttttcaattttttaggatacttttgttataaattttgtttttaatatttttaaatacaaaaatggaaacatatttttattttcaattttgaagaaaataaaaatatatttggtaactaggcttttttttttatattttaaaataaatatttggtaattttttttatttgaaattttgaagtgataaaaaatggagtgaatagttataaaaaaaagtataaaatagactataattgaatattattgaggaaaaattactccatagattattttttaaatcttttttattttttaaatttacagttttgagttgcagtggtttctatatggactttagttacagtttaagttaatccgttaagttctataagagtttccatgtggaattttataaatatcaaaaaaaaaa

SEQ ID NO: 216263 - DNA, 600 bp, Cannabis indica
aaaaaacatgttagcagacattatttagtaataaaggtttaaaatatacttggaataatctcttaccactaatggagttgtttatctaaaagttataattaaatgtaccattagttaagtactttaataagtgtggtacgagaaaaatgttggacacctgttcactggagtaacacacgtgaataaaagaacacgatggaaccaaaaatttccaaagaaatttataaaaccgtagagtgaattcgagttgtatgcttgcttcattgagtacacagaaaagttgcgctaatttaaagcataggattatcgagttccaaataggagattttattttcctctgagtattgcctataaatggaatacgtagatagagaagttaaatcttaaattcattataccttttgatattggagtaaataggacatgtagcctatcagctagccttgactccggagtgtataatgtgtttcatatccccatgagaaaacatgtatcatactcgacccatattctgagctgtgataattttgagcttcgggcatatttattatatggaaaaaacatcttgttcaggttgtgaactggaaaaagaaagtaata

SEQ ID NO: 216264 - DNA, 738 bp, Cannabis indica
atcctgtatgacatcaacatcccaactcctactatcacccatgaaaagtgaggccacgggttgattaataaggccaggattaattgaagtaacataaggattctcattattaggaagccaaggatgagtaagaatatcaacttgcaaaccagtacccacaatacgcctgacccctagccgaattagggattgcaaagtctaaacactacgccaaacaaaactcgaattggccccaagatcagcagatagaaaatcaccatttggaaaatatctagccttatagattcggccaacaagggaatttggttgtaccaacaaatgccacccctatttagcaagcattgcaatattaaactcatgaagaagccgaaaccccatacctccaaacttcttatccctagccatgcgctcccaactcatccaagttatacccctccccttactggacgaagtcttccaccaatatttggccatcatcttttggagttcatcgcatgtcttgagaggcaaaaggaagacgctcattgcataggttggaagagattgaacaattgtcttcaaaagaatttccttacccacacgagacaacaacttgccatcccaactattaatacgattcttaactttttcctttaagaatcccaagatagacgatttattgctaccgattatattgggcagccccaaatatttactttcctcactagcctcaaccatcccaagagtaccacaaatctg

SEQ ID NO: 216265 - DNA, 708 bp, Cannabis indica
ccctaattgttaaaccaaatgaaccaatgaaatgtaagataaatcctaaccagaataatagcaaagggaggatgagatacttactgtgtgaagtcgaaaagctggatgcaggaaacttctacgagtggagacgtgactaccggcgtaatgagtttttcgagcaccgagagtcgaaaatcaagtccgagtaaattcgcaggaagaatgtcaaagatagggatggcatgcagagattaagaaagctcgagtggaagcttcagaaagcttaagttttttggagaagatgaagatggtagaaagtttgattctaaccattttatactctaaattttacaaccatcagatcataatatggaagatctaatggatgaaaatagaagagaagtggaaaagacaatccattaatgttattgatgtgcattggaaacataaaaccgccaaaatcaaaggcatgcataatttcaaaagggattatgacaaaaataccctctgtaatcatttaaaaaacacttttcattaaaaagaactttttaaggggaaattgttatacccaaaattcggctaacacttcagaagaggacacgtgtcaacctggcagaatacaaatcaacgaatataataattattatattggaaggtactgaaatggaataactcattaaatgtggaattgatagtgcacaactataactctttgacagtaaagtc

SEQ ID NO: 216266 - DNA, 665 bp, Cannabis indica
ggaggcaaagagaagacaaggtgcagagaagtcaaggcagaggttgagacatgagtcgttatctcagatttggaggttgaaccgctgacgtggtaggcggagaagttgaggtaaagagaaaatggggtttaggttgcaggttcattagaggttggctgaggtcgatgatgaagacccaaagacgcgaggaagagagagggattgcagaataaggacttagagttttttttttcttttaatctgaaatgatttagggcttttaagctttgataccattaagagaaagaggggttgttcttttttatttattttattttatatttttacttatttaagtacagccaaaaaatccagctgtatttataagttattttacatatatttattattattatttagaagaggaataaataatttattttttaaaaaataaaataaataattacattttagtgatgtgcttggcacgttgagatatgtttacccaatcacacttggcgtgtcactatagatcaacattatattttttcaaaaaattatagaaattatgagacttaccatttagtgacacgatatctatatagtgacgcgctaggtgcgtcgataaatatttatacccaatcacacgtttggtgtgttacgatagagtaatattttttaaagta

SEQ ID NO: 216267 - DNA, 896 bp, Cannabis indica
aaacttcattggatataatcaaaattaatgagtatgaaaacaatgttttagtttcaaattaaagatgaaaactaaattttctaatttaatctcttcatgaattaattgatataatacttaagttgggagatgactatatattaaggacatttatgtttttgatattgaagaaattaattataatctagtttttttttatataatagtctatattatagttatagtaggtatttatttatttatttttttaagaaaattaatagtttataatatcaaaaataaaatttaattattattatcattatttctttaaaaaaaaagtttctaatatataacaaaaaaaaaaaattaaattacaatttttctaattgctaaaataaaaataattccaccctataataattaaaagcgaaagtcatatttttactacaacaattaacattaaaaataatagcatgaaaaaccggctaataaataataaataatagttattaaaagaaaacaaaatgttgtgattaattagaggaggagttattgattaatgagaattgttattttcaaaataagtgttgaaagtaattatagtcggttatatttataggataagtattttgataataaaataaaaaaaaataaaagtatataataatagtggtagcgtgaggtcacttttgggttgggctcactctcatacgtcgctgtcaatcataaattagggaaagcaccaaactgctgctcctgccatcccttctcttctctcctctctctatatatataaaacacattacacatacagagagagcgggaaattaaattaatacttaattacttatttaattattattatcatcatcaatcttctttattattattataattaaatcaaacaaagcttt

SEQ ID NO: 216268 - DNA, 548 bp, Cannabis indica
aaaacaaaaattaaaaaatggcaataaatataatattatttgtgctatattagaagttaatgacatgttagaagttaggaaagagtgtaaaagtggaaagagagcattgggccttgaaactgtgcgtttggtcttgtagagcggggaccgtacataaatcaaggcccgacacagttttaaatcatacaagatgacccatcattttctacatttataaactattctttatttttatttttactttcattatttattttgtgagcagcgttaatgaaaatctcataattcaatcatttttaattgttatctttaaaataagtattttttttttggtgatgcttgttaagttgctatagttatgattttttgtaaatttttaagtattgagagtttttcaaaaatttacatgaaaaaaaaaaagcaaatgtatttttaaggtgtgaagatttaagaaataaaataaaaaaaaaaagattaaaatataacttttcttatttatttatttatgcaaaatataaagacaaataaaaataataatggtaagagta

SEQ ID NO: 216269 - DNA, 750 bp, Cannabis indica
cttccaaatcttggtaaccagcaacatggggatcggccagggatctcaagctcaacaatagccccctctgtccatcttgcgaccagccaaccaccaacaggagtccccatggccagccaaactcctctagcagcccccatggccagtcagagaaaagcactccctccccaaggggagcgagtcacccaaagatcaattttcaactgacgaggactgaaagcaggtggaaacacccaaaacaacaatttgagaagtgaagttcataacttcagacagttagatccaccaaactccagcaattggtgtgatctaccttatgtcaatgcacaagctccaccagcctggcagagaagcataggcgaccaggccctgcccagcttagggctggccgaccgtgtacaagcaccagatttagtttccttataattttttaaatatctattaattctgtgatgcttaagatatgttttagtttccttataatttttaaaaaaaaacaataactaagaaacttacaaaaaaattaaaaaaaaaaaaaaaaaagaaaaaagaagaaaagaaaagaagatgaagaagaagaactaagaactatcaccttcatggtcttccttcccctcatcatctcagccatgaattatctcatcatctcagccggtgttctaagtttctttcttttccttcaatataattttttttttttgaatggttccttcaatataattaagtatatataatagtagagttggacat

SEQ ID NO: 216270 - DNA, 706 bp, Cannabis indica
ataaaattgatttttttttcaaaaaaatacttagtttatttaaattatttattgaattttcaataattttaatgttattttttaagtatacgtgtttataaataaaataaaatttgaaaatattttttagtaaataatttaagtttttacgtaaacttaatatatttttatatattttaatatttttattaagtttttaataatttttattaatttttccagaattaatagaatattataattttaaaattattttttaattaaaaggagaaaattttgtattggtcaaagttcagggggtaaaaagtacaaatttttaacggtaaatgaaatagaaattaacaaaaggggcataattaagtgattgttatattttaggaagaatttttaacaagtcgtaacaagtcgaagaggctaagagcaaagaatgcacaaaaggtccaaaaggtaaaaaggtaaaaataactaataattattatatagaaaggattaaataaaatgagtttgtttataacattatatatatatgatatatatcagaataacaagacacagagatatatgagactttagagagatcaatttcaagtttgaaaatacgattgaattttctaactctctctctctctcacgcaaccccattctctctctaactctttctcacacgcctatctctatatataagtgttgggatatttattttacc

SEQ ID NO: 216271 - DNA, 475 bp, Cannabis indica
tgtaaattatttaaaaaaattaaaaaatttacaaataattctaaataactactacctaccttatccctatcgtaccaaaacatccattttaaaagatgtacaataaattgttgagacaatttttatggtgaatagaaatgttgataaatttggtagccctaaatttggcttggagaagagagtgtatgtggtggcgcgtgaggttcacgcgtggggtagggagatggtggagccggagagaagttgtatattgtgatctttgatctttgatttcccattattggatttagatttagacagctctgcactactgcaagtctgcaacttatatttattctttcttttctatcattatataatgtctcccccacaacacaacaacaccaatctctctctctctctcttaaccaaatccaaacttgtctttttcaaatatgtgagcattactatttatagctacctaacattatgccaa

SEQ ID NO: 216272 - DNA, 605 bp, Cannabis indica
ccatgagagtttgatcaaataatcaaaggaaatagactatagttttagggtttgaaacttactaacaacttcaaatgatcttgaaataaaggaaaaacaggatgatgatgatttagaacttgtagaaataatattgatttatggttgaaatatggcttatgggatattcgagagtgataattgtggcttgagctggtggtataagaggtgattatgccaaagctaaaaaaataaaattggagtcttggatctttaagagtacatatgaaaaagaaaagagaatggaggaggtaaatgaaatgaatttcagtatttgggtggataaagttatgtcttgtgtgacttttatcaacttttctttcttgctgaatggagaagttcttaggaaggtgattccacaacgggggttaagacaaggtgacccattgttctcattcttatttttttttttgtgttgaagcttttccctagtttattctataatagctgagatgaaaacaaatgctacagaggcgtgatgtttgggtcgatagcaagctgcgggtagtcccactctcttatttttgtttagatgacaatactattattttttagttaggccgtcc

SEQ ID NO: 216273 - DNA, 934 bp, Cannabis indica
taaggtgcagatttactaagtcatttctaatattcagaagtgtacgtatgcaagatattcatcacgaaactcccaagtattcaaaatactcaatgagaaatatgcgaacactcaaagtgttcttcctgaaaactgtgattattcaaatttcaagtatatatttcctaaagaaatgtttattttgtcaaaagcaaataaaatttcacacatatatcctatcgtctcatgcattttccacctctcaaaacacataatacaaataaaaggaagcagttgcaaaataaaattcactaaccttgaaaatgcagatcgtctttaaattctgtaggtatcaaacacttctgatttcctttttgaaaaaagaaaagtgaggaggaatgcaaaggaagtttttaagggttcaaaaattagagaagaaggaggggaaaaatgaagatgagagggaaaagagatgaaggatcatttcatgtccgggagtttaaataccattagccctcattaattgggatggagacatgtggcaagggaatgcctaaggtctcacaatccaacgattatccataaccacgcttgcatggattccaaagagttttgatgacgtggcaccccaaatgggttaaatataatgattacaaccatctttttgaaaccctcgattagacaactaaaagtcaccatctcgtgacaatttttcgcttacctctcgcttatagtttcccacatgacataactgttaatcgcgaaactaggggcagtgttatagtgagaatttttcacctagaaactcgagaccaggctcgcataaaaatgacacgtggactcactctcctcaaggagggctgagatgttagcaggagatctcctaagtgtaaacctcgcatgaaccagactcagcaggatgatgtgaccttgacagagtctagtcacattctta

SEQ ID NO: 216274 - DNA, 727 bp, Cannabis indica
agtcaacacaaataaaatataaaaatacaataatttattttgcaagatgaagggggagggggggcatggctcctgtggagctcaatatagctccgcccctgatatcaatcaacattcagtctacacaagtgtagattttgaattttctaatctaatccaatccgcataaatatagatattcccactttacggattggattggattggattggatcgtgcgaattggattggatcgggtattttgtgaatacccttacttaactccaatagtgatgtacaatgcgtgcaaaatttgaccaaagctaaaaattgtaccaaatttagcacaaaagatagcatggaccaaattttagcctataataaataccatatttttttttaggaagaagttgaagaatacctattttttatacattaatcatatttacctctaaataaaattcaatacaaatatacctcttttttagcctataataaattttagcctataataaataccatagtgatgtactatcgtgaagtgatatgaataaaaattggtagaatgaattgaaaaaaaaaaggtaaaaaataataaaattttgaaaaaaaaatgtaaaaattaaaggcaatcaaagttaaaagcagtatgtagtgtaatttcctctattttttaattacttctttgatactctataaatctaattcaattataaaaaaaatattttatatttataaagtattaaaa

SEQ ID NO: 216275 - DNA, 526 bp, Cannabis indica
aattaatgggtgtaactagtgatgcgcacaagacgaggaataggcggggagggctcctctcatccccctctccgttaagaattttaatccccactctgtccccatccctgcatttttcccatcgggacagagcggggaattcccgtagagacccatttatgtaaaaataaaatttatataaaaaagtaaattacataaaatttaaaatattaaatactatttattattattcaatatactataattatccaaaatacaatttaaaattttatgaaaaaggttaccaatatactacaaagatacataaataaaatataaaatactattaaaaaatgaataaaatactaaacgggtccttatcagggcagggcgtgtcatcctaattccttatttagacggtaaatccccaccctattaagggtaggtcccatctctgtggggaaaaatgtgcatcttgacgagagcagctgtgtcatctttccttggtttagttagcttaggataattcttcttgatatggcccgat

SEQ ID NO: 216276 - DNA, 679 bp, Cannabis indica
ggttgaattttgacaacaataactttagaattacattggaagtgggatacataacttgatatagcattgaattatcttcaaaatgcaagttgaattgcatcaatcagatcaaaattgagtgagttatggtaattttactgaactctcaacctagatgttgggtaagtgtgtaagaacttccaagcgatgtattttacgatgcctaagtgatattttgatactacttagtatttatatattttagtgaagctagtatctagttctcagagatgttactagtttgcagaaatgagagactggaaactcttcatttttgtgtgtgctagaaaagagaaatgcaaaattgtaaatttgattactctgacttcatagatcattgtaattgtgaaaaactaaatggacggtccaaacaacattagattcagataagcagaacctaacgcaccaggccttttgtcaacttgggcattgggccctttctcccgagctcttggattttgtttttgatacttccaaggtttctaaacttgaggaaaaggtctcttaccttgttcttcaccacttgggattaaatggtcgcatcagatttggcatttgagcaaattgaaggtagagtcccaagttgattgtcaacttgggtactaggctagcgctatgtcaacttgggtgcaaggcccta

SEQ ID NO: 216277 - DNA, 1336 bp, Cannabis indica
gtctttacaattatccccccctcaaatatctgctaattgagctctcatatctgattctaactcccaagtggcttcctccaccttgctatttctccagagtactttgaccagaactatagtcttgttccgaagaatcttatcctttctgtcaatgtgaatggttgttcttcataagacatgtctagttgcagttcaagattctcaaagctaagtacatgagtagggtctgaaacgtattttctcaacatcgagacatggaatatgttgtgaactgctgaaagagctggaggcaaagctaatcaatattccacttgtccaaccttctcgagaatcttgaaaggtcctgtaattctagggcataatttgcctctattaccgaaacgcttgatccctttcatgatcccctacttgaaattcaacatctctgcgtttcgaatctgcataactcttttgcctactctgagaagcaagcattctgtctttaatcttctcaattgcttcattagtctgttgcactgattctggacctagatatttcctctccccagcctcatcccaataaatgggagacctacactttctgccatataacagttcatagggagccatccctatcgtactttggtaactgttattatacaaaaattctatcaattgtaggtacttactccaggagccttcaaaatcagtgcgtactttggtaactgttattatacaaaaattctgccataacacaggctcgtaacatatcttccagtatctaaattgtcctttcagactgtccatctgtctgaggatggaaagctgtattgaacttcagtttggtacccatagcccgttgtaaactctgccaaaattttgaagtaaactttggatctctatctgaaactatggatttgggcacaccatgcattcttacaatctcttttacgtacagatccgcatactgatccactgagagggttgtcttaactggtagaaaatgagcagattttgtaaaccgatctaccacaacccaaattgaatcaaataatcctgtggttctaggtaatccaaccacaaagtccattgtgatatcctcccatttccactcaggtaaagctaaaggctgcaacagtcctgctggtttctgatgttcagccttaatctggtgacaagttaggcatctcgatacgaaatctaccacaatctttttcattccattccaccagaagtagggtttaagatcttgatacatcttggtggtgccgggttgcaaggaagatgaagtagtatgagcctcttcaagaatttcatttctaagttccatactattaggaacacagaccctggtctt

SEQ ID NO: 216278 - DNA, 909 bp, Cannabis indica
gataaaattttttatgtaatatgtctcctgtaagttgatgattattgcaatggatacctctttctttacaaaaaaaaaaatgatatcacctaatttttatttttgtatttctcttacacatctcatttatagttgatggtattatacaaatattgtgtaagatttatgtctacatctttctaggttgaaattcgtatacattttttgttgtgtttttgacaactagttaatagtcatgattgttttcttagtattattaagttagtttaatgtttctctctagtatgtactcaaatacctcatatatttgattataactatttttcttcttcatgaaataggaacatttaacactattttgaagagaaagcattcatcgaagggacatctccaaagaggaagcttcttcaacaaatatagtttaatttgtatttataactttaaattctttgtatgaactgtgtaattgagtgggtttattacaattctgttattgttttattcattgtgttgacatgattaaagtaaaaataattgtattttcttttacagatgtattaaattaaaaaaattaatttaatttagttattaagtgtttatcaaactaataatcattgtacatatataaatatgtattgacttattttttttttaatttacgagcaagaaaaaactaataattttttacaaaaaaaaacaaaataaatattattgaaaataattataatgaatttgtataaaattattataaaagtaatttagtaataatactttcataacattattaatatgtcaataaaataatatattatgtcattttgatagtgttataaataattctataataacattcaacatgacattacgaaaatgtgttgaaagtagtggactttcaacggcacccccatt

SEQ ID NO: 216279 - DNA, 935 bp, Cannabis indica
ttttttcgatataatcagatctcaagcagcttattaaaagcccataataccatattaagagtaagaatgatgagttccataaaaacaattagtgatgagaggagtaaccaataatcttagggttaatatcctaacatcacctcttcgaggtgggacactctaataacaataattactgaaaaacctaacttcaagactttagcatatcgacaaaaatttgaaattccttagtcaagaaaatgagaatttgggtaaaactcacaaattcaaagctacccacaaaaaaatgcataatataaacacagagaattacaaacttaacaccactgaactgcattttcacgaaaaatcgaaactaaagaatagtaaagaacatgcattggactaaatttggtacccaaacaaaacatttaaaggccgaagctaagctttctatgatctctgttgttttctacgcaaccaaacagaaatgaagagggtaattatgaaagagaatcatcacctggttgttaggttgaaacatggctgagttgactcagagtgtgcctccccccctcctctgcgatgaaatttcactcccacctgtcaccaaacgtatatatatatatatacatatattatatatatatatatagagagagagaatcagagaatcagagaatcttcatcatgttcttgtaaaataacgaagtatacctataaatgttttttttaaacgatttgtgactattttattattcttgaaaatgaccaattacttaaaaaaaaaaaaataaaattggtaaatgtatacatataacaaaaatagattatttataaatacacaaaaataataaaaaaaatactaaaatatttttataattttatgattttatttacaaaagtatagttttttttttttttatgtatttttatattgtactattttaatttat

SEQ ID NO: 216280 - DNA, 542 bp, Cannabis indica
attggagatgttcaataatatgcattaataccattcaaataaataatatgcattaataatgtaacgcattataccatatattaattaattatagttatattatattaaaagaataatattttgtttaatttttaatgtctcaaattcatggcagaattaattaattcttcacatatttgttgattgcttatatagcaaaggcatggcatgttgagtttttctaagttgaaagtgtatgttaaattgttatgatttgttggtctctttaacgaacttgaaatgtgtgacaaagtaaaagttctattgctaatatggtatggtggctgcaacgttgtcttactttatatggaataggatgcacatagaaatttagcaaacacattagcttcttgctagtgttagtgcagagtattgatcagtttcgagtgttatatacgattaaagttgatatgtatatacatctgtcatttttagacctaacttttataggattggatggtttgctcgtgactattatgaactgtcctctatcattctttgaa

SEQ ID NO: 216281 - DNA, 1286 bp, Cannabis indica
ttatatagtaaaaaaaacttttttctattattcactaacataaaataggtgaaaaatatttattttacattcaattattaactatcatccaccacttcacccatttcacaataaaaagtgaataaaatatgatggaagaactatacaaaagttatatttcgtacaaaaagttcaaaaaaaaaaaatactaattatagtctatttatttcgacaggaagaaaaatgtatatggtgaaccgaaactaataaaattcaacacatctagtatctattgatggttacatcaattttaattattagattattattattattattattattattattattattattattaaatggttataatttgtttaaaaatattaaataagtataagctatttaatttattttatttaaaagttatatctaaaaaaatttaataaaaccaaataaaataagaatttttttttttatcattttaatttttaaataatgaattaatatataaacattgaaaagtggtcaaattagtattatgaagcgggatggaatgaaaaaatagtaatagtcttcaacctttcatgtgcactacaaccacaaaaaataaggtgttgtttggttggaggcaataaaatggaatagaatgaaaaagaaataatttttattttattcttttgtttggttacctttaaaaccattacaataccattctgatggaatagcatttttatcattttagtggaatgactattttatcttaaaatgaaaagaaagatcattccaatgcaaaattttaaaaaatttaataattttttttatcaatttatttatgcattttaaattttattacattccattcctattccaattttcattcctattcttatttctatattttcattcctcccaaccaaacgtcacctaaaatcaatctttattttctttctcttaatacacgggtttaattaatttttaaattgatgaggatacatatagtaactaaaaaccattaaaattattaatatcaaaccaatatcaattcataccagagaaatgaaaaataaataaaattataattactacttagatttgtaaggtagctgacttttgttattgattttaatttttaaagtaaacgtttgattttgttgatttaatattacctaattttacttcattttaaaatatatataataagtgaagaacataaaatagttatcaaatatatgtgtaatttatttttttaaattatatttttattaatagtaaatatgatctcttctattaaattcttattc

SEQ ID NO: 216282 - DNA, 530 bp, Cannabis indica
ttttttttttgaattaaaacttattgtaatggataaaattcttggaatattaagtattttttttatggtaaccaaaaatcaaatagtatcataaaacacaacaaaaacaaatagaatacatagaatacgcactattctaataattaataaatataaaacaaaaaaattgttaaagaaacagataaaatctataaattaggtaactaaacaaataaatgaagcaataaaataagctagcttcaaatagcatatttcacaatgagaatgacacctatgctcgatttgagtctcttagtgaaaaggcttcttttttctgtaaattttaggaggatttgtaacaatgatttcaataatgtagcttatgtgcacactgtctgtatatgtataagggagaaattaagattggaattttgagaaattttatatgtatatataaaatttacttctcacgatactatttttattcaatatttatttgaataaagtaatataaagaaaaagggtagctacactgctacactaatgaaaaa

SEQ ID NO: 216283 - DNA, 959 bp, Cannabis indica
actaagttaatattacttgcaataaacttagttatatttattttaattttgatcatttatatctttagttgtataattagtttattttttgagggataaataatatattttttaataaaaatatttaattttaatggtatatatatataaaaaaaaatatataataatattcaaaattattattataattttaatttaaccgtaatacttttaattttataattctttttaaaaatatcatactttttttttgaactgaagaaatatttctttccaaggtttttagtgagagaagaaccgaagaaagctgataagagagcttgggcttgagctatcataatgggcttgagcttgggcttgtataaatattactttttatttgggtctgctatcattgtcatatgagtctcttgggaaaatgacacttttctgaaagtcattttgaattttgacatatttttgaaaattctgtagagaatgatcaatctccgacactggttgaaaaattcaatcgaattttatttaaactgagagatgctatttggcaaagaattatcaaaactaagccaaaaatacaatgaactaaaaaaaaaagtcattttgacaattatttcatgtataatatataagagagagagagagagagttaaggtagacttgaagcatataatttagaatatatagagagagaagtgctttgaatgaaagcaaagacacatgaatagaaatagatatatatgtgttacctaatagtattggtgaatttggtaaatacatggtgatcagatcactctaaaattaaaaaacttatcttacaaatcaaactcatgacttcccaactcacaatttggtacaaaacactcatcacattttttttctttctctgcttccaattcacaccaccacaccaccaaataccaaattcatcacataataataaaaatgtttctataataaca

SEQ ID NO: 216284 - DNA, 565 bp, Cannabis indica
tttctcctcccctttcagacaagaatttccagccatggcgtcgcaacttcgaattgtcggtcggtgctcgaaacaagacagggtttctcaaaggtactctgcctccaccaccaatcgacgatgctctgcacaaccattggcagcggtgcaaccagatggtcatgtcctggatcctccattccgtttctcctgatatcaagagcagcatcatgttcttggacacagctgcagaaatgtggaaggagctcaactcacgatatgaccaaggcaatggaccccgtatattcgagctttccgaagctttgattactcttcaccagggtgatgacactgtaagttcatacttcactaaactgaaatgtatgtgggatgaaatacaagaattcttccaagaattccttgtacttgtgctgcttttgtagataatcttgcgttcttgaatcaagaacaagttcttcaattcctaacatgtttgaatgagtcctttttccctgttagagcacaaatcttgcttatcaagccttttctatccctgtcgaaagtcttctccatgattatccatgaa

SEQ ID NO: 216285 - DNA, 590 bp, Cannabis indica
tagacttcttggccagaggagaggcgctagagctgtgcccattctcttcctcagagtgtcgatcatctgccgagacatgtttacacagaacaaaaatagtatggttagaagacagccatcagaaacacaaggcatgaaaatcaggaagctcaacaacaagataaagtaaaatgcaaggtgaccgcccccacaagactcagaagtccatcatcacctgacatcgatcttatctaagacatgacagctttcccttttccgaacacgggaggagatggccgaacaggtgaaatgggctcccttatgcgaattgcatgttcaataggcctgggcgaggccgggagtttcttcttcctcttcagtggagtcacctgctcttcctcaacttcatctttaggattcaaacgctcctgagcatattgcttggcccgtgcacctcccttcaacttagcttctcggttaagttgaatgagttcatcctccctatgagcttgttcggcccgaccagcatcagatttcctcttcttccccgccatggacttaggagtaaagtcctcgtgataaagcacatacctcacaaggttatcattgga

SEQ ID NO: 216286 - DNA, 1230 bp, Cannabis indica
ctagacccagacccagaccgagatgcggagccaaatcaaaactcggatcgggactcgagacacaaacccgagcccaaacacggacttagacctagactcggacccaaacccccagatcgggattagagactcagacctagacgcaggagccagacctaaattggggactcaaactcaaaattagaactagaatcgggacctaagaatggaactgggacccatgacacgaccctagtctcggtcccacacccagacccagacagggaccaggacccaagatccgaattggaacgagagtgggacccaagattaggatccgaatattgaccctcgacttggggcttggacccaacccgtagtcggcatctagatcttggaatcataccaacactcgaacttggaacaatttccaagccaagatccaaacccgaactcggacttgagacatgaaattggaacaagaaccggaatcaagaccttggaaacaaaaattggacctagacccataaccagatctagacgcggaaccgaacacggacccggacacagactgggatcaatacccagtcccagacccgaacctcgacccaaacttgcgacaggacttgcgacctagaactcggagcccaagacccatgatccgggaactggaccagaacctagacctgtgctagaacccagactcagacctagaaaaagacccggacccaaacacgaactgaatcccagacccaaacccataaccagaacaagactcgtaccataactcggacttgaactcgtgacttggacccggaccgagatcaggattgggacccaaacctggactaggaccgagacctaaacctggacttggactagaagctagacaaggatcgggacccaagaccgagatcgggacctaggaccagatacttggacctgggacctgagaatcgaattgtgactagacctagacaaggccaagacccgagagaaggaccagtactgaagacggactaggacctgcactcagactgggaccctaacctagactgggacctaggaccctaacctgaattggggatccagacccatgactcaggacccaagaccaaaacctagacctgagacccaaaacaggacccaatgtaagagctagaacatgaacacgatctgaatttggacccaggacgcaggacccaagacccgagggttagacccgaattatagtcagtgtctaaatcaagg

SEQ ID NO: 216287 - DNA, 200 bp, Cannabis indica
tatttgtctttttctttctttttttttaaaaaaaaaaaaaaaaacatgatgaatatatggtgaacctaactcagttctctgcctccgtactagctagaagcggcttgtgcgccgaagtaagtccaactccgggttttgatctcattctatttacagacagtgtattatacaagactattaattcaattttattcttaaat

SEQ ID NO: 216288 - DNA, 958 bp, Cannabis indica
ttccatcaaatcagacagctgggattgatttcatggtaaacccttaattaatttgttcaagtatttgaccgaaactaaaccattcataataatcattaatgaatggcttttttgtttttgtaaattgacgtggcatcattttgattccaccctttaaaaaaatagaaaatttttcattttatttttgttttccgagggaaagttaagtttcattttcttatgttggcgcgtcactactcatctccttccaaatctcagttttttttttttttttttttttctaattatattttaagtactataccaacttattattataattttttaaatcaacttttattctttaaaaatacataccaaaatatcttttttacaacgttatagttacaattaggacctcttacaaaaactattaattaatacttacgtaaatttaatttaaaaaaaaatcaataaattttaaaataagtaaaattgtttaaaattatatgtattgagaaccacaagactttttttttaaatgctaagtgcatatttatttttataaacatttattaggtatattatataaaaaaaatatttattatattatataaaaaatggatgacaaaaaaaagaaaccttctgtattgagtcaattgccatattcttgggccgaccatttataacatggatctactttaaaatttagtgaaatatagaaaaaaaataatattttaagtctttatttagataaaaaatatggtattttgtaaaaaaaatatggaattatgaaagtgcaattttttttttggtccctaggttggatccaaggtattggcgtagccaacttatgttcaaagccgaacttaataatattatttctgtaaatttttaaatagtttatggtactaaaaataagtttaaaattttttaaacacgcatgctacagtaaatttatttttagtattgtaagtta

SEQ ID NO: 216289 - DNA, 851 bp, Cannabis indica
aaatctgaattttattattttttcatgaggttatataaattgtagttatatatcttatttatttttttaaaaatttctaaataatttaaactttttaaaattctaaattctaataatttatttttcaaaataattctaaataatattgattcaaaaggtgtatatatatataaggtctctttaaaaggaggcgcccagtagaattgtaaaatttcattggatatggaatacagttttttttatttccctaaaaaaaaaaaaccaagttcataatattagtcatttgtatgcaaattataaaaatataaattacctgcaactgatttttcgaattctaattttggcaatataaattatgctaatacatccaaaaaaacagaaagatgcttactacaactgatgtaaattatcattttaaattaattgagttatataatttttccatgtatactgaaaatgaaaaacgcgtctatatttacggtagaagcaaaaatgatgctgatttttgttatatatatttttatataattttgttggttattgattgtttttagtatacatgcaatacactttcacaaatattcttacttatgtttataaatagataaagatataaatatgtgctttcacatttccatttgtattatcaatcctattgtttaaaatttattgacatgtaagttataacaaacaacaaagagagaatataaaagaggttggtgaatacaaacaaccgattaatattttaataaattaattcaacaagtcttcttaattatttatttttcttattattatttaattttaagtatagaaattgtaaactatattatacgtattagacaacttgt

SEQ ID NO: 216290 - DNA, 757 bp, Cannabis indica
aagatgtaaaatcattagagtttccttgaaaaggggaattaccctatataatttttctttttaatttttttttttttttccaaaaatacagtttagatttctaaagaggttacagtgctagttggaataaggtttctatatgattttttttgttgcgatttaggttgcaacgctagttgcaatagggatttctatgtagaattccgtaaaaatataaaaaaactcttttgaagtgcaaaaataagaaagctctttattaaaataggtgagtaaaagaatctaactcaaaatttattaaaaaggcataaatacataaattgtaggataatacgagaagatgaccagatttattattattataaattgggatattaacttcaactaaattatatgatttgtgatacttaattctataaattaattttttaagggcaaaatttatcaaacatacattttgttttgctatatatactttcattcaaaaaaaacttttaagtagctaagtaagacatgttacaacatacacaaatacaatgtgatatatttgtagtggtaaacgtaacattaattatttaaatataaaaaaaatatgaatgtaataactcatttaaaaattaaatttttatttttttttctcttcattttctttcactgtaaccatcttcacccattttctctcaacactacctccaacacccaccaccagtcttcattggaaccaccacaccagccccaactaaacccactaccaccacca

SEQ ID NO: 216291 - DNA, 872 bp, Cannabis indica
taatacacttcaagggtgatatatgaaataaaagatgataatgcttaaaatattatatctgaatatgtggtacttgctataggtatatgataagaaaagatacaaaaaaaatagtagcttgtatacatagagagtttaaatataattattatgattttttgaacaaatatgtatgcaacatctatatattaatttaaagtgtaaatatcattttggatcttgtattttgcaaaaattattaattgaactctttgttttgttaaatgacaaaattaactctgtattttctaaaatggtacaaataagatcctggactgatttttttccaaaataaaatttaataataatgtgatctaaaggtgttatgacaaaaatgtttacattttctgtatttgttcgtgttaggaattatcttcaagttggttatattcaaaaaaattgtcaaaaattaagcttagaattctatttttaccattttagaaaatacagagtctattttatcatttaataaaacagaggatccaatcggtaatttttgcaaaatacagaatccaaaatggtatttatcctaatttaaaagagaattatctcatatattattttttaagttttttttaatttaacgatttggattgtttcagtagtttttatatcagttattacgtgtatttttgttgtcaatttagatttgctttgttggtttgctatatgtgattttctatgtaaaaaaattccgtaaaaaataataaaaaaaaaaaaaaaaataaaaatgtacttacaagttacaaataaaaaaacaaaaaaaaaaaaacaaaaaaaaaactaaaaaaaactaaaaaacttaaaacttaaatttaataagttaaagtaaa

SEQ ID NO: 216292 - DNA, 630 bp, Cannabis indica
agtccacaatattaattctaacagccacgtgtcaaacattgctgcccacgtcatcaaggctaatttttgtgtaaatatatatatatatttaaaaatataatagatattgtgtttggtacgattaaatctatcaaaatgtattatgtagtgctatgctatgcattttaagattcctatactgtgatttgagaaataactcaaacaacatatgtaatgctcttaaataaaatagtaaaaaatcatatgatcagcaccataaatactcctaattgttcccctgtcagttcctaactcggtccttagcacaatccaatagttattatcacaataaagtattgaacttcaatgaaaaagcacaatgcacttgagctccaatttttaacactatcttgtgctcttccactaagaatcaaaagcacaatacatcaattctcacatatccttcacaagagtcacacaatacaaattatcttaattttaactatcaattactgcacccttatacttttctcacatgcaagttgtctctaattctctttcacaattttttttacaattaaaaagcctttttgattaatctaaaactgtatgtatatgtccaagaaacttgaacttattgccaccttatat

SEQ ID NO: 216293 - DNA, 571 bp, Cannabis indica
aaagtgaggcccatatccatggcaagccacttatatggtattttctatttaatttttccattatttcaatgcctaataaatcctaacctaaacctaggtggttgcctataaatagatagtgatggctcacacttaaagatgatgaaaattcacctttagtagaattttcctgagcctttcttcttctattttcgaaccagccccttctctttctctcttcatatttttcataccttgagtgatagagtgagtgcccacacacatcaagtggtatctcaatcatagtgtgtaaggctatgaagaatccaaaatcaagagaaggacattcgagctcagatcatggtgatactctactacagacaagatacaagggttagagatctgagtggaatgagccattaatattccgttgtacccactataaggtttcttaaactttatatgtgtttatttacattgttttagaaattcatatttaggattttaaataacatacatggtagtaaatctagatcctggtaaaacatattccaacaacgtgccttagagtcgtggtaatgatttactttca

SEQ ID NO: 216294 - DNA, 1146 bp, Cannabis indica
catttttcatcattgctcgccttcagtaccacacacattaaataagggtcatttcaatcgacatgccatcattataacattttttgaaggacgcacctcctacacgcatgtgttatcaacggacgcattaaaagcgcaacatgtatgccacgttgtggcactatcagttcttggtcctgtaattgatgatagctcaaggaatacatccgtgatcccagcaatcaccacatgttgtaaacttatctccgtgagctggaagaagactgcaagctcccataactcgaacagtcgcagaagcttgggggtaaatgttatccgtgtttctggacaagtgacacgacacatagaaaggagagatagtctcataatcttgctaattaaaatcctttaacaaactcagtcacagagaagcctcactgatccggtaacaggtcaagattgagaggtatgatgaggtctacattgccttacttcagcttccttgacatagaagacttattaccactctggactcggagtggcccaagctcaaagtctgcccaaatgatacctagacgggtacttgaaaggcctatcgcggacgttgactgccccaaagaatcgcgaatgtctaccttggatgaaaacttggatcgcccagtgacgattatgcttttttgacacaaaattagatcttgtcccttgtgtcttgacatggtagtgcgcgcacctcatacacatttttaccagatggttattccaagcatctacttttcaaggtcaaaccttttagtgacacgcgtccattacgtataatggtccctttttttttctagctgctgcaatgcacgagcacaaacccttccaaggggcccaatagtcagctctttttgcatgtatttaccccattagtgggctctttggaagaaatcttaggcgggtcatgggcatgtccataccccccgacaacctaaaaatacccttctatttcaatatgaagaggggatcacaacttagagccaaagctctgctcatattattctaagctttcctcttctttaagagaaacaaagaatacagagttaggattttctgcaaaacattgtaaaaatagcatatacgccctttgaggctaatagaccaacttgtggactaaggtttattaat

SEQ ID NO: 216295 - DNA, 975 bp, Cannabis indica
ccggattggtgcaatccgaaaactgaccgaccaatccagaacctatattaaaactgatcattttgaacctcagtttggtcggtttaaaccgcccaaaccaaactcttttttttaaaaaaaaaatatgatctaacttattctataaacacattattctacattttataactacaaacatacaaattaattgttcaaaaactaattctcttattcttttaactttaatattaataaaataataatatattattatatattattagtaactacaatacataaagcaaaaaaaataaataataataaattaatatatatatatgtataatggtcgattttagttttttcggtcggtttattactaaaaaaaactagaccgttcaatggcagttttaaccgttagcggtttttttagttttcggtttccatcggtttcggttccaatggtgttcggtaggtcggcttgaacggttttttcgtattttctggattttatgctcagtcctattagtcgatcttcgggaggaagattacaaagtgagtcactcttcggaggaagattgaaagttacacactctttgggcgaaagattgcatgtgagtcactcttcgggatgaagtgtgcaagtgctatgatttaaagggagttcaaggtctcgacactgtagaaatttgattagaagaatagattacaacagttgcagcaaattcaaagagggagtctttatttgtataaatttagttttgtaatcacttgacattcatctaataaatttcattctctgggcgtggcctcgtggataggagtaattcgaaagacttgctaataccacgtataaaatgttatgtgtcattttattttctttattttttactttctgtattatatatctattttgtcaaattctgtgtttgatagaatagagataatttatgttcatacaattataatacaatttcgcattatttaaattgtttg

SEQ ID NO: 216296 - DNA, 668 bp, Cannabis indica
attaagagcaactaactgtttcttgatgttggattgcaaacggttaggttagttaggttctgaactgattttaactaacttgtttttaatttagatgttattttcatgttacttttatgtaattttcttgttgttttcgtgttatttttatgaaaaactttaaaaataaaaataaaaatctttaaatgtaaaaaatgtaatatttttacaaaaaattgtgtcttacgtaattatctctatttttatgagcaaatattatatttatataattttttttaagaattactctaaaacatatagtgtacattaagtatttttaagtgtatactaatatatgaaaaactattattataataaataaatcaaatatttaaaaaaagattactattaagaatattataacttaaaaaattaatggtaattataacttaaataaaaagtatatttattatcattatgtatctttttacttttatacaaatgttaatatatgataaaaaaaaaatgattataaaatctttactattacttttttttttataaaagtgattaaatatataatacttcaataaatattcaaaatattattatatgattacttcaatatggccattttttatatggtgatatatattgtgtgaaaaatttaataatatatatttttaaaa

SEQ ID NO: 216297 - DNA, 813 bp, Cannabis indica
taatataataaacaaaaataacatttgttgtgggttaaatttgacacaatgttatatcttgtgtcaaatttatcacaatttttaacatttgttaaatttagcacattttttagaacatcattggagtattagttttttttttaagatcatctctaatgggtggtgtaattttgaattaaatttagctcaatttttgtatttgtgctccaatgcataagatgtaaattagaagtcaacactaccattaatgttcattgaaaatatacaaaataataaattttatttatatcattttaatatcttacaaatatatttttttcattaataaatagtattaatgagtgacaaatagttaattaaaaaagttgtatttattgtgggctaaaatttgaccaaaactatctttcgtgccaaatttggcacaatttttagcttgggccaagtttgacacgcattttaaatcactattggatttaagttttagtaaaatattctaaaaatggcaatacaccatatttatatctctccattaaaaatgctctaagtgtgctaaaatatagcaatacgttacctttttgacatgctctgatgtatggtgtaatttataagtgtgttataaaatagagaaagtagagttttggtgatatattttaaaggatagagttttggtaatatatttctaagagcactcccatcaacttctctaccctatcatattaaatacttcaccaaaacctcattttatctattttatcaacatttatgatttttgggatgtatttaagcaccacaaataccaaccctgtgtcaatc

SEQ ID NO: 216298 - DNA, 772 bp, Cannabis indica
aaaccgatcgatgtacagccctattttatataatcaatatttatgaagctaatgttgattgttcaaaaaaaaaatatttataaagctaataaaaaattaaaaaaaaaataagagaattaaggagagaataaataatattaattaaatagattttagagcgccatgtcaccgaaaaaaataaataaaagattatattttatataattaatatttatgaagttaataaaaaaaatttaaaatgtatattttttttattgatatgtatttttttaaataaaaaattagaataataatttttttgaattgtatataaatatttataaatttattaaaaaaaaatgagaaaatataaaataaaatcaatagatgtattttaaatgattttactctaataaaaaactaaaaagtgagagaattaaagagataaaaaaaaaaaataaaaagtatatattttataattaatttttatgaagctaataaaaagcaaatatgtatgcggtacgtctagttgatgtctgaatacaagttttgaccaatttgcactaagacgactccagaattaaaccctagttgaggatgccaacttgggcaccaagtgaaaccttatgtgcccaagttggcttctgggttgcaaatttgtgtaattttagctctcgggcgctgaattaggttacttcatgtctccatggtacaaaatactgaaaaatagtgggttgaattcaagttattgaagtttgaacttctatctcagagttcccaaagtcaacctggg

SEQ ID NO: 216299 - DNA, 701 bp, Cannabis indica
gatgatgtctctattagacccctaaggttaatgtaaattatatgctagacttaagtagagagtgagggtatattggacaatctactcaacaaagtgggtatacttaaataaaatataatatgagagtatttttgattactaaatacaaaaaagtgatatttttcaacttatcccacaattatgacaatttaatctattctataaaagtgatatgtttgaaacttaattttaaatattaaggccttgttggaccttgaatttaagaggataaataaaaagaaatccaaaggatttaattttctcaattcaaattaaaacttgagtatattatatatttatgaaatttaagccaattaaaaaatacatatgaaaaaattccaaaaaaaaattatatatagaaacgtagcaaagaagataaaatgacactagcctatgtctcatatcaaatttttgtttttatgaagtatgtttaataaagttttatttaatactatttttttattaaacacgattttatgttacaactctttgattagcaaatgttagttaattaaaaaacaccgtaatgtacttaagttagcagggcgtgatagttgaatcaatttttgtcaaaaaaaaagtacccatccttttactttttctcaattaaattatatattttttttctaattttgatcatgactctattaaatttatatttt

SEQ ID NO: 216300 - DNA, 625 bp, Cannabis indica
atatggcctatcgtttataaatgatacacatatataatcctttataaaagctacatatatatacacatcaccacgaaacaggttttcttggtgtggtagaaagagaattgtacgtttgttttatttttttggttgttgtgagttattagtttgttactggtgttgttttattatatataatatcttcaatgttcctaaaagattttgacaaaaaaaaaaacaataaattagagaaaaacttaagtgaacgtaattgtgagattggatttaattgtacattaaaatatctcattttttttatgaaaaactagtgaggtctcacgtgcttcacacgtgtggctcttaaaaatatttatgcaataacattttgtgtctaaaatttacaatattatcaaattgtatcttttaaaatgtaaattatgatgataaaaattttgtgaaatcttctatttacaaaaatatagtacttttgttagctttttttttgttttctcttttattcatttattagttaatgtgttgttgtaattaattactttctcataaatattgacgcactactaaagtatatcaaaaaatccaacctaaagtatattattcttgatttagatgagaaatttgcacc

SEQ ID NO: 216301 - DNA, 605 bp, Cannabis indica
aaaaatgagttttatgtaagatgaggttgaggcagccaacaaagcttctcctgtttctagaatgacatgagggagcaggtggattttcctatgaccccaacatattttcatttgttagaagagacaaaatccagctgacatgaacatattgtattagtaaaatagaaatgtaacaagagggagctatggaaatgaagatgcaggtatttcagaggatatcagtatgaaggctagcaatggcaacatccagactgaaggatgtacacacctttgcagatcatggcactgagaggcaccaacaaatgatcagacaatgcagctaaatttatgaaaatatagaggtcaaccaaggaacaatgatgaaaaggaaaaaaatcccttaggaactgcatttaaacttaacctaaaatgttttacctggaattaacctaggttagatcaggcagaataggcctaaagtattaagttcaagatataaaaattagaagtgacttccttttgcatgcttgaatttgtaaatgagtccttgtcaactggtgttcttactagaagggaccttagaaatcatcagtggaaccttgatatctaaccaacatcaagaggca

SEQ ID NO: 216302 - DNA, 610 bp, Cannabis indica
aaccaccaaccaataatggatgacctgaatgaaaatcgtggcttttacaacagtaaaggatggtgtagccacactgtccaacaattatagtcttcattatcaattgtaagtatgcttttatgtatgaattctattttattgatttcaaaattcctaattccttaattttttcttttatcaatatacatataaatgcaacatatataccctttacattgttaatgtatgtttttattatattaaatagtaagctttatcaggtgataatgttattgacatatataccctttacattgttaatgtatgtttttagtatattaaataataagcttttcaaagtcaaaaagtccaatagtcaaaattaacagcatagtagtgcacgtgtttgtatttctcatttccacttttttattaagtgtattattatattaaagtgtatttattactttttaaaactctatttatttttttaaaaaaaattaacagatacttttttagtctttccttttccctggctcagacgtctccttgctctcctctcgacgattgtttcatcttgctctttctgtaattaggttttttgttgaccgacactttttaactttgattt

SEQ ID NO: 216303 - DNA, 732 bp, Cannabis indica
tatttatgcatttatttttctttagctttacgttatttagtgtatagtgggggcttgtaattgtttattaaacaattttgttcaaaaaaaaataatactaggaaaagaggtttgatagggttcaaactcacgcccttaactaataaaatcttatctttctctaggttgtcactgtgctaggccaattttgggtatattaattgttaattttaatgaaatataacatttttttttgagaaaatcaaaattaaatataacatttaaataatgaaatattcaaaaaatttaatgggcccgtaggaagtgtgggccctaggcatgggcctagcccgcctatgcctagggccgggcctggatacctggcaagctgacacgtaacaaggaaatttgatcatggacgaaatgttacaccagaatgcaccaaccaagcaggacaatgacgaatgaaattgaagtataaatgctcaaaaaaaattatcacctgaacgggctcaagatttcacctcgcgctaagcgatgtgagcaagtcgcataacgtaaatagccgacctaaggacttcgctgaagatattttacgatactttcctttaccgtttccacaagattaggaacaatataaaattcttattttcatggaatttgactgaacagaatgagaaaatcatgggattcatattcaaaatgcacattgatctttctcctattattttgagaataaatttattcattctc

SEQ ID NO: 216304 - DNA, 501 bp, Cannabis indica
tatgtaattatccctaaataaaaatacattagtcaaagaaggaaaaaaaaaacattataacaaataaataaatattgttacaaagtttataataaaattttactacaaataaatagtattgataaatagttaaaatagtcaattttgagtgaaaaattagaatactcatcttgtcaaaaataatagaaggatcttgaacgcaagctacttcaaataattaataacttaaatgactcaataattttacaactctaataaccaataaataatacacttaaataacaaataactaataactttaatagtagtaaaaataatctactttataaaaaataatacaataaatttagaagtaaccttaataggctatacaaataatatataacaatttaaataactaaaaaatacattataaaagaaaagtagaaaaatacaatagtataaaataattaactaacatatataaaaagaataaaataatttaaaattaagtaataataa

SEQ ID NO: 216305 - DNA, 556 bp, Cannabis indica
ccggtcgtacacgcagttgcatttgccggaggtaaggtaatcttaacttatgtttttctccctttgccgaatgagatactttctcacctctggttttctctctctctctctctctctcttttagtttgttggaaaaatctcaggcagggtcgtcgctccgtcgtctccaacttagaatttaggtttacgagagtagctgctgcaatcatggtgagttatcattggaatttgaaaagcattcgtctttttctctttttcgctttcattacaaattctaacattgttgctatgtcttgatgtttcaggccgaagttgaagctgatgttgctgttgcaggagttccgaagaagagaacgttcaagaagttctctttcaggggagttgatttggatgctctcctcgacatgtctaccgatgagcttgtcaagcttttcactgctcgtgctcgcagaaggtaattcttcagtgcagagattgttttgtttttgttgttgtttttataatgattgtattagaaaaatgtgtaataaatttcgaacttatgggtggtaattat

SEQ ID NO: 216306 - DNA, 525 bp, Cannabis indica
aatttattaatgaaaaaattatatcaaaagtattaaaatatcaaaattttaaattgcttgggaccatgtttgccaaccaaaagtagcaggagggattggtttgaaaaagattgtagaatggaacatagcagcgatgacaaaatatgtgtagacaattgcgaataagtaagacaacttgtggaaaagatggattcattgtgtgtatattaagggtggggattggtggaactaccaagctccaccccaagctagttggtattggaagaaattggttgctgtcaaaaatcaagttaaagcttctatggacatttagcaatttgcatttgttcataaaagatctctaatggttacaaagtattttgtccccccccccccccccccaaaaaaaaacccaaaacgtgaattgaagtcatgaggtatagaatagacttaacattcctagacatagtttttgcttatggattgctgtataagataggctcaaaatcagagaaaggctgcataaactcaatattattggtgaaa

SEQ ID NO: 216307 - DNA, 527 bp, Cannabis indica
tgaagaacccaggtcgaatgttcaagtgttgccataaattcaaggtttgaatttgttgtccccattttttttgctttctttttcgtttgttccaatttttttggattttggattttcttaatctgtctttgatcaaggacttttatatgagggaaccaaaatgtaaactaatacaaaaaacagaaaaaaaaaacctttaccttttgagaagaaaaaaggtttgtgtcagtgtcactatcaagttgatatttataatataaacaagaatttcgtgataagtaatgttcgtcagatttattttgcaaaatttaaagaagaattataaatattaaatcgggacaaagatagtatttgattgtgattattattttttttcttttcttttgcataaatgaattaatggaattagatgtaaaattaagatatgaaatggattagtttgttgtggttattgactcgaaaagatttaggcacgtttgaaagtcaatttacttaaatgactttaatttaatagtatgggatccaga

SEQ ID NO: 216308 - DNA, 509 bp, Cannabis indica
ctacacttaacaattgagttatgtacctattatatctatttatatgatccctaacatcttttccttcaacaaattttgaattcatataatagcttctttgaatataataaagttgttagggattttgatatataaagttaactatttctataactcagacgaacatgtttcattccatacactatactttaatttaagagtcaagcttaatagtgcttactccttttgcatataattccttccaatcttcattagtcatactctcaggcttcttttcctacagtacctttaggagcccttgttgtatcaacacatctttcactgtgctctgccataaattgaaattattcttcccatcaaaaagttcgatctcaaaatttttggaagataccatctttgacattatatctgaactttggctttgataccactttttagaaaaaaacaataaacttcaagcgcagaaaaataacaaagaaacaaagtaaaacaatttactcagtttggta

SEQ ID NO: 216309 - DNA, 656 bp, Cannabis indica
cattggaagggactgatattgtaaaacccaaacaaataagcacgctacccaaggtgattaagaaaccctaatcccctaaatgcgattattagaaagataagcatgggtaatttaaaatttcattgaaaacataatgaaaataaaacttgaataacttaactttacaatcaaaatacatgtttcgggatccaaaaatattttacaaatattacaagccttttcactagccgacctaggcggtaaaatcagagtttcaaaagtacatcattggtagtccccaaccccgcttggtctagtgtggcccgaacctgtacatacatcaccgaactctcgcactcatggctgatccgagacacatttaccctttcctgcacaatagagcacccgtgagccaagcctaacaaaacacgaaaaaatatcaataatcataattaacacatcgaacaaatattattgccatttcacatttttctgtatgacacagactcacgtgttacgctcacacacctatttgtgtctatgtggcatagacctacgtgtcacactcacacgtttaaatacaataatgccttagaacggttcatctcgattctaattaccgagtccgacccgattatgcgttgaacgcataaaccttaatctcaatatgcatatac

SEQ ID NO: 216310 - DNA, 477 bp, Cannabis indica
ataacctcagcaatttaattaaggccaaataccgattgaccatatgtaaagtgaaataattgtctcagcttctttctaagttgcttcttaggtttttttttttttttgaattgagtattaagagttttgtttcttaattttatttttttttctttttttttttttcctcctttctataattttaaaaaatctttttcaattacattattgatcatttgagtttaaaaatagtatcattgtacctattttttaaggtggtcattttaatatgtgtaaaacatgcatattttttttatttttacccaaaaatataatcagaatcaaaaacaactactcggtttcttttataatttattaataaagtagtaaccaaattttaaatgcaaataaaattcaatatatcaactaacttttgttactataagattgtttgatatctcctaaataatggtctattttattagacaattttcgtac

SEQ ID NO: 216311 - DNA, 579 bp, Cannabis indica
gcagatttcgagtcatgttatctgatgctactcctacccaaactattcatagtgtcgtagaatggtacttctattatgtttttttacatgtatgaaagagaatgctgatatagcaatttaaactactgtcatgtcagcgccacatgtgtaattaatttgaaaaaaagataatttaaatttttgaatttagttttacttattttttattttttaaaaaaaactcattaatttatttttttcttactaatttttgaaaaaatacacatttttatttgttttaattttaaattacacacatggtattaatgtgtcaatagtaataaatatctacgtcatcattatgtttgctacttatgacaaaatttaaaagaatgaccattttaccacattgtaagtagttcaatgactattttaatggactagaaaaattacaaaagataccagtgttgtctagcatcctcctacgtgtcaatattgttattggtttaaactagtatcgagtcatataatttaatataataatttttagagagtatcgctagtcaatggcaacgcgatacgtttagaaggcgctgggca

SEQ ID NO: 216312 - DNA, 705 bp, Cannabis indica
ttaagcttgggaggaacaaacaacagtttccattccaataccatatataattggaagttgagactgtagagtgaagaggaggagaaaaagggtaaagatatgaagagcggtggctctttgtatgttgttttgtcgtatgctataaactgtgtttgagatttgaaaaaaggaaattatagaaaaaaataaattggggagtgagaatggaagggaagagtgaagtgtcgcacgatgtaaatgagttagggttttgtgggttcagttttatttatatatttttgaaagttaacgggaggatcaaacctactaacattgttaaatttaacagaatattctttaagtatattctgttaaaccaagaattgccgttagataagcacttttaatatataaagatatcataaggtcgtgacaacattgtcgattgtttgtattttcttgcgggcttctttctaggtagtgttttgagatcatatttgtttctagaatatatatagatagatatataggtttggggttaatattatattattattaatataatttgagttttatggagatatttttgtattttttattagaattaaaaattaaaaaataaagaagaattaaggagagaagagaaaaaaagctttaaagtaaatttaaagtaacacatcaccgcctcatacttctcttttatatatatatatagattattgggtt

SEQ ID NO: 216313 - DNA, 982 bp, Cannabis indica
  modified_base (920)..(920): a, c, t, g, unknown or other
cattaattaaaaacctataagtaaatccttcacaaatgttctttttttgtcttatccatgtaaaaattttactatatttgacacaaaaaataattttataataaatttgcattaatttttaacattatactctagtacaaaattacaaaactttatgtaaaattcaatatctaattaatgtttttattaaaactatgaaacttaataactttattattaatttaataagcaaaacaacaataataataataaataataatatatatacttcataacggagtgttatagttaaatctatatatttataaaaaaatgcacaaaacaagtttaagtggtatcttagattttttttattttatttttatcattgtgagatttttctattttgttagaaaaataataacacaaacaaaactaagcacatgatttcaaatacattaaaattaaatgtcccatattttttataaatcatttaggtgttatccatatgagttataaatatatttttagtatatcattttgatttgtaaattataaataaatgcaatttttagaaataaatacattgaattgaatttaaataataaatagattttttttctttcgtaaagttagattagaatagtaaatattgtgtcaaaatacaatatttatattgtgcgtaattttcattactttttggcacaccattaaagagtaaactttttgcaaattgagctataatttagtttttttatcacttatttgtatctctattgaatatgctcatataaccaaaacaattttcattaattattacttagttcttgtgtgacacacagctaagtaaaaatgcacaaatgactgaaactcaatctcaaaaatgataaatatcaatggaagatcaaaaaaagtcttagggagaatgatgtggcgctacnccgaatgttcaagttctacagaatagaagcagatatatttttgtaacattagcaatgacaag

SEQ ID NO: 216314 - DNA, 973 bp, Cannabis indica
atgacaaagctctggggttattatcttcctttgggtcttcatggaaggtagatatgtatttctttttcctttaaaagaaaaaaaaaaacattatctttatctttactaagtatttttagattgataacaatgtcgatattgggtagctcaaatagtcaagcatgtggtttgctcccacaaggtctgaggtttcgagtccctcttagtacctacataataattgctatagttttctggtctctaaatattgtagggttaggcggggatcctagtttcgaaaaaaggaaaaccaatgtcgatttcgggtgtctttgagtgtttggatttgtatttctttctttttttactttaaaaaaacattatctttatctataccaagtgttttagattgataacaatgtcgatattgggtaccaaaaagggtagctcaaatggtcagacatgtggtttgctcccagaaggtcagtgggtttttcgagtccctagggtacctacaaacaattgctatagtttcttggtcccaaatattttagagttaggcggggatgctagttttaaaagaaaaagaaactatgccggcattgggtgtttttgagtgttgttaatgttttcattctttattatcttaaagttttatttttcaatcgttgtaaatgatgaggcagtggaaggggttctagagctttgttgaagtggttcagaaatggagctctaattcatgatgcaagctattatgttcccatccaattggagggtccagaggtagtcattccatcctaaacacacattttttaactaactgatgttttgatcaatcatagccattggtttaggcttcaggaacttactgaaagtttctatcgaaaataaatattagcaatattcttatgttcttcatatccagggctctttattgtcaattctaaacgcgatgctagtgccttctcaacctggttattccggtgatgtttcc

SEQ ID NO: 216315 - DNA, 853 bp, Cannabis indica
ctgagaatgcttttgatattctgcaggaacactcaaaagaaagggatgttgatattcagtttcaagaaccagaaccagtcaagataagaggagggggagtacctcctcttcaaaatggatagatttctagcatggaatgtccgaggagccaacaaccaacaaaaacaaaacttgattaagcaattgattcattctcaaagtgttggtcttgttgggcttcttgagacaagagtcaaggctgccaaacttggagccttgtactctaatgtttttaatggaaggtgttttacgagtaacattgcatggcataaagaagggtgaatggttattgcttggaatccgaatactttcagcatcaacatactcaaatgtacaagtcaattgatccatctccaagtctctgctttggatggtaagaattttcttgtcacttttgtttatgcattcaatgatgaggaaggtagaagggctctttggttggatttagaatctcttaatacccaggatgcatggattgtgttgggagattttaatgatatattgaatcaagaggaaagagttgggaatcgggtaaaagaacatcaatctcaactgtttagagattgtatttcttgatgtcatttaaagatattaaaagtagtgggaagttttttacatggtgcaataagcaacatggaggggatcggatatacttaaaattggacaggataatggctaacttgaactggttagacatgtttccaagagccgaggctatttttatgaatgaggggatgtttgatcattcaccagccctcctcacctttcattaagtgacacagatggggaacaagccttttagatatttcaggat

SEQ ID NO: 216316 - DNA, 521 bp, Cannabis indica
ttttttcgatttttggtttcgttagttttagttccaacagtgtttgatatgtcggttagaaagattttttttcgattttttggatttcatgctcagccctaatttcaagtgtagaaattaactaataggttatggttaacactcattttttctcaattacccttaattagtttatttacttatttatttattttgaggttaactatttacccttaatttaaataagagtaatttgcagcgtaaatacttaagtttaacttttacttataataagtcactaaggctagcttagtggtgagggagggatgggaaaatagagaggtgatgggtttgaacccaggacctttaagctaatatataattgtgaaatactaatacgttacactccaaaaacttttagttataaataaatacctaagtttcatttttgatagtaataatactttagtaatatttctaaaacttctgtaggtacctgatttattaagtttgtaagtctattatctacgtgttattttctt

SEQ ID NO: 216317 - DNA, 589 bp, Cannabis indica
agtttggatgagtaattagatttgattttgttatacgtaaaatatatatgtatacatgaaaatttacatttaatttttttttctggattggatggatccaatccaatataatatatactggacctaaaatattagatggtttcgatccgatccaaaaaaaaatactatagctaggtctaaaattttggataaatccaaactaaatcaacaaatatatatgtaatacatctaacaaatagaaccaatctaatccaacatcaaatggatgttgaatcgattggatgactgaaattatttgaattagatcaaataataaaatttaacattcaatatataattagatcggatgtggatatgaacacctgcaataacaatatatcatctgttatagtgtttgacacattaaattacttttactatttcttcatgattatgtagatgaaaaattacggctctaatggtgaaggcagatataataatacaccaaaaaaaaacattttctttttttaaataaaaagtggtagcaggtgtgttagcatgtattttataaatcattaaaaaaaaaggcattttacaattttgtatacat

SEQ ID NO: 216318 - DNA, 523 bp, Cannabis indica
tgtaagattatcactattaggctaaagtttttattaacaaaaatctgcactaacacctggcatccatatattgcattgcctaatcaggcgagcccatgctataacctgacatccatatatcgcatcgcctaatcaggcaagcccatgccataacctggcattcatatgtcgcatcacctaatcaagagagcccatatattgcattgctatggcctaatcagacaatcaacaatcaagaaacctgccatgccatgtggtacattatacttttcttaccataagttttagtttaggtgtgttggccgacttgcttggagaatgatcaatgatcctaggtcctatgtcataacaataaaagaatgattaaccaagtaatttaacctattccatgccaaaaaattcattcccaaggatctcctataggtcactagggaatccctacttcaaaccttaagcaaatacgaaaactggggttcaaaaacactactagaaatggtctaccatttgtgaaacggttaaccgt

SEQ ID NO: 216319 - DNA, 900 bp, Cannabis indica
atgtatggagtatacattggacttgatcgattttcacattatataagatatcataaatttactgttatatctttctaagtcaatatcacttagttgatcttaggtcaatagatcttaatcttgagatggttagattctggcttaatgtattattcatgttctttgacttgttcgttaaagttgaccaagtggatgtttccaatacttacattttgagaatgtggcagtataattaagtgggagcgctaatcatagatatgaaatctatagcttctataactattagaagtgaaacggtgatttccttcgagcttggcttaacgcgataaatgattgagcgctcattctagtaataatattagtttattgaaatatcatttacaagtagctaagtattttaaggataaaatacattgaacggtagaacgaaaaatttgtccctactcgatgtagatcatctatagagaatctttgattatttggattgaaacaatgggtaattcaaatcgcatctatttttggtatatagagcattctatgtaattaggagtacaattctgaatctatagtagacttaggagaatttaataagttagaaaatatacttagtaaatttcggatctacttattggaagcttgattacatggggtcatggtccccacactaattgggataatattattttgtagtctcaattaattggttttaattaatcaattagaattctaaatgagattatgtcttgtttgtgaattttttactcagtaagggcttatttgagaagaaaaaaagatttagggtttatttattaattaagagactttgtaaggtctaactaataaataagttaaatgaccattttatttgataatcaacaataattattaaatagatagaat

SEQ ID NO: 216320 - DNA, 586 bp, Cannabis indica
atgaacaagctgaaaatagggtttaaataattgattacactcgactcttttattttatacatgtgtgaaataaattatttgaatcttattttctgcatgttaattttttttttaaattttttaaaattttaaactctattatcttaaataataataaggtagactagtataaaagaattgaattaattttttatatatataaataaattatttggctcaataaatatatgacaatatcattaattttttattcttaactttgaaggtgccctcttatctgtcaaaaaaaagttttctattggcattaatagtaatcaacaccactatatgaggtgtcgtatgtatgtcatgtatatgattttatttgatattaaattacattaataatcctacatatttgtatcatgtagtattgaatatactttaaaaataccttatcaaaatattaattcacttatattagttgaaattattaatagtacagcctaatactaatacaagatgaccctttgcaaagattagtaatttctttataataattactaaattaaaatatgtggtacacgatacttaattatactaatag

SEQ ID NO: 216321 - DNA, 950 bp, Cannabis indica
ggtctagatccaccctgggtctaggttcaagtttggggtctgggtcccagtccaagtctcagtctgggtcccaagtttgggttagggtctcaggtccttggtccagagtcctgggtcccaagtaccgggtctgggtctgggttcgggttcgagtacaagtctaggtttcgggtcttgggtccaggtttgggtctgggtcccggtctgggtctcggtccaagtcctaggtcccaagtcccaggtccagatctcgatctcgagccttgggtcctgttctgggtctgggtccaagagtcttgggttcgggtctcggtcctaagtcccgggtcttgggtccaggttagggtcccgggtctaggtttaggtctgggtccaggtccgggttccgtgtctggacccaggtccgggtccaagtctgggtcttcggtcctgtccgaatcccaagtccaggttcgggtctgggttcggcacttgggtcccagattcaaattctagtctcggctctctgtttgggtcttggtccgggtccgggtctcaggtcgagtccctagtctgggtctagtcctaggtttgggtccggtgttatgtctgggtccaggtctggtcgggtcgtggcccgaacccggacccagtcgggtcgggtctggtaactaggtttgggttcgggtttagatcctgagcgggttcgatccgagttcggatttgaggttcgagtcttgaatttaaggttttttttttttttaatatttgagatccaattagtatctgaatgttttggatcataagagatccgtcaaatcaaaattctaacctgttccactaaatggatctttttgacattcctaatattttgcataaggccccctaaagttcatagcgagccctattgcaaggtctctactaaatactaatcattgttcaaaaaattaaagagtatagataacatatat

SEQ ID NO: 216322 - DNA, 489 bp, Cannabis indica
aagatgttcactgttcgatctttttgaagtaggatcaacaataatagccttcttaagctcaacatcagctgaatccagtttcaattgttttactgatcccaacctctcattatctaaggtgtatagcttatcacccaatgagctgttttcatcatccatggaaggattcaggtcctctctagatgtgttatttacttctgctttcttagagatacttgatccaacgggtaattttccagtaatcgtcccacctacttttgaagcagaaaatgacttattaccctgtttggatccattgtggtttgttcttcctacatgagatttttccgaaggaagaattctagccgtagactcaattttcctctgacctaccaacaactctaatgtctgtttttgcctcttttctccaatactaatgttcctttctttaacagtgcacttcattttttcaacaataggaaactttacatggttcctcaacggagtacc

SEQ ID NO: 216323 - DNA, 719 bp, Cannabis indica
gcagttaaaacgaattacgtttattgcttcataaaacgtgttaaaaataaataattaattaatatataaatatttattttattaaacaatttttttctgtaaaaaattaagtgacaccacacccgtcaactttgttaggcggacggtggtggcacgcgcgtgtagcaatctattgtatgagtcatcactcatacacacaaaacaggataaaccttatatagggtccaaacccaaatttcatagttgcaacttttatgcacttccaagaaagtattcctatcccatgtaattcaatgcaatatcacacacttcactactcatatattatgttaaattttaactaaagttccaacaattcaagtgaaaaacaaaaaataaataaataaaaaagaagacataaaatttgaatccaatatcatatatttagacttttaagcagaaataagagcagtagttgagggcttaaagacaatagggatacaagcaataacataaatagtaaccctagttttgaccctctttaacaccaaagccttgtcattaccccaatgaatcattgctatgatgattctctttatggtcttcttcttcttcttcttaatattgttgtaatttatcttgtgatgatcttccttagcaatatgttgttcatttcctccttcttcttcttcttcagtaccccattgaagagggtaactccttaaaaaagcccttctgtt

SEQ ID NO: 216324 - DNA, 584 bp, Cannabis indica
aataacttgataaattcatgaaaattaccgaaacaaactgaaactcaataaaatcagtcaataaccatttaaaatcaatactaaatcacataaaattaatttaaaatttgctgagaaacctagatattttttataattaatttgtgaaataaattaaataattcacaataattttaaataaatttaaaaaattatgaaacttcatcaagcaccttagaataaaataaggaatcgaaatctacaaaaatatgtgagaaaaacacctcagaacttcccataacacggtcgccagcgttcacgtcggtttcgtcgccgacaaagtgtaactttgtccctgattgctcttgacgcgtcttttcgaatgggaaaactttccacagtgcttaggacctcaaaacgatcaagaactacccatgataacaaccccaatgcatctgatcggagtcgccttctccaactccggtgtactgttgttaatgttgtaaaaaacgacaaatttcgtttaagaccttaaagctctgattcttcaagctgaatctgatctttggggtcccataatcataaacacaacctcctttgatctc

SEQ ID NO: 216325 - DNA, 778 bp, Cannabis indica
gttttcatattgaacatcatatatatataattctttacaacttttcatttataattctttttcatttattttattctcgtagtagaattttatgacataatttgagactaatttattttttatatatacatttttaggacatagagtattagtgaaacaaaagttttttttagagttttgactactatttatttttttaaaaaaaaaaatgccttcaaaatatcaatggtaactatgtatttactttaatttttgagaaatatattattaatattaaaaaattaaaaatatctatttttatgatttttgtaataaaatcctaatatttggaaaactcttttaaatttaaactcatgaatatcacatgttcattattaaaaaatatatttagtaaaaaaataactaacttacaaaaaatatccataaactaaatatacatgctatagaaattataattttttttttaaaaaaaaaaaaaactaaaaattataaacaaaaatataattataacttaacataaactaatcatgcaaaaactataatttaaaaatgttaacattactaaaaaaaaaacctattaaaaataaattaatgaagtatattaaaaataaaataaaaaatgatgttttcttataatattaatcaaattaatcaaatatatttttacatacaaaaaattaaagtatcaaatattactattatttatgtatatatgtacataacattaaagaataaaacgatgacattacaaattatctattaatttttaataattttt

SEQ ID NO: 216326 - DNA, 532 bp, Cannabis indica
tatttttcagatctacctaagtaaaaaaattcaataaatattaaattaaaattcatatttagttcaactaaattaataattttaattaaatatataaatataaaaataaatagattgaaataaatatataaaatgaaaatacaatttatttaaaaaatattaactttaattttaagatattcgatctccattgttaatcttacatggttattatttttaatgggatctcgtggcgcttgacgtctccctgaaggaaggtcatctgttagacataacaccgtaagatcttgaaagataagtattttcatggattcatttttgaatagattcatccctaaagatgactgcttaaaaatgatttatgagtatgaaataatggtaaaagttcataaaataagaatgactctgactctcgcctaaaggagactactctatttgattaatgatatctttaacttttgcctaaatgggacattatatcaatttgttgaaaatcttagaaaatatttgagtagagatatgtttgttttgt

SEQ ID NO: 216327 - DNA, 687 bp, Cannabis indica
aatcaagtaaaagaacgtccgttgagtcgttctttttgttttctttctaagtttcttttttttttgtttttttttttttgaattcggaccttttttcagccgttagagaggttaaaaacgataatttacttttgtttctttaatttagttttaattatagttttgcctctaaattatactattttctcacattacccctttaatttgaatttactcttaaaaaaatatcattttggccattccagtttaggttcattaaagttgaaaataatttttggaaatactactgagtgctgatgcacctttttctacgtttgatatctaaataattttaatttaatattttatatgatgtacacatttttttaataacatttcataaatttttaaaaaatttaaaataatatatacttcaaacaatatattattatttttattgtaaattaaacaaaaaaatttcaacttcacaaaatgttttaaattttttacaatatatatcatcaaaaataattattattttaaattttatagctatttaaatattaaaaatacaaaaagtaacacaataacttagtaaaagctcattttctgtattaaatcttattgtattctattatattaaatttaattatatatcatagttttatataaaactatattttaatttcttatatatatatttttcaa

SEQ ID NO: 216328 - DNA, 1013 bp, Cannabis indica
ggacttatctgataaagtcaacccatgaagccatgcatgtataatgagctaggtgaagattttaatcacgatgatagttgttcataccgtgttctctgattgtggatagttaatacgatactaattatttaatcttcaattttaacttgatattattttctgtctaagatctgaggaaagtgattttcttattctgtacgtaatagtaaacgaaaaactacagctggcttccaaatgcacgccaaaaggttcttccggatacatagagctaggatccttccaaatacggactagccttggcggaagctcacctaagcgagcaatgtgattgctttctcagaaagctagataacaattaggctcggcccaattttcgttattttgggcccaatgatgggctttaaacttttatttggaatccacatatctcttgtcgaaaacacgaataacaaggatacttaaaagattatccccaaaaatagatgtatcacgtttaaaaaaatgatcactttatttttttcttttaaaaaagacattaaattctatatatatcctaatttatttatcttaattttataattcaatttactacttaattttttttttttattataagttctctcttattttctcatgatggagtgttcttctcttaccgacttaaatactgatacaaatagttagaacataaagattagaatttgtagaacgagggagtctctaaatactaaaaagaatgagaaattgataagtcttgatatgattttttataatgagaaggtgattattatttttattcatattttttcttctatttattttttttttatttaatcaattattaaatactcaatgtgtctattatttatccctacaagaaaatatactaattcatgcaacaataagaaaaatttaaatacttaagttcttaacctattgaatgaaggttcgtctgcaaaatttaaaaattaattgcaaccttaactgagtatagaccattttcaaatgattat

SEQ ID NO: 216329 - DNA, 600 bp, Cannabis indica
aagctgaaacaccttctaatacacgttcttatttgttgttttttattactttttttttttaaaaaaaaaaaaacttagacaacaacttagatgatctcctcctttctaagaaaacatatatgtgtttaaatatacattcctcttgagcaaatcagtaaacacacatattatttatttttcatttgtttttgagctctctctcccctattcatcttcttcttcacttttttttcttttttcccaagtctacaacattagctaaataaaagctaaccgtatctttttgtagtaggtaacaaaaaaaaagagtatgtgaaggaggaggaagaagaagaagaattggaaaagataaaagtgctttttttattctgattttttaggtgtgggcttgcaaatataatcgttattgcatctggtgtttggggctgtgcagaggatgggtcagtttttttttaaatcctttttttcttctattattttatttatttgtttttagtgtttttctttacaatttgttttatcgttatttatttcattttgacgtttgatttttactatttcttgtctccatctcgccagattaatagttgttttctaggt

SEQ ID NO: 216330 - DNA, 1107 bp, Cannabis indica
atacaccttatatattatattattatctcatatataatattatatatcttactatatacactcatatatatatatctatcatatattatatcttatattatatatatatatatatattcttatatttacttttatatttatatgtattttgagcattgagttgttattctagtcattttttcatttttttttatctacttgtaattttatgttttgggattgtaacttttatttaatccttttggtccttatattattttgcataaaaattgttactttcttagtcttattattattcatcttttatttttcttccattgatatctcatatttttttaacaatccaaccccaactttgagagccaataaactgagaagaatttttttccttatttcattataaactggaagaaagatacaatatatgttattttagaaacctaaaaattaaaatactaattgattataaatcaatttgaatgaattctaaataatttattgtaaacacaaggatttatttggtatgtcacattaaattgtattgtattgtataatattatattaaattgtattgtcaattataattttatataatactatatataaaaatactgtatgtgtatatgtatatacaaatcaatatcaaatataatactatagaaaaatattgtatgtgcatgtgtatatgtatatataaatacaaattaatattgaatataatactatataaaaatatgatatgtaatacaatttagggatatttttactcaatctaactaaaatcacatattattacttttttagtaataagccgcattttaaataattttaccagattattttctttaatacttttctaaaagtttaaaaattacaaaattactacttacacattaattaatgttgatatgatgtacatttcactattattttttaaattttactatgtcaaacatgattttctctctacatcaggtcactcacatatctttttctttcttctttttgtttctacttcatttattttctatcttcattttctctttctttattttgtttatttttattaaactttttctaagtactacatttctctctctttattta

SEQ ID NO: 216331 - DNA, 643 bp, Cannabis indica
atataatttattactacggtatattaatttctgtactacgatatatctaatactgctgtatatatttaaatgatctaatatatttatttattttgttacaatataataatatgcaatactaaaaaaagtatatacttaatttggtaattatatatattttaaaaaatatgtgataaatctattttataattttattatctaatttattagtatttggtcattttcttaattttttaaaagtggacatttactaacttagttaccaaattaaaatcattttgcatctcaacccataaatatagttaccattaattttattacttaatatttaatagtaaacctgcatagttgaatgattagaggtggtttaataataataataataattggggagggatccttcctctcggggatttgggttctttttcatgtccactagtggggaccaattcacacgtgtatgcacaggttgtaaagttatatcatgtattcattggggtctttgttcctgataagaagatttgtttgtttgttttgctttgctttacattattttttattattatgttttcaattttttttttattccgaatgttattcagataacttgttattctacatttctacagtataaagatgtgtt

SEQ ID NO: 216332 - DNA, 951 bp, Cannabis indica
acaataacatagttaagttaatagagtgttaaggtaggagtgtacatcggttggtttagtcgggttgtagtgtatttttactaacctaatataaatgtcgggttgcaaatatttaattgtaacctgtccaatgaaaaaaaaaaaaagtgtaacccgtccaatgattttcgtcagtttggtcgggttaacccgtttaaaccgaattttattttttattttttcattatcgttagtttttgatattcaaataattgatttgaaaaaataaatgtatagtatagaccttttaagattaaaatggttatagtttaaattaaatttaaaaagtaaatacaaattgaataaaaattaaaatattaaataacatttttcaaaaaatagaataaaaaaaatatactcatatgtaaattctaactttcaaattaaacacaataaaatataaatttaaatgtatagttgaagtattaaacgtaatttatatattatattaataataattttagtaaaaaaatatgtaaatcggtttaatcggtttattcgggttatttgagtgtgtagaataatattcaacccgtccaatatatttattgggcggtttgaatttttcataaagttattcgagttgtatttttggtcggtttatttagtttggtttggtacgagtttgtacattcttttgaacagccctaattacaagcacaacataataccaagcaaaatattttataataccacctatattttgcaaaacataaaaaactacaagtgacaaaatgaaaaaccttaaatctggtgtaaacaaataattttacaaataagtggggaaaaaacctcataaaaatataaataatcaaacaatctcatactctttgtaattttctattatgtgattttgtaatttacaccaacaaattatgtaattaaggttttcccttacgtcaacattttttt

SEQ ID NO: 216333 - DNA, 709 bp, Cannabis indica
cacttctattttgttctcatccacgtcctcatcattcatatactaaaaaaataatgtatattctaatcatcaagatcaactacgtaagtttcctacaaaaaattaaaaactgagaaaagtattaataataaaaactgctaatttatttcataaattacaaaaaattaattaattactatggttggatcaacatcattattttcaccatcactgttcttttataaaaaaaaacaaaacaaataaatctaataaagaaataaatatatatacaattgttaaatgatatctacatttttttttcaatcatcaaccactattgtgtacatactaatacttctaatgtagaaggatgaagccttgatcgatgtgaaatcacgtgtctaccaccagtgctgaatgtagattccaaagtaaaagtgttgacatgcacaacaaccacgagactaaaagttgatcttgcacctcccaatcaatgaagatctggttgactcgattctgaacacgatcttcttcagtcaagaactcagctggtggtggttctttgatgaacctcaagagttgattccctcgaatggcagcaagaacttgctgtttccacaggagagaattgtggtcattaaggtgaattgagatgatgtgattgaagtacactggttcatgagaaggttgagctctggtttgagtagcttgagctccattgaaggtcgat

SEQ ID NO: 216334 - DNA, 346 bp, Cannabis indica
ttttttttttttttgaatatgaagtaatagtcaataagtaacaaaataattgttgtaaaataatacaatcataaagaattgagtaattatttcaattatttgagaggataccgcaataatattagctttagatgaataaaaactgctaataatatattatgaggaaagatttactttatgagtgaaagaagatcgataacaaggtgagaaaaaaataagtagaagagtaaatgtaagtaggagaattattcaaatattcaattctctatttacttagttatggagaatataattatttgtttcaaatctacttcttaaattagtaaaggaaaaactgaaaatatca

SEQ ID NO: 216335 - DNA, 776 bp, Cannabis indica
taatttttacattttttaatcaagttctttcatgctcttgctttcgagtcggaaacacatcaccccaactttatcttccttatcagtgaaccgaaaatagtgcataggtactttttaatgcagcagaactaagatgacgctcgatcaaactagaaattttataagagaagaaacatcatagcattacaaaaaaaaaaaaactcatgattacagattaatacctaagtaaaaattttagcggtaaaagtatattttgttaggattatggaacttccatggctatcttgtcgttaagtgtttacgtgtcactctgtgattggtccaaatcatttaaattttaatttttatttaaaatatagtttaattattaaaaaatagtttaaatcaaaatatttaaaagtcatattttaataagggatattggcggcaatattatccaaactacacatttagttacatttaacctcacaaactcaatttttggtggtaaaaccttttgaacctcacttttgttttgctcattacacatttatccaaaagcttcaattaagtgtcacagtggactgcccacgtatacacgtggtaaatctttagtagtctacgtaatattaattattaaaaaataattttaaatatttaaaaattttaaaaattcagaaaaataaataatttttttacttttactttctttttttttacttttttttttctttttctttctttctttcttctttctttctccttcttctttttcttatgaaaccctaatctctctc

SEQ ID NO: 216336 - DNA, 922 bp, Cannabis indica
acgtgtctttgtaaattaataacgttaccccctaaacattgactactatcaaattgtatcccctcaaaataaatatgagataaaagattcaatatttttttagtaaaacttaaaagattaatttaaatcttaaaaaaaaatcatttgaatggttaaaaaaattaaaattttaaaactaattaagcgatttaaaaaattaattatttttattaaaaatatcaatttagatacaaaaaaaagtattaaaaattaaatttttgtaaaaaaaaaataaattttacggaaacaagtttgagtctatttttttagtgtttgcagtgctggcagtgtagattttagttatttttttgaaccaaactggacatgcgattttgcaattgcttaaaccgcgagcacactacaagatctcaaaatcgccaaaacaacattgtaaaagtgtggtgtggtgtaagtggtttatgctttcattaaataaataaacaaataatatattaaaattttagcaacacaataaaaatacacgtattaaaatttctacaacacactaatttaaaatacaacaaaattcaaactaatatatacaatcttttaggacatgaatttttttttttttttttattaaacccgtcaaatataatttttttagggatttaaaaaaaaacataaattttttagaacatacaaaaaaaataatgttcaaatcttactttataattatatacataaactcaaccgtaattatttatacaagacttaaatcaatatgttttgaaacttaattaaaatttattttacaaacatataagttattgtataaatttatcaaaattcgtgcaatgtattttgaattacaataattaaatttaaaattgtcaaactaaatcaatacgtacgatttagcaaaaatacaaaccacaaccat

SEQ ID NO: 216337 - DNA, 1150 bp, Cannabis indica
ggaactagacccaaccctagacccaaaccggtactggtaccaagaccaggattagcaactcaaccccaaacccagacctagacctaagacccaaaacgagatccaagacccgaaatacaaccggactgagattcagatctagacccgagtctgaggcttggacccaacctatagtcggtctatgaatgtgtaacctatagcaagacccagacccaaaccaagacttggaaccagactaggacccgaactcagacccaaacccaaattgggacctggacctagatcaaagtcggaccaagactcttgtcctgaacccaaacccgaacccgaacttggacccagacctagacccaacccagacccaagatccagaccttgattggagatccacacctagaccaaaaccaggactcgagacccaaaactgggactaggacataagaccggaccgggtcagggtccgggtcctagttcaggtttagttctggttctaggtcccaatatagacatggactataggttgggtcaaaaccctgggtccctagtcacaggtttagatctacatctagattttggtctcggatcctagtttggtgccagttcgggtcttaggtccaggtaaaggtcccaagtctaggttcgaggtcgagtcttgagtcttgggtctgggttcgggttcgggtttgggtttgtgtctgggtctgggtgcgagtatgggactgttgggttttatgccccgcataaaactctatttcaatgtaatccattttattcaatatcaataaagaaacagaagtatttttcattcatttgtatgttttggtccatcttatcaattgcttgtatatttgatttataaattcatccaaacaattttcacatacttgatcctgtttattgtgttatcaacacagtggatagtaaacatgacttaaagattcctagatttatcaaaacactgggattttactgatatgataatctacaacagagtttacttgcatttggaaaaatgctatgttctttgcagagcattggttaaagtaaagcttgggttgggtgcatggagtatgcatcggaagggaccaatattgaacttggacatagattaattaaacttacgataatatctattcaagtcaatatcacc

SEQ ID NO: 216338 - DNA, 609 bp, Cannabis indica
aggcagactgtgttactatgtacattttcaacgattatattatgatagatttttatttgtaatattattatttgttgttttgttatattattttgtgaaatttataattatcatgtcacgtgaaattacaatgaaaaaaaaaatatcttctctactaaagtacgggccatgatgtatgtatatttagattatattatttttcaaaatgaaaaaatatagtttatttacatatttaattttattttaaatatgctattatttttttcttatcctagttgtatgtatatatttttgatatgggaataaattatataaatggcaaatgaattgattgagttctgatttcgtaactataattaatttcataaaatttagcgaaattatataatgtctatgttaccatataaaaaataattataattaatcaaaatgttagaagcaataaaaacgctttattgtaaaagaaaaaggtatttaattttgtctgtaaaaaaggtaaaaaaagataaagaatacaactattaaagataacaaaataattatttttaaaaatgacgaaataattaccaaaaaaaccaaaataaattatgagatgataacaaaatattt

SEQ ID NO: 216339 - DNA, 566 bp, Cannabis indica
gtagtctttgtgcattgtgatctgtgcaatagcttataaaagtagaatgcatgactttttgatgaaaaagattgaatcttgcactttcttttgatattttgaacttcggggttcgaagaacacaaagattttagcttcgaatgtgcaaatagggctacttaagtcgataagggacctttcctggtactttgggtctgataaagacctttcctagttgtttagatccatattgaaattctattcgattcttatagaaccacctttaggcttgccggttcttggggaaccaattttaagctggccggttaacttgtatttttatctagggtgttcatccaatccaatccatactattttgttcatagtgcatccgatccgcacaaagtgtgaattttagtttttggatcctatccgcacaatggctcaatccaatccgatccaatcctcaccgccaaaagtgcggattggatcggtatttttggattggttacttttttaatattgattatttaatattcttgaaaaaaaatatttttttctacataactgataacaaataaaacaaa

SEQ ID NO: 216340 - DNA, 568 bp, Cannabis indica
ttttgatttatcattaattatggtaaggaaatacatgtagatgtagctatatggaacatagattgctttttagaaaagtaaacgctaatctcttttcaatcaactcatatctagaggatcataataacatagtgctcttcactaatgatcactattttattcaatttggaatgtgatcaacaaaggtatcttcattctcgccattgacagagcttcgagtgtgtgatttggctattgtacgcatgaagaagatggtcaaaaggaaatgtagaaaaatagaaccgaaagtaaggattcaatctgataccatattcgcaaagagaatcatttgctaaaattctcattgaaaatgaaatattaattagagattacaatttatagagcagagctcttcacacaaagagaatgatagttataattctaattgtaacggactctaatagctttactaacaagatgccacatgtataatcgattataactacctatattaagagcttagctgactgtcttgatattttataaaattaattaagcgagatcatatgataaaatttaatatttaata

SEQ ID NO: 216341 - DNA, 784 bp, Cannabis indica
gctagccaatctgaccagatgccgtaagttctgtacttctagtctttttacgtttttttttttttttgtaaaaagttagaaagagacatatcttttacttttcttttatttagttatgggttgatgtagtcttgtttttttattggataactatcaatttagattcagtcttacaattatgttggtgtgagagagggtggtgaaatatagattcggtcgttaattatcaatattcagtaccctagaagttacccataaaagaaaattgaaagtcttcgggttttgcttcctactttaacaattctattttattgttggtgtttgtattgtttgtttacttgcattgtattaattatgtttgtttcactcattgtttaacgtggttttgagaatgatctttttattgtttggtgttaatgcaacaagttactttattctttaacgtggttttgagaatgatcttttatgtatatgtatcaactctggtattattctacataaattttcttgtttttttttttttttttggttatcttggatgttgtgtgttggattttttacataaaaatgaaaaactttgtataaaagtttattctttctggtatattcatgaaaatttgaaggaaatcaattcttatagaaaggaaatgcacagagaaagaaagcagaggaagaaagtattgatttattctactctttttgtggctggattccaggtatttaatctaatgctagattgagagttttaaatcttctaaatattgaaataaagacttaaatcctt

SEQ ID NO: 216342 - DNA, 712 bp, Cannabis indica
attatcacaaatcttcaagccttcggaagacctaaacaaatactcagatacactaaaacacaattaatttaaggcattgacaaataattttttttggcacaaggtattaacaaatctatatctatccatatctatataaatataaaaaggagaatcgtaaggaccttacgaccatgtagcattacatccttccaataatttatgttttctaatttgtagatttttctaacttttttattttattttctacttttcaacaatttttacacttttaatagtagttgaccttttttaaaaagttactcacatggtttagaaattatagtgggtttatacttctagattatatattgttatcccattttttgtcactatgatgtggcagcatgtacgagtgacatgtgtccatcattccttgcatttgggcagaaagatattccgaatagactttaagcaacatatatgcacgcacaaagtctacttatttgagcaaagaataaggttagttctccgagctgtgtccaaagacttgactactttagaatggtatcgtgaagcccaagcacgaaggcaatccctacagtcataggattgtatcagagggatatgggcaggctgtctcaatccccccatttcatgtattctaatatgtaataaatgttctttccaattatagatattgtaagcataagggaaacctttccgtcatgca

SEQ ID NO: 216343 - DNA, 710 bp, Cannabis indica
agtcactctagttattttgtgaattgtgatatgttctcttctttctttattaggcaaggtctccaacattgaattgtatttccaattccaaccatcaaaaccaacctaatttttaattagtaagatccactcaaatcacacatttttttagtattcttatacacaataatgtgtaacttatgtccaatttcaaaaatataaatgactaatacttaaatcccattgtacttaataagtgtgtaactttttgtgtcacacatttgtgttaaaaagaaaagaaaaaaaattgatacagaagagttatcttatagcactctaattagtttatctactttatcatttaaaatacatcattaaaattttattttctctattttatcacaaatttttacatttacacataatacaacacaaaaattctattttttctttttcaaattttaatatattttatttcatttcaaaaataatatttagagccatgaatagtaacttcttcagatcttttagagattttaattttaatgaaaactaactgaaatgaacctcaagttatgtaagtgtaacttctatttattatcaacttgtatattattataattattcaaatttacattcataaattttcgtcgatagaggatatcaaaaatatctatagcaatggtattttacaaagtccattaactcagagttcaactagagaaacctta

SEQ ID NO: 216344 - DNA, 956 bp, Cannabis indica
aaaagcttaatttctaatttaattatggcatgttgcagcaagattcagttgctcaaactcattacagcatccttctgcagaatgcagagacagttgccttagtttcttcgtgccaaggtttatttgtttcgaatttcacaacaaaaaactcttgttggtcatatttcacttccattagtaacttgatgtgttctgttttctcactttctttcagcaggaaatgaggtggcaaaggctattccagtgagctcactaaaagttggagatgaagttgttttgagagtacagggtggggctcgacacactggaatagaaattgaagaatttattgtcgaaaattaggaaagacatatggcttcttaagtgaaatttgaataagtttcaattagttgcaccagagaaaagaagaaatttcattggaaggaagtatttccttatttttttatttctttttcattctttgtccaatgaagtgttaaaatggtagtgtatagctatattttaacacacttattactccaataatgttataaaaaatgtgctaaattaagtcagactaaaagtgtgttaaatttggcatagatgtagcattgtacaaatttaattcacaataaatgacacttttttatttactatattatcactaattatcatgatttattacgtcaaaaaaaaaaaattatcatgattcattgacatttaaagtcactgcatgataaaagggatagtgcctcggttcaacattataaggaagtaaaagaccaactattcagagctattaatcagagagagtgttattggaaacagagatctaaacagttctggcttcgggaaggggatcagaacagtagttacttccacaaggcggctaccatacggaaacacaacaatcaaattaatgctttgaaggatgataatggaagttgggtaacatgggaaactggtttgcctcaagt

SEQ ID NO: 216345 - DNA, 624 bp, Cannabis indica
gatttatcgttgtttttttttttaaatgttctttttcctattctagggcatgtataaagaattttgacaaaaaaaaatggaaataataattttttataaattttattagaaaaaatgaaaactagctccgttaattactgtaactctttgaacaataaaacaattacagtacatgactcaaatttgtaaagagtgatcgtattttgcttttggtttatggttggtatttacaatcaaattaaacaattattttgatttgattttttataatttcaaaatgtgaatttgaataatccaaaccgattttttaaaatttatatatctcttttctaaaaaaatgtggttaatttaataaaaaattataattattaaaaaatgtctatttacacgaaaataagttagttaaatagttgtttttaaattttttcttaaaataaatggttaaaattcaattaatttttttaattaaatttctaaatatctaaatataatttatttattacaatataatttaaataattatttaaaagtatcaaaaaattaataatatttttatataaatttaatttaatttaaattagacgttaattcaaaatttattagttatatatttaaaattctaaa

SEQ ID NO: 216346 - DNA, 501 bp, Cannabis indica
taatgtgtgtatatttttttttacagaggttacacaagattgttgcaaaaatcgaataatgaatcttatcttaatcatcataaaaatgatattaataattatttttttacagaggttgtttatccaaaaaaaattatggagaaattatcggtcaaaacatggaaaattcagttgtatgtagatctaaaacgaacaatgagtgcaaagtactatcaattcaccattcaagcagctgagtcgataaaagattaagaagaagtttcactactctttttagtttttctaataatattctatattaagactttatttaataattttttttctattttaagattgcacattttttttttaattttcattaaataatatttgctttaaattttgcaaacccccaaaattttaataaataaatattattttcatatattgttatgacttatatatacacaattatattttcaaaatcaaatataatattacaactattactctaataaa

SEQ ID NO: 216347 - DNA, 829 bp, Cannabis indica
atgttttttacatatcaaaatgaatattttaaagagtagatcacaatatgcaatgtttgagatcaaataattattagtgtacccaaaaaaaaatatttgtaaatatatataaaaaaaaaaaagagagagaagaaagagaaatatttaaatctaaatatttattaatatatgtacaataaaaaaaaataaaatgtacaagacaagataattgatataaacattaagatatattgtacaaaaagaaattaaaaaatgtacatcacaaagataaccaagaatgtatgaactaaaacaaaactaatattaaaaaaaaaatatagtcttgtcttttgacatgctttgttttgtctgaggttgtcctctgttcttgtcttattgagtgtttgttttgagttgggtgattatggcgtcttctagtggtaataataacatgtctcttccaattctggcggaagaggaggaagatgaggcgttggcgtacggtgttgatcagactgtggagtttgccatagacgatcggtggtgtttagtgggtcaatttttgactgaacgcaatatagattttgatgcaatgcgccatctcatggcttcgttatggcaaccgggcaaaggtatgtacgttaaagagcttgattcaaaccggtttttgtttcaattttatcatgatgttgatattgaaagagttattgaaaagagtccttggacattcaacaatttccttctggttttccgacgattaaagaaaggtgaagatcctaagctcattcccctttcccatgtcgatatgtgggttcagctccacgacatacaatcgggcttcaaaactgct

SEQ ID NO: 216348 - DNA, 938 bp, Cannabis indica
attggcctactaaatcagaaaaatacaagagtgaaaaccaaaagcaatcttgattgccttaaacacatatataaataattaaatacaagtgcatggtcatggtcatggtcacttctttgttatttctatgagtttagttttcttcagcatgttcagaattggcgtgtaatataagaataccctaaaagaaacttcatgcatccagatgtctcatataattgatgatgctaatgctagagtcactatatgtatgtgaacaaaattccaatttctaactaaaatcatatgttaagaacaataaaaattttataattgaaatgatactgacattggaagaaataaccaacaaacataatgaagcaagaccgattagatcttatttaccatgtatatctgacaagtacatgcttgggccagtgttgagaatcccagaattgttgacgaatgcttggatgaacctcaatgtctgtttggaaaaatgatacaaaaggccatgatgaaaacaaccttagaacaaaaaggaactacaactttatacacccctgaacaccaatagttcattataaaatacaagaaattcctacaaactgttacagtaataaagagtgatcctttctggtgaagtgatttccgccattggagctggtgcggtggtgcctatgcacaattaaaatgaatgctgagagaaaaaagatgtattaaaatgaatgttggtgcagtggtgcctatgcacaattaaaaaagatgttgagaatgaaatgtgaatgaatgaatatgaattcagataaatgtatatatatactatcatatttccacccatagtaaagccaaattttccatgtcacgtatatgtttggtacattacaaatctactccaatcccattagctctattcttgggaagtttacacacaatagagggtcagtccaaaattcgga

SEQ ID NO: 216349 - DNA, 451 bp, Cannabis indica
atagtgattaattttattaacctttacatcaagatctaaggttcataaataaatcattacaaatagtgattaattttaatcactactatacaagaaccctatatttatattattatattatacacatggtataaaagtggaccacgtgtctttcatcttctatataaacatatatgtattttaaaaaggtaatttacattattcacaagtattgccttttttaactactaaatttgcagtcgcaactaccataatatatatttgtagtcacataatatatattgatctagtagtttacttttatgttttatactgactaaataattagttggtatataaaaacattgtaaatataaatttttttataattgatattttagttattgaaaattattaattgctatatgacaaaatattttgtcacaaacttaaaatttttagtgactaaata

SEQ ID NO: 216350 - DNA, 512 bp, Cannabis indica
cgtatgaaaaaacaaaaatcatgagcacatcaaagtgactgtaaatacaagtttgatttttttgacaggacacgaataatacgaacttaagagatacaagtatgacctgatacaaaaaaatatagacataaacacgatacggtacgatgctgcaaatagttggcacgacacgtattgtgcgaaacaaaaacaatcaatgacttacgatttagtttaccgaaccaataaatacacaacacagtcaagaaataatatcccaagagatctcaagatttaatgaattaagcaataaaacagaaaagaataacactatgtttaacgagttcgagccatgtgcagtcccctacatctcagtcgtaacaacaacagtcatatctttattgatatcagtgtttacaaggttataagaatcctcacaaactctcaaaaattacgagaagaagtttctccttttagtttagactatctctctctttcaaccttacactgtcacgattttcactcaagcaaat

SEQ ID NO: 216351 - DNA, 513 bp, Cannabis indica
ataaattttcaataataggtaaattggacaaaatctattatattaatatataactcaaagcacaaaatcatcaattataagcataccaaaccatttataataataaaatagaagaaaactctaacaacaacttcaattaagaatctaactaataagccatcaacgatcaagaataaaaaaatgtgagatatactaggtttctaaactaaatgatcttctgatatacaaagtatacctgccaataaaatttaggacataacaacgttctttgtgtcctgtttgtagtggggcggacaacaccattcttcatggactagtatcatgtccagaggcgcaatttttctagaatagaattggtattaacacaactttactaccagtcaattttttcttgaatggtggataacttctttcaaggctttggattcgagcaatgttgtgtcttaatcattgtttgttgtgctatacgaggtgctaaaaataatttggtgtggaagaaaaagatgatgaggg

SEQ ID NO: 216352 - DNA, 655 bp, Cannabis indica
aaggctagttcgaagaggaaacaaagggagcagcccaagcagctatatcgtgggtagccacaattagggctgtgggcggtttatccaatatatatttttaagggcaatttacaccttatattaatttttttcattttatttcttttttattgttacacggcaattataacatttttactgtgtaactgttttattttttattttttattttgaataagtctaattaatttaacttaataatatatatgtgtttaatttaaaaaaaaaaaaaaaaaaaaaagaaaggtatagtaaaagttgattgatgtcttctacatcactttcatgtccgattgttttattttttattttttttttactttaaatttgaaatttaagtccaacttactgacatgattctatttttaaaaatttatatatttgtttatatatatatgactctttatatgtgtttagttgattgatgggacaacttttttttacttaaatttgaaattgaacacaacccactcaggtgatccccattctcaagtttatatatgtattatgtttctctctctatctctttttgtgggttgatgtttatagaaaaatttttgagattggtgtcaagataaagaccattaaccaaaaactttacataaaacttttctct

SEQ ID NO: 216353 - DNA, 634 bp, Cannabis indica
  modified_base (572)..(572): a, c, t, g, unknown or other
  modified_base (584)..(584): a, c, t, g, unknown or other
aaaataagcatagtttatttaataattttggatccttttgatttatttctacattactttggactctttatttcaaacaactatccaaacatgaccttttactttgtagaaagcaaatttaataatactcaaagaagattttcggtcagataaaaccaaaataccatatatttatttaattaattatttgataaaataataaaaaaaattattattttactaaaatgtatctttggaaataaaaaatttaaagcgttcaaaataaattttttcgtgttaatatattttataattttttttaaatttgtgtctattatataatttttttcttgaacttttaacacattatatcaaatcatacgtactaataaactttcaagctatatatttccttgaactactaattaaactactacaaaagaagtattttccgtcaatcaacacaacagtcaaagccaggaattgacgaaaaagttaacgaggaaatttgctaagtcggttatgcaccgacacaaggtagcgtcgctttatactaacgctagcttgcgttagtgcacaattgcgaaaaaagngttattaataangttgctcaattttgtcaacaatgcaaaaatgatggtccatcactagctgc

SEQ ID NO: 216354 - DNA, 564 bp, Cannabis indica
aaataggtgttgaaatggaaagaatcaaggtaaaatatctctcaaaacacaattaataagaaataatttataatagaaaactcatcaaaaatatatcaaacaaagcacaaatcaacacttaccaaaagaaagataatttaccaattttcttagcccataagtccagttacatgactccctttttttattattttcttaaaaaaataaaaaagagacaaataaactaaaatatttcatacaaaaatcaagttattctaaagcatgcatctttccatgtttcataaaaaagataaatatctatgttatgctttcaaagatgataaaagattagtgtctcaaatacaaactatacttaccaaatgttgtgaaaaaataaacaaggttacatgacatattatctgaattaggatttttttttatttgaaaagaggagacttacaaatttatacacacttatcagacattagtatgtgcagtaaaaattaggatcattgtccttggcatgtttttttatttttcgtctttttcagtttgatctcaaaattggatgctttcacaccatac

SEQ ID NO: 216355 - DNA, 551 bp, Cannabis indica
aacggttatttttttgttgttctaaattgttttgcttaaggaaattcaatatttttataagtttatcttttacaaaaattattacatttacatgtatatttatatagacataatgaatctcaatagtttcactaaatatttaaatatttaagatggtggtatagtaatatactttactagtaaaactaaaaaggcctaactcataaagatttccttaaaaaaaatacaataaaataaaaaatattaccaactcagtacaacaaacttcaaagagaatacttgatccttcttcgattggtacccgaaatgggtttctggtccacccatatgagttatgtggtggcgctgggcatcgatccctcttccctgtttgtcaacctttcttttcttgcattaattggagcatttattgctctgacggtgattaggctccaaatctcagttcagatgcatttttcaacccaattaaatgctttttaccctttcaaaaccctccaagtcgtttatttgccctctaatttattttttctctctagtaatctggctatcaa

SEQ ID NO: 216356 - DNA, 722 bp, Cannabis indica
aattctctcaaacaatcacagatagagcatcatcatttgaggaatcttcttcctccaccaggactgcttttccttttccctctacaggtgttggtggctgagcaagcatactaggttctttaatcttgttagcatcttctattggtgcttgctcggtcgggggagctatcctcttcttgctcgacctcttctgctctgaatattattgagcatcatgctcctgctctgaatattcttgagcatactttttggctccaacacctcccttcaacttagcctcatgcttaagttgaatgagctctttcacctgctcggcatcctcagatcgactcaccttggacttcttcttctgcttcacgtgctttggcacaaaatcgtccagatagagcttgtacttcacaaagttggcctcagtggtcaacaaagtgatattctgagcatcctctggcagttggagaattttttgtgccctctccctatgtttcaacgtgaaaggatggtggcagtacgaaggaatctgctagaaccgagtgtggacggtctccatgcacgtcacaaagtagtactcgtccatgaagtaccctattctgttgactgcagggtctacggtacccttcagccacttatcatccagctgagagaagtaaaaataccccgacctgctctgcttgagaatcgacttcaggtcaaaaagccaattggtgttgtgcagagacgactca

SEQ ID NO: 216357 - DNA, 859 bp, Cannabis indica
cttctttctttcgtttttggagtggggtatgtatgagtgaatagtaaatttatttagttcttttaatatatgtagaatgtagaatttagggcttacttcttcttttccctttgcttcttcttcttaaatctaagctggctcacttcatcttcttattgaggatgtaggatcatcaatgtaggccaacaactttaagagaaagtcgatcgaagtctgaagattactgcataaggtattgatttctaacctctttatttctttgttcctttttttttatttttttttttttttttttgaaaaatggcttgggtatgcttcttacgttttttcatggaaacattttgaatttctaattattaatttgagatggttcattatttctgtaggtattcaatcatcctattcatttctaacctctttattcctttcttattactcttttttaaaaaaaaaaatggtttcagtatgcttattacatttttccatggaaacactttgattttttaattcttagtttgaggtggttcattacttggtttctgtacatattcaattctcctaatgttcaagaacacatttcagattttactggagttgtgtcttgttttaggtttctgtgctacgaagttaagaatggagttatagtttatcattttctgttttattataatcccctaatttagtctctgtagttgttggaagtagataatgaatttagtttgttattggtgttttactactaagttaagaataaacttatagtttatcattttgtgttttattgaaatcccccaatttagtttctgtatttgttggaagtggataatgaatttagcttgttatttgtgttttactaaag

SEQ ID NO: 216358 - DNA, 799 bp, Cannabis indica
cttgaggtaagaaaaatataatgaaccacatagcatgacaggttttgtgatcaccgtctgtctgattagacagtaataatatgaatgtgacatacaacgtacttcacctgattaggtgattatgatgaatggattttaaattgtgaaattagtttacctaattaggcaatatgatatataaatacacatgattaggtgatatagtgctaagctatgacataggttgagcttgccgaattagacaatgtaacatatgcatctaaatactatatttagtcactaagtaattttttagttgtgactaaaagtcacattaatttagtctacaattttttttttgtgatgtaactgaaaaattgtcactaaatataatctttttttttttgtattgaccatacctcaatcagcgtctacaataaaaataaaccaaaataaccgtaactaattaacttaaaatatattttttataattttttatttatctcaccagattttaaaatctttcttaggattgttttatttatctttctgttataaatgtcaacctaagtacatgatttacaagcaagattttcaaaattttctattatattttcttccctattttaatagcaatggtagaaatttgcaacttttattttattaagtcattcacgaagggagagagaagaacatactaatagagtgatagttatttggaagtaactaggtaattactaggtagggtaattattagggtgataatatgcagtttagtaattacattataatttaaaaatgcaaggtgtgtttggatatg

SEQ ID NO: 216359 - DNA, 579 bp, Cannabis indica
ccagttccttgaggtttcagttccaaaagcttgaaccttttggagttcagatttgttttagatgttattaaagcctaaaattatttgtattttgtcaatatgagttaactggcgacttattaaccttaagtatggtgagatacaactcactacaaaaaaagggacattttatcccaatttttatgcttaaggaaaataaaaaatggaacaaaaactatgttaaaagtttttaccccacttttgtataagacataagggtcatgtttggtttagcactataaaagaaaaaaaatatactaaaaaaagttaaagattattttttaattactagccaaacacgcccctgatggttctttaaccacactttggagcaagggccttgttcgggtggtcacgaaaaaattaatttttcactctttattattttgctagaaccaaacggggtaaaagaaaaattcttttatcctagtttatatcaaaaaactcggataaaagggtttccctaatcatatatgtaaacacttttaggtttaggtttttatttatttggagtgatattgttagggtttatgccctgaa

SEQ ID NO: 216360 - DNA, 528 bp, Cannabis indica
atttgattatttaatatttttaaaattaatatttatagttaaatttatttagtaaccattcatgaataatacccattgagaagtattttatataagtattaatttttttagtagatgaaaaataaaaatttattgatcagacattaatcattcactcataaaaaaaaaatatttcttagataaagaaaagtaatttgaagtattattaatatacacgaataatataaaaatatttataaacgatgtgggactcttaatttgtatttgtagtttatttttcaaacaaaataagaaaatgtgtcataaaaattaaaaaaaataaaaagaaataaatataagatatcatctagactccacctgcgttttatatatatatgaattatttttttaaaggggtattacctattgatgagaacttttaacaaaaataattataaattaatgtgcattttaaaaattaatattttaaaattgatattttaatacaatggtcgataaggaaagaaaaattagattttttgtgcttaa

SEQ ID NO: 216361 - DNA, 924 bp, Cannabis indica
cacaatgagaatgacacctatgctcgatttgagtctacttagtagaaaaggtctttcgttttttctaggttaaattttaggaggtatttgtaacaatgatttcaataatgcagcttatgtgcacactgtatgtatatatataagggagaaattaagattgaaattttgagaaatttttatatgtatatataaaaatttcttctcacggatatactattttttatttcaatattttatttgaataaagtaatataaagaaaaaagggtagctacactgctacactaatgaaaaagggtacatcaaaagattagtcaaaaaaagttaagcttaaaaagaaccaatgtttattatatagccaatgtcgtagaaacctcattaacacaactcaacatatccactcaaagcaccaattttaagaacctttccttcattattgcaagatgtaaatgtacacaaattaaccagatcaatcacatagtaattcttacatacataaacatgtttctaaaatataaattgtgaagaggaagaagaagaagcaataatatcacaccttccagtgatgatccttgcctcttaagttttcctgccagtgatgatccttgcctcttaagttttctatcatccaagcaagttttctctttcatctctttactattactgtgattggtgcaatgtggtgcttcaaatttcgtactcatccttagtgattccctcgggctttctcagccaaattggtttttgcttattgatgagttgccactcatggctaacctccttaactttcttcttctttttcgaatcattctctttctcttcgtcacttcctcaatctcaccctctcttcttcttcgtcttcatcctcatctatcactaactctcccttctcgatcggtcttctgtaccaaggtaaatcgtatagc

SEQ ID NO: 216362 - DNA, 706 bp, Cannabis indica
tttcgaaaagggattaattgaaaaaacaaaagacaaaagaaaaaaaattacaaaaatataacttattatggaattttaaatatttttacaatttttaagattttacgtatataaaatatcattttttaatgtatttttatgttggtgtacttttatcattttgttattatttgtatattatttttttatgttattttattattattatttttctgttacttttatttaatttttttattatttacttgtgtctaaataaaatactataaaaaatgtaaaaaaaaaaaacacaaaataataaaaaaattaaaaaaaatcataaattttttacaaaaataacaattttttaatttccctttcaactttttttttctttcaaaggaggaaaaattaaaaatattgattttaccggctactttttgttgtttaagcttagtaaatataaatatatcattgcattttccttttccaaatatttaaccgtcatcaaatgtaataattgttatgggataccattaccatcctcaagtttggtttatacttctacggtaataaatttgatccccactccttgtccttgtttatgaataataataataactttacttcttccaactttgtcctcttaaaaataataattaaaatatataaatcacatagttgagtgcttaaaaccattagaaatactaaattgtcgaaaatactc

SEQ ID NO: 216363 - DNA, 457 bp, Cannabis indica
ttatgctagagtatgaatcagcctttcaaagcatctactctgagtgccccactctagaagaagtaacattttgcatgctgacgaaagacgagttgagcacgagtttggaagagcttgaaatggataatggtaaaatttttgtgagtggaaagtatatggaactcctttgattccccattccctctctactggcgtacattctctcctttacgaggattttcatgatccagcttgtttccaactttgttcaaatagttttgggtttagctgcactctcatgggcataacgtttctcatctctaagttcttctattacttcaatagaaccatctgcacttctcatttcatctcttggtacatctccatgaaaagccccaattatttggtctgtggtcttccaacttcaaacaaaggttgggatgcctatatttctataattggtggcaactggcttccc

SEQ ID NO: 216364 - DNA, 720 bp, Cannabis indica
gccaaaaatagaattaacatagctcttaaagatatatatggtcgatctgcatggtcctatatatagttaaaaacaacacagttatacgtacctatccttatagcaaccaaccgcagcctagctataataaatatatattgaataatattcatataataataactatatattatgtataaaatatatattatattataagtctaattctctacatgcaaaaaaccaaaacattcctttattttttctcttcatctaattatacctcaaaaaacccaaacaaagaagatgatgatcagaaaaaacgacatctcaagaagtgtcgttttgtgtgtgttttttttggttctttgttattgtccaaataaattattgggccaaataaagtaaaagttggggtaattcaaaatttggagagtgattttgggaaattaggtttgagttgtataaaaatggctttaagagatttttatacctctaatcctacttataaaactaggcttattctctttactagagactctaaattcgatgtcgttcaagctgctgcttcaagtcttaattttaacattattaattcttttttttttaatttcatatctatataaatattaaataatatagtatcttgttctttttaatagaatacatgatataatgtataaaaaatataatttctttttcttttgtgtatatatatggtgggtgtattataatacctac

SEQ ID NO: 216365 - DNA, 580 bp, Cannabis indica
agtgacacaacaggggcagatcctgtaggatcttgaattccatgtgaggatgtcaggttttactctgggtgtggtgggaaagttggaggagagatatgacatcatattttgataattcactttggctagtgtgttgagtttagtggggaatggcagagactgagaaaccagttaggatgctattgtcataatctaggagacattaggtggctcgaacagaggattagcagtaggggctgtgagaaatggtcagagtttagctatattttgaagacagaaaaggattctgggagatcgaatcagtgtgtgagataaagagtgagttaatactgaatctggggtttttggactgagcacctgaaaggtggagttccattaactgagatggaggagaggtgcagcaggcttggtgggcaggaatctggagttccattttggtcatataagtttgagatgccattggaccctggggggatgatgagtaggcaagttggatatatgaacctggaatttgagtgaaaggcttaggctgagatgtattacgatttgggagccatcaacgttatggatggtagctaaa

SEQ ID NO: 216366 - DNA, 745 bp, Cannabis indica
cctttacccaaaatttagtatttttgtaagttttcctttctttttttcatgcctcgattaagtgggtaccaccaacttcggcctcttggccgagaagggtgattacttatttgggctttggctaactgtgcatcatggattcttttccaatgagttttccatctttttagtagtttcatttatggaatcatcacgattttgggaaggagggggctttgatttggtttgctgcagttgctctctaacaattggcactatacttaggcttatggacaaggtggtggcttggtgttaatcccccgaatttgggtgttttgtttagtttttgtctttgtcatttatttaacagtttttggcgactaaacccttccaactgtcgtttcacttgcatttaaccctaaaagcttaaattttaatagtgaaaccctccaaattactgaactagtatcatatttaaggtgtcatccagttaactgtcacaatgggctacttatgtatacacttttgtacacatgatacatttatattagtacacctaatattattatttaataattattttcaaaattaattttaaaatttaataaaattataaaaatcaaaaattaaatactttaaaaaataagtaatttagtggcataaatacctaaatttaacttactagaatatctgtgggtatatggttgttaagtgttaagtatattgtcacgtggcaatcctttattggtccaagtgattaaatttt

SEQ ID NO: 216367 - DNA, 801 bp, Cannabis indica
gtaatccttgtaatatttgatttgattaatgcataatgtttcaaaaaaaaaaaaaaactaaatctaatcaatgtatttaggactatttttcaccttaatccaaatataaaatctacacatagtgaaaatcgaatgtactataaacaaaatagaacaaattgaattggaggaacagccccgaacaacaaatttcttttttgcattaatcaaatgtacttagtgttaacgaacataagaaatctatcgaacaaaatctaaaaaaaataattcgacctggtaacgatgaattacttgcccagctctcatttaatcttattcataatcagtatagagtgaaaaaacgagtgagcacacattaaaccaaaatatttttcgattcctcaaagggaaaaaataatagagattttcaagaaaacactgaaacatagatagtccattacaaacacaattttatgtatatatttcaagagacggtggagacctgagagcaggctctctcacaagacaatgaggctaataatatatcagctaaaggatctaatcaacatttatcagaattatgtcaaagaatttgagagaaaaaataaatcacaaagcacacaattctcacacatcaatatccacaagatttctaggcataaaattatagacaattgtcttgtctgccaaagaaatggaaattgggttcaggtcagggcaccaatgaaatatccttgaagtattcatgctcaagggcactccttgctgtaattctttttgctgggatccaggcaaagcattttctgtcaagttgccgaaaag

SEQ ID NO: 216368 - DNA, 423 bp, Cannabis indica
aatgattaaaaaattaaaaaataaattaaaattataaaactaaataaacgatttaaaaaattacttatttttattaaaaaattcatttagatattaaaatttttgtaaaaactaaattttaccaaaacaaacttgagtatattttatttttctcaacaaatgtaaatttgtttaagtaaatataaaaaaaattagcttaatttataatttttttttaaaataattttatatttttattgaattaaattcatttagatattaaaaatttaatttttgtaaaaactaaattttaccagaacaaacttgagtatattttatttttctcaacaaattaaattggtttaagtaaatataaaaaaaaattagcttaatttataattttttttagaataattttatatttttattaatttttaattattt

SEQ ID NO: 216369 - DNA, 613 bp, Cannabis indica
acttacattacaatgctatgttaaaaaaagaactaaatagaataatctactactccaataataaatttatttttaattttataattacactaatattagttttaatacattattaaataatatttcaaatataaatatttaattttttcaaacaaaaaatttgtaatctttaaaaaataaaatatattcaaaatcttaaaaaagactaaaatcttaaatgaaactagccatacgtggctcggcacgtacattcacctagttataagtaaaataccatcacaacaacttgcacaaaacctaacaataacaaaaatatctttacaaaactttcagtttctatggaacttatgttgcaatcaaaaaccaatattattatgaaccctcaagttagcttaaaattctggaaggaactataattgatgaaatgtgagtttttacatataaaaataatacaagtaataaaataaagaaataggtgtgtttgagtgcgagaaaaaaagagagcgcaagataaagagcattgtataattattaacaacttaattcatcccatctaaaataattacattgtttctttaggtggtgtgatcaatttttcacacaatcttcaaca

SEQ ID NO: 216370 - DNA, 732 bp, Cannabis indica
tctacatgcccaatgatctgaaaatcaagcttctggatctctttactcctccgccccatggagagaaaggagaccctcacactgaattcagtacttacttttttgtcccttattaatgtaattaataattttatttatatatttaatagatttttttatatactttgaattgaaaattttaatttttttttattgactttttttacattcttctttataaaagttaattttatcgttaatatattggaacataaaattgggttagtattttaacacaagttttacaccattcattagagatagtgtgcaatggtgcaccacatttacccccacaatattatagaattgtattgataaaaattaaaacaacaaaactaagagcatgtttggtattgttttctgttttttgttttcaaaaaattgattttaaaaatgagaacaaaaatagtttttgaagtttttaaaacacaagtcatgtttggttagtgtttttaaaaaacaatattaactaaaagtgaattggttttcaaaacagaaaacaacattttgttgttttcaaaattcttgttttttgtaactttgttttctgaaaactgtttttaaaaaacaaggccaaacaagccaaattatttttaaaaaacaattttctgtttttaaaagtaaaaaacagttttttagttatgatgccaaacatgcactaagtaacttacttaatttttgtctctatctcaa

SEQ ID NO: 216371 - DNA, 779 bp, Cannabis indica
ggaattaattttatgcttattaattaaggagattttagttaacatgatcccaaaaagtatcgagtccgccctacaaatacaaaagtattaaacaaagactacaacgttcattcggttaacttagatatactctttatataaagtctacactacagatgtcacaaagctttaacatgcatcggacctgtactattttgacggtcaaagggtatatgagtatatttttgagcagagaagtatttttaaaatatatgactttataattaattaaggatatattcaaaaaactattatatttaggggtacatttgaaaagttattgtataattagaattaaagtataattttgagtaattataatattttgtatgtttattctaacaagtaattatacaataaattatataattagagataattaaatagttttaattacattttttaattcttatgaacctatgagaattggatgtaattatacagtaattacacaatattactatttttagataattaatattgttactgtgtgcttactaacttatttgtcaaacataaaagtaagaattcatatacaattattatttataatctaattatacattatgttttaaaatagagtgtaattactctcacatgtaattactattctatacaattgttttcaaacatactttaattatataagattcaatacttaattgtaccagtaataatatttcacttaaagtgtgctagataccactaccatttaacagttctcatacataaatatataa

SEQ ID NO: 216372 - DNA, 525 bp, Cannabis indica
ccggaatattatatcatatatatatgtcaagccaaatggtgcactgctattatttattagagaaatgctaaagggcaccagtagtacttaacatcttcttatatgtcagtatcattattggttcaactaagtatcgggttccacataatttactataatagattttagggagtatcgctagtcaatcgcaacataacatatcgagaaggtgctaagtaccacgagtgcctaatcgcaatgctctatctattattacattttatttttattaaacaaatgttaggtagtacataatttgaccccaataataataataataataataaattaaaaatcaaaaaaagtcattcaagccaaatccatatttatatgaagtattactattggtagtgcatgacactacttaaatcacgattagtgatattaattacctaaaaatcattacattaaaatatataaaactggatagttagcatttctatctaaatatatatttctatccctaaatataataatgtaataata

SEQ ID NO: 216373 - DNA, 579 bp, Cannabis indica
cagttgacattgaaaaaccgtgaagcgcgaatgaaattgtataggaaaatggtgaatggatttgggctatgtttcaatatgaacatctcccaacgtttttgctttatttgtggcatcataggccactctgtaaaggttttgtgctaaatgttttgatcatgatatcgatcaaatcgttaaaccgtatggcattggcatgaaggcgtagatgagaagaagaaattatcagattggttcacaatggttgcgttctggaacggagcaatagccggcggtggagaagtatgatgatcggcgattgggggaagaagggctagctgattcagtggctaagattatggaggttgattccacttttcagggtaatggtatcaatcctgctggtgccgataaaggaaagaatttgagtattaaaagtggtgttgtatctagtcaaagaatagggaaagtgaatcccatgcaatcagctgataacattaatgtgggagaggatggtgaagatatatccaagattatcctagattcaaaaaggaggcgtatggaaggtgggaatataagtgagaatgctgatgtggcaga

SEQ ID NO: 216374 - DNA, 571 bp, Cannabis indica
cattgtgtcatatgccttttgcaagtcaaatcttgcaaatcttgacatatcattatattgtgggtaatatatcgacctttaataacttaaagtcgttattacattcaaagttattgtcattatcgcatctcatttatagtcctcaacttcgctgcaaatttttttttctaatcacgttttcttattaaattatttgaataaataatttcatcaaacattttttaataataaaaacaatcattcaatacaatacaataaaatttatatattcttctaatttatcctaattaaattacacaaattataattaaaaattataaaaataatacataatttataatgtcaccgcctcattcttattttatgtatatatcttactattataaaagtgacttgttggtgtgatatttgttgactattttacccttacaagtttaattttattacaattctatgttctttttttgtcattaccttcataatcataaattgaagtcaaatttctttcaaaattctacttttctaattacataaatataagtattagatcattctcttgtttttttttaaa

SEQ ID NO: 216375 - DNA, 1022 bp, Cannabis indica
atatattttatttaagttataatattgtcattaaatttttaagttattgttagttattttaaaaaaatatatatttaatttattattattacaatagatttttttatccgtacgtttaattacacctcgagtaatttttaaaaaattgtttactaaacataatctttgttccttaccaaaaatatttataacataatctttattttttttttatagataatatgccttttctaagaagaaaattctaacatttctctatggatctatccctaaaatagtatgttatattatttttttaattaatgcattgaatatgttttaaaatattgtattcttatcaaataaataaaatttatataatctctacaattttaaccagtacataaaactcttacaaaaactaaacatatatagatcccttaaaaattttaaaacaaccataatgtaagagaggcaagaatcaaacctagcatccacacatttttataaactctctcttactaattgtgttgtaagacttgaaaattattgaaccaaaaactatatatattatattgttattttcatatatatataatattaattttaatttttgagggcctctaaaattgtggggcctggacctaggccccggctatcccaccctttaggtggccatgattggttaaggtaataaaattgaatagaatgaaaaataaataattgttattattgattttattgtattaaattaggtgaacagctaaaacatctaataattattattattatactaccccaaaaatatctcatatgtatatacatactaattaggtgcacgtgagccgcagtttaaatattttttcaataaatttgtaatatgttgattttttgtcttgctcttcaatgatttttttgtaaaataataagagctaaaattatttattaactttgtatctattaaaagtatttaggatattttacacatgttttatttttgtaaaatataatactttaaaggtttttttatgagagaaataatt

SEQ ID NO: 216376 - DNA, 617 bp, Cannabis indica
aaactttactaaatatacataaaattatatgaatgaagatcctgaaacaaaaaaatgtaaatactcttatataaatatcttgtaatatcatcatgtaaatataaatattgaagaaaaataaaagtagtgtatgaaataatgcttactcgtccataatgagaagaagggtcagtttcaacataaccagcaagctcagctgcaatcttaactcctccattcacactccttgatgatattgatcttttcatatcttttttataaatataaatatatttatagagaaattaaaactaataagtttgtaataatttataatagtaatattttactatagagtgtactgttggtttttgggttaaaaaatccgaggctttctaattgatgatattcataagagaaaaccctaaagagcaaaccaaaaagccttgaataatcaacactaagcataatattattccaacccataatatcttttaccaaccatttaattatgtatagagtttatttgtcggtaaaaatctccttaagtaggccaggttttttcaactaacccccaaatttctaaaaattttggtggtaaaaacctcctaaatccaagttctgttagcacttagccc

SEQ ID NO: 216377 - DNA, 1233 bp, Cannabis indica
aaacagtggatttagttaacaatgatcctaagtaaaataatttttttctttcagtttatttgtaaatgtattgtccttgaaattatgatggtcggtagcaaaggaaaaataatgaagttttgccaagcctgctatttttagcctttacttcacaatctttagcaggtgaagaatggaaggtccttaatatgaatcttaccaagagtaatttgaaaaaaagaaaattaaaatgtttacaaaatttaatttttatggctaattataacttttttttttcttttttgacatgtactaaattataccatttgatttgttaagattgttaaaaatgcctcttaaactaagattgttaaatttaagaatttttgttcaattttagtataaaaaatttaacatggataaaaatttaaggacataatttagtacataaataattactaaaataaaatcgaataaaattaaataaaagtttttaaatcttacagtttcaatagtttaggaagaatatttaactcctaaaaatgtttatgggcatattagtatatttaagtttaatggataaaatctaataagttatttattgtatattcatataagttttttaattgaatttttaaatttattgtcgtgtctacaatttcagctttaataacacataaacgaattaaagtgagttaccatgaatattacatttaattttttttagtggattaagattagaaaacaatgagacattgagaattaagagtgtttattttaattgattgacatgatacaatctaattcgtatatattaaataaaaaaaaattaaaaattaaatatataactaaattttaatataaaaaaaatagtaatttaaaaatttaatacatataatacacatatttcaaaacttaataaatcaaatgtatatttcattctcatattatatttttttttctacatgtaatttaaaataaaattaaacatattacatacaatttttttttcttcctttaaatttgttaattgttattttatttattttaatttattattgtagacataaaataaaaataatttattttattttgttgatgtgaaaaaaaatatatttgtcatatatatgtatattaaataatttaatattaaaaaataaacaatccaaaataactgatcaaatctgtattttgcggattgaattgaatttgagctattgtacagattggattggatctaaaatccgcacttaa

SEQ ID NO: 216378 - DNA, 513 bp, Cannabis indica
cctttagtagttttattttagtttttagttttttacgttttttaagttttttttttgttttttttttttttttttttttttttttttttttttttttctctgggtttgtctggttttgagaaaaattttaatccactttttttaatagtcctctacgtttaattatttaagacatcatataaaattttgagaaattcaaaaaaaaaattaacacgccgaaagtagtgtttaaacaattttgttacatgtgcgaaatagactattaaaatcctattttcagtgtcttaattttttttttaatttctcaaatgtcttaaataaataaaatttaaacaaccataaaaatagactaaaaaataattttatatgtcaatataaataaagggtgtgtcagtaaaactcttttcgaggtgcattataaaagtttacattaacatatataaaacaatattcggtaatatagagcttacataaacaaaatgccacactatgattttagaaagatgaattttt

SEQ ID NO: 216379 - DNA, 1091 bp, Cannabis indica
atttaatataatacgactcttacacgacctacgaaacgagccctaagatattaatacacaaaagagagttcaaacgatttattaaataaaaaaaaaataaacggtttaaattttatttttaacgtgttaaattattttaaatttcttaaaaaatataatatatttcaaataattataatatacacagttatataaaaaaatttaaaattaaaactcgataagaataagtgtatcaatatatatattttttttttatataaaaatgaactgtagaatttttcttaattatatatcttgagaaaaattatatgttctttgattaagttggttttagataattttatttatgggcgaaaattttgactaattacacaaaaatgttatcttttgttaattgagttcctgaacttaaaatcaacaaaactcttgttgactcgtccaaatagcttacttaataagtttataagtatatccataaaaatattatatgattattgtcatttgtcactagtagtatattatatatatatgtaagaaataatctaatcttcctactaaaaagaagaagaaaaaaaagtggtcaagagtttagactgaataaaattaattatactttaaccaaaaccagtattacctaactatatactgtcatcatactacatactttataactgtcacatttacagggtgttaaaataacaataaatacgatcacgaagggtggtaagtagtaactacgaaattgaataaaatgcaaatataaaaccaataatagcataaatgtattaataaataaataaataaatttataattaggagtagatatatgatggaataggtagcatgtgcaacatattgagcctaaaaaggccagcaaagcgtgacagacatacccaataaggactgacttttatggaaaattattaaccattttgtgagttggtctgctcacatctcacttttattagtatttcatatcaagttttttaataaactctttcctttttcttttactgttttatattgtcattggtttgtatactttatatatagtttgttaattttatctattttagacgtttatatatgta

SEQ ID NO: 216380 - DNA, 504 bp, Cannabis indica
aacgctgagtggatcgcctctgctgatgtgtctggaagtgtcaggatctggggactcggaatgaatttgtttgaagatgagtttaggttctttctggtcggattgatgatcttcagtggtctcctgatgggatgaggatcgttgcttgtggtgatgggaaaaggaaaatcattggttcgtgtcttttatgtgagtattatttttgaagttttgttttttaatttaatttttctgtaatggttagtgaattgtgtttagttagctgagatgaatttattgtaagttactgttattaataggatagtagaaggaattttggatttgggttgatagttcataaatggttgatttgatcttccatgttcatatgcaaattagaatatttgagtatataatatatatatatatatataatatatatatatatataattccctgatgctattgaggctcttatcatggaaaaggaaatggtgatcacgacattgagattgcctagccact

SEQ ID NO: 216381 - DNA, 638 bp, Cannabis indica
gcggtataaatacctaagtttaactcgcagttacaaataaatacctaagtttaattttttgcgacaataatactaaagttataattctggaacttttgttgatacctagctattaagtattaagtaaattgccacatgtcaatttttaattggtgcaagttatcaaattttattttttcgaaaaaataatttaaatataccaataagaaaatgacacgcagataatgacttaaaatttaacaattaggtacctacagagttcaaaaaatataatttaggtattattaccaccaataattaaactgaaatatttatttacaattaggaattaaaattaaatatttataccgcaaattaatcttttcttttttaacatattcttaactataaaaaaaaaatgtaagtataaaaggatgaggacgttacttggtgatattttacccattactcaaactagattaagataaaaaggtaaaaaagaagaaaaaacaaaagaaggattaagttgaataaatcacacattaattgtttatagatcatatactatcttaatttagtagataataatatatattagtctagcaatacataaacacatacattaaccggagtcgacaaggactaaattaaacatatat

SEQ ID NO: 216382 - DNA, 528 bp, Cannabis indica
ttttttaaggtgtaaataaatattccctttccaaatccctatatttccaaaagtgtcctcttcattttcattttgtagtctcttagtaaattgtaagatatactgttgtaaacaaaagtatatagaattacaattaatttatgtaccgaaaatactaaaattacttttagagaatgaatattaagaacattcactaccaaacaatttttttatgtatgtattatatgtaaaattcagtataaagtaaaataaaaatggaaaaccaatataccaaatgttagggcaggaaacacatgttgctcttataatttcttaattagtcttctctttggatcactaattgacccggtaaaaaaaacataaattccaatatgcattatcacaaaatcaattccgcagctaaatatgactacaatatatttattattgaatgacttagcttaggcaatctaacctacgtgatctttagaaaaggatagattatgtgtagattttttaacaaaaaacttattattattatatataaat

SEQ ID NO: 216383 - DNA, 637 bp, Cannabis indica
aaaccacgatcaatttgcttagagcgactcatatataatagggataaaccctaatataatttttcatcatttaaacatcgaccacatctatctagcaaaaaggcaaaagcgacatccattagactcagagagacaaggggcacttaaagaagagatttacaacttattaattaatgacttcatatacaaggccttctatcccttgtggatttcaaacccagttcttttcctaaagccaaatggtacttggaggagctgtatagattttttagactttattaaagcatgtcctaaagattatttcccactaccgaggatcgaccagttagtggatgcaacagcaggacacgagctgatgacttttattgatgcatattctagatataactagataaaaatgcatgtccctgatcaatagtatacaagctttgtaaacaaatatgggactttactgttataaagtcatgccatttgtattaaaaagtgatggagcgacgtatcaattattggtgaatggcatgttttgaaaaaccgagagcagataaagtatggaagtttacgttgatgatatgctagtaaagtcaataaaaagtaaagaatcatacaaggaatctgtagaatgctttagtatacttag

SEQ ID NO: 216384 - DNA, 773 bp, Cannabis indica
aatatcaatggtccacaatgcgtgctgctgttcaaaagcatctttagagaataatctttttctacttttgatatttagcaggatatttttcttaaatatcgaggttcgagagatttgattggcttttatgtaaattgcatttcatccaaatttaaattattcaagagcttattagcttacctacaaataattttttcataatattttacgccctcattcttgcttagaatactctcaatgtctgagggttttagactcaacgctctaatgtaaaaatgagagtgtaaagaattgtgaagaaaattttaagtagacgtaatcagttattactgaaaggggtgaacttctataaattttgttgttgattatttttattttacgctctcactcgtttatttatggttggttatttccatcgtcaacaaacaagattgcgacaatgtttgggactctaattttgtgtaagtgaattattttttgtattcttgagactttactaacttactatctctaggtatttgtgaattatgatttttgaaataacaagttaaaaaacttcttgtgtcactttacatttttatttattttttttttcatgtattcttatacataagaaagaatgttataatagttttgtatttattacattattcacttggtaatgttttttttttaatataataactaattttattgctgagagtcaaacaatacattagttattaaacaaggagaaaattcttccaacctaaaaaccttgttttctatctgta

SEQ ID NO: 216385 - DNA, 1204 bp, Cannabis indica
gagcctaaacagaccattataactcttggagtagtcagttttgttttcataggcttagatctttaagctctttacattaaagaagtaaataacaatattccaagactctaacaaactttcagcaaaacaaggaaaataatcataacagttttctaactgttttctcagctaaaaaaacacaataaaatcacaatcaacaacaatataaatagaggagcaacctgcccatttttgaagtgtgtttttcggctcagcaaaatgagaaaatagcagctgccatttcttggatgaacaacctcagaaataagagagaaaaatagagagagttagagagttctattttaatacaaaccaaaaaaaatagagtgaagaaaagagagaaaacttgagattacctactgaactttgtggctaggaatctccaactccttgtaatcggttttgacatggatagtgaagaatcaagcgtctttgagggaagcttgacggagatgtacccttgattttgaggggaactccgaaatcaattattgtcttctttttatttttttgctggtttttcttttagtctttctctggttttgggttgtttgttgtgtgtgttgcaggtgcgaaggagctgctgtaggctcgggttagaaagctctcatagagcttgaagaagaagattagaagggctgaaggaggaagaaaaatgcagcagtggttgagtattgttctgctgcaaagttttgcaccaagaaggaaggagaagaagagaagagggctgatgctaggttcagatgaagagaagagggctgctgctaggaagtggctgctaaggttagagaggagaagagaaagacaagggctgctagggtttgtggctgaaaagaaaggctttatactgccattaaaaggctaggattttgagggaatatactcttgatccgcacaagagggggaaggtctattttgaccttggttttttgtactttgtggtgttggagtagggggcaatctgggtattgctttatttcttacaatatatatagtattttaaaataaatactaaaaataaggtttctatttttcttaacaaaatgtgagttaatattaatgttaattaatttttgtagtaaatattatatgaaatttttgtagaagaccgttctggtagattttttatctgcttcggtaactagaaaaatattttagttcaatt
